United States Patent Application Publication US 2011/0296543 A1 - sequence listing, part 20

SEQ ID NO: 87201 - protein, 155 aa, Unknown
  Obtained from environmental sample
  DOMAIN (1)...(154): Phospholipase A1
  misc_feature (1)..(155): Xaa is any amino acid
DFPFTQKADGAGLFFHGIKVAAAHKSNGRGDENNRSWNRVYLESPVSIGWFLFIPRVWWSFVGIGNDFYEKDIPRYMGMCDLTIASQWNSHVLRVYGRSNFNYKNINAALRIDYSYPIAATGLYFYLQYFLGYGESLIDYDRPVNKIGTGIALSR

SEQ ID NO: 87202 - protein, 266 aa, Unknown
  Obtained from environmental sample
  misc_feature (1)..(266): Xaa is any amino acid
AVQTYVNNTSGYYFDLSINNPAMGTVTPPPLPDNDGVYAGGTTLTLTPNANGSYVFGYWLVNGVKYDDNPLILTMNSHLKVQAIFGRPVTVNSLDNGANNTSGTLRYALYNAQDWDIINITAGPGTIQLTATLPQITKSITINGNGVTLARATNWNSGTSSETQLLYIRSSTAVVSISRVHFKDGRATNSGAAIRNGGSSDGGTLILESCIFSGNQTTSTDTTNYGGAVYSQGTLTVKGCTFYNNRSGYRGGAIYNTQDGTLNLTG

SEQ ID NO: 87203 - protein, 288 aa, Unknown
  Obtained from environmental sample
  misc_feature (1)..(288): Xaa is any amino acid
NPERGSATASPNLAAEGEAITITAIRNTGYVFVEWKVISGGITLDEANPSIFTMPDNDVIIEAVFDTIRPNTPYLEFELPMPEFNEVEYGYEAQTPLNITIINIGTGTGTAHITSIKLDERGNAAFELSGNLITTIPANNGTATFKVQPKPGLPVGNHEGAIIVTFDSERTVKAEILFTVNKAEGWPVKAPQSTLFVSADRITINEVNKPDSGQSVEYAISTTNEAPTDDWQTSTTFEGLSAGTIYYIFARSKENENYHAGTPSDPLGVIYLGSGTVSDPFIVHDVTT

SEQ ID NO: 87204 - protein, 76 aa, Unknown
  Obtained from environmental sample
  misc_feature (1)..(76): Xaa is any amino acid
MSRRRKSIHRSILPDPRYNSTLVTELVGVVLKEGKKTIAERIVYTALDELNKKVQGSESVMEKFEACLENIKPHVK

SEQ ID NO: 87205 - protein, 40 aa, Unknown
  Obtained from environmental sample
  misc_feature (1)..(40): Xaa is any amino acid
ITVTNDILKKLSNIGKDLSEFSLDTVRMFRNDAVSAGYTL

SEQ ID NO: 87206 - protein, 176 aa, Unknown
  Obtained from environmental sample
  misc_feature (1)..(176): Xaa is any amino acid
APLCRHAIDPELGRDTTVFLAQDGSGNLCSGTSTSGWGWKYPGRLGDSPIIGAGSYADTRYGAAACTGAGEMTIRCGTARSIVLYLKRGAGVADAVYEAAEDMRALESGLLSRVTIHAIDARGNHKVVAVNGSGDNVYWLWDGKGPPRSLRAEAIAIQRGTIKPSATTVYGYGPRS

SEQ ID NO: 87207 - protein, 122 aa, Unknown
  Obtained from environmental sample
  misc_feature (1)..(122): Xaa is any amino acid
LLTNHEPGNEFHIIQEVSIPGGSVDYFLVSAKNCKVRDFIGIELQTLDTSGTVWPERQRLLKELGIQRRDNAEDSKKTYGMNWKMTAKTILIQMHHKVQTFEHINKKIVLVIQDNFLSYMTK

SEQ ID NO: 87208 - protein, 166 aa, Unknown
  Obtained from environmental sample
  misc_feature (1)..(166): Xaa is any amino acid
RRGDLTALTGSLPWISLALAFSFGLYGLIKKAIKLSALESLGSETLIASPLSLILLICSFGTGGRLIYPEGLLYLKELPAFTIIMLLLCGIVTALPLYLFAKGVKLLPLSTFGFLQFLAPTLNLLTGVFIFRESFPVYNFIVFGFIWAAVIIYIVSLFFTGKLRSL

SEQ ID NO: 87209 - protein, 92 aa, Unknown
  Obtained from environmental sample
  misc_feature (1)..(92): Xaa is any amino acid
VHRPTINGKGFIALAAVSFGRWVPLGILGSSFLFGMSSALAVNIINIEKLQFLPSEFFNALPYLITLVMLVIFSGKDYAPRATGKPYDKGKS

SEQ ID NO: 87210 - protein, 94 aa, Unknown
  Obtained from environmental sample
  misc_feature (1)..(94): Xaa is any amino acid
SDLEGLRIPHFYRAFYVYKYATGISASLALAQRVASGGRQEREDYFAFLKSGGSRFPIESLKIAGVDMSAPEPVRAACQYFARLVDELEKLLLS

SEQ ID NO: 87211 - protein, 257 aa, Unknown
  Obtained from environmental sample
  misc_feature (1)..(257): Xaa is any amino acid
RQNPSCKVKPRVTAQSKGVVPAYKGVFINMDEALAAGKVISIVPARDGKVYEIRETETGRYITPVVGCEMLSEIQAGFIPALPRIPSDLMMGVIAFFRHFMRHGDVTEALVNIYWDKDNREFIADVPEQSVTKVSVDSQISGKFADDRYIHYMDIHSHNSMRAFFSSADDHDEKATRLYTVIGKLDEYVPEIKTRISNGGTFLEIDPAEVFEPLSVSFPEDWKSRVSFRTAHNEIKYNALYRLLMAKRKILHRVDYA

SEQ ID NO: 87212 - protein, 119 aa, Unknown
  Obtained from environmental sample
  misc_feature (1)..(119): Xaa is any amino acid
AAVGEVVNSRRPLLIIAEDVDGEALATLVVNKIRGTLNIAAVKAPGFGDRRKAMLEDIAVLTGGKAISEDLGLKLENLTLSDLGTARKVVIDKENTTIVEGSGTAEAIQGRVKQIRSQI

SEQ ID NO: 87213 - protein, 192 aa, Unknown
  Obtained from environmental sample
  misc_feature (1)..(192): Xaa is any amino acid
MPIIEYGLERGLAFSCHDANFAAAEMDQIKVLATRLKYASAIISGASAKTYAKFRPGGDFDRLMKNIEYLCSLRGENRDMNIRLIYRLDEFGCDLNEIEGAKKIAEKLGADLRFERDPMTFIPKNLTEVSAATGVDYSSEYILNPYGGYDPRTCFENMTLPFINWNGNILGCANATEYRNFGGDAFALGAAK

SEQ ID NO: 87214 - protein, 75 aa, Unknown
  Obtained from environmental sample
  misc_feature (1)..(75): Xaa is any amino acid
MPTGWMSLYPGLVSGGPNKQNPDMVTKTLIPQDTPPAKFYIDYTSTASANEIAIYWNSPAVFVAAYFDMISIKEL

SEQ ID NO: 87215 - protein, 252 aa, Unknown
  Obtained from environmental sample
  misc_feature (1)..(252): Xaa is any amino acid
VLIGIVAARVTAANRSMASGLINAGGSVGQFVFAPIVQALMNVRGHSAGLVFLALSSLASMFPAWLLCRHKRLQGKQGANPDKPEAQARSAPGLSKQLRIAFRNPSYILLHAGFFTCGFHVAFLTTHLPGEIILCGHAATVSAISISIIGLCNIAGSIGVGILGKHVRMKYILAASYAFRALMIAVFLLSPKTETTFYIFAVTTGLTWLATVPPTAGIVGKLFGTQYLATLFGLTLLTHQIGAFLGAWSARA

SEQ ID NO: 87216 - protein, 231 aa, Unknown
  Obtained from environmental sample
  misc_feature (1)..(231): Xaa is any amino acid
SATLTVRPLTRLTLTEIRASAETEVLSVNLQAGRVRVDLNPPAGLKASASVSSNVASSSARGTSFEFDTRILQVTEGRVIFKGTIGQGAPVNAGSSVSLNKSGSAVNPVTYGTKVLIPKSPTDTEANISPVIIPTGKSTQPPVPDSSDYEENKEASIESDIQRQRKWFEFSVGGGANSSYWFFANHNEHWDGNTDHVSTGTNSIIDIGYYSGLSAEFFSYVLYTASFYYKY

SEQ ID NO: 87217 - protein, 91 aa, Unknown
  Obtained from environmental sample
  DOMAIN (1)...(85): 60Kd inner membrane protein
  misc_feature (1)..(91): Xaa is any amino acid
MLWIKDLSASDPYFVLPLLMVGTMVVQQAMTPQMGDPQMKKMMTIVMPIMMGFFFAYTPAGLTVYYLLYNVVGMGQTWWLMRNYKSQPVVI

SEQ ID NO: 87218 - protein, 278 aa, Unknown
  Obtained from environmental sample
  DOMAIN (38)...(181): ATPase family associated with various cellular activities (AAA)
  misc_feature (1)..(278): Xaa is any amino acid
KRIKGQDHVIDKIVKVIKRAVVGLSGMQHSSGTKPRGILFLAGPTGTGKTEIVKTVTELLFEDEKTLIRFDMSEYAAEHSDQKLFGAPPGYVGYDSGGQLTNAVKNNPFSVLLFDEIEKANPKIMDKFLQILEDGRMTDGQGNTIYFTETLIFFTSNIGISKEIIDPDTRVVTGRENIVTPNDKLEVIEKKVRDAMKTHYKPEVMNRFGENILVFTYINETASQEIAKSQIDNINRNYQKNNKIEIKMSDDAYKLLYSLCWQDEPRSNGGRGIGNVIE

SEQ ID NO: 87219 - protein, 46 aa, Unknown
  Obtained from environmental sample
  misc_feature (1)..(46): Xaa is any amino acid
SAYALSQKIGIEMPITTEVYKALFDGKPIKEAVRDLMMRETKPEFW

SEQ ID NO: 87220 - protein, 279 aa, Unknown
  Obtained from environmental sample
  DOMAIN (207)...(279): Mur ligase family, glutamate ligase domain
  misc_feature (1)..(279): Xaa is any amino acid
SSAAALFRILEKSSSGKTFLGGNITVSPLSFIDGLENNDNVVLELSSFQLGDLKGRETPDGKALLKPFASIITAIMPDHLDRYVSMEEYIDDKRNIYRGQDSSCVTIAGDCPWGKSFLSETKARPLVYSRYPLGKNQSGGWLENEKGYAHFLKWEGFAEKIAELLPKKLLVKGNHQKLNLLAAALAAYANGAEAEEIRCALADFNGIEHRLELFSEANGICFYNDSAATIPQAAAACIEALKCGHPLVLVTGGTDKNLDFSALAEAASGAGALILLAGT

SEQ ID NO: 87221 - protein, 84 aa, Unknown
  Obtained from environmental sample
  misc_feature (1)..(84): Xaa is any amino acid
MKKKVYCVGIMACDVPLRPVPKEIFDVDNMRIERPVWSTGGDATNTAVALVRLGLDVSLSGLVGKDPYGDFLIESLKQAGVDVR

SEQ ID NO: 87222 - protein, 250 aa, Unknown
  Obtained from environmental sample
  DOMAIN (2)...(250): Acetokinase family
  misc_feature (1)..(250): Xaa is any amino acid
LAVYDNETIILAQKIKHKDEDLRRFASIFDQKTYRKDCIVAGIEAANIPIKTLDAVAGRGGLIKPVDSGTYLVNAAMLADLHKPAAAAHASSLGAIIASELATPLSIPAYIVDPLVVDEMDRNAKLSGMPGIERASVFHALNQKAIARRVAEKIGKPYENSRLVIAHLGGGITVGAHRYGRVVDVNDGLAGEGPFTPERSGGIPAIPLINMCFSGEYTREQMIEKINGNGGMRAYLGISDEAEVQKMIND

SEQ ID NO: 87223 - protein, 254 aa, Unknown
  Obtained from environmental sample
  misc_feature (1)..(254): Xaa is any amino acid
RYFIKALNIAKEDIDNGTDADTIIKNLLPALSDVTNAKNETGIITAAELLEKEFPPQKWIIPGLIGGGLIMIAGPPKIGKSWFVLQLAAAAAAGCRFLDLWAKQTGTLYISLEDTERRLQSRMKILNTPAINELKITTQWKDGYIGIDNYLEKNTDVGLVIIDTLGRFAGIEDMNDYAMTTNALSKLKVIADKREAAIIVVHHARKGENKENQRNDPVEAALGSTGLTGTVDSTITLTRHRYRDKINDEGALYA

SEQ ID NO: 87224 - protein, 157 aa, Unknown
  Obtained from environmental sample
  misc_feature (1)..(157): Xaa is any amino acid
MTGLNRYLSVGVKYEWIRSFFENGDEPGARKTDVMYAFLSDAGVLKQKHFTALGDKIKQIGLFDINAWAIMLCELVYTPAFNWFVKNISFGRPYTFEDLNKALGDLVTDKAKSEFWNGFKQILDTMPYGYEMRFGMPEIEKKFDRNGEEKKKLISIT

SEQ ID NO: 87225 - protein, 282 aa, Unknown
  Obtained from environmental sample
  DOMAIN (25)...(282): GcpE protein
  misc_feature (1)..(282): Xaa is any amino acid
VIGNKGRSLFLTLLFISYYLLFVIVFRSRTIKIGGFDHIRAVTLGGDSPVIIQTMWKDRLSFSDLDGAVGRIEGLARMGCGLLRFAVPDVPSAEVLGALAKLVSMPLVADIHFDYKIALRCMDFPIAKIRINPGNIGGKEKVKAVLDKAAQKGVAIRIGVNAGSLPRDLKERVGDGMDGALALVEAAHRELAVFDEFGFTNVVVSMKASNLADTIKANQLFTKGIDTKCTDSFVPVPRSPLHIGVTEAGPLVAGVARSSAALALLLAQGIGDTVRVSLSDSV

SEQ ID NO: 87226 - protein, 269 aa, Unknown
  Obtained from environmental sample
  DOMAIN (173)...(262): Response regulator receiver domain
  misc_feature (1)..(269): Xaa is any amino acid
IVDVISFRVDEKHQEFIVSIDEKIPRFLTGDDQHLAQVITNLLSNAVKFTGERGRISLNAKLLEETDSFCILQIEVSDSGIGISEEQQARLFSSFVQADSGTSRKFGGTGLGLAISKSIVELMEGKIWIESEQGKGSTFCFTIKALKANESGVDIPEEKESEPQSEEENFENYTILLAEDVEINREIVITILEPTALNIDCAENGRQAVEKFAAAPDKYDLILMDVQMPEMDGYEATGKIREIERESARKPVTILAMTANVFNEDMKNA

SEQ ID NO: 87227 - protein, 270 aa, Unknown
  Obtained from environmental sample
  misc_feature (1)..(270): Xaa is any amino acid
IPDGGRNWTIITGTGLFGSNDGGQAGYNHLIAVDPENPDLVFVGANMALWRSTNGGASFSQFAHWLQSGRQYIHADMHLGAWTPTSQTGNAKALYIATDGGLSIVRNPGIATIPGSTPDPTVIDHRRNRGLSTHLVYNIGSTNAKLPATGGIQPVRDRVIAGFQDLGTLVRLNNTDRPGLFRYTGVGGDGFGCLYHPYNGNLVLGSVYNTRIMKSTNGGVSAWSNAVSGIPESNTNAAPFYTRLYLGMADPTGNSVYTFTNATPYRSSNF

SEQ ID NO: 87228 - protein, 252 aa, Unknown
  Obtained from environmental sample
  misc_feature (1)..(252): Xaa is any amino acid
SDVSGATSSIYTFTAAPSDNNNLYRVVASNSKGSTASNAAALTAIEKVVPTFSLNPVNMSVNAGSRVTFTAVAEGSPMPSVKWQISRNYGGSWSDKAFETNYFSFPWMEASNPLGFYPTPADNGATLRASATNASGTATSNMVTLAVDVMNRQMLRNPEFEEYATSPAHPSGYPGVWWTWSDRDRMAASGEASGENDGAGMGAGTTPGRRCAWLATWGEPKTDWVHQDVVIPSDAISAKLTFRLATVNFASA

SEQ ID NO: 87229 - protein, 249 aa, Unknown
  Obtained from environmental sample
  misc_feature (1)..(249): Xaa is any amino acid
IPSSGTRTISIGYEEELPIENGKFYYRLPMAYQEPIETFSVKATVWKSKSKPQMEGQLANELVFDEQGEAFIATFSRKAYRADRALIFSLPTPVDVPQTLMQSASGSYYFVASCMPKSETRQKTWGNTLGVIWDASLSGLYRDHAKELEVLNQIIQAKKNLTIHLYLLNNRFVKNGEYKITNGNWSALRNVVETVIYDGGTNFEAIRIPSNSADEFLFFSDGLSTLSDADIIAKNPVWTKYPMHGIVSS

SEQ ID NO: 87230 - protein, 266 aa, Unknown
  Obtained from environmental sample
  misc_feature (1)..(266): Xaa is any amino acid
MDTQARKNSTCFVKNLVETLYSRVPFYRKKMQEIKVTPKDIHSIADIEKLPFTTKDDLRENYPHGLRASAQERIVEVHMSSGTTGKPVVNEYTLKDIDIWREAMARTMAGAGCTRDDIVQNCYGYGLFTGGAGAHYGAMTIGAEVLPMSSGNTERQLMILRDFGSTMLTCTPSYALYLAEEAAEAGIDLKTLPISKGCFGAEPWSENMRVEIEERFNMKAFDIYGLTEIIGPGVAFECEAQQGLHVNEDLFYPEIIDPATGKVLAP

SEQ ID NO: 87231 - protein, 86 aa, Unknown
  Obtained from environmental sample
  misc_feature (1)..(86): Xaa is any amino acid
TNPTHFAVALMYNEETPAPMCVAKGVDYLALKIKEQAKDHDVPIVENPPLARLLYRSVEVDKPIPAELYQAVAQVLAYVYRLKNAA

SEQ ID NO: 87232 - protein, 288 aa, Unknown
  Obtained from environmental sample
  DOMAIN (115)...(288): Bacterial alpha-L-rhamnosidase
  misc_feature (1)..(288): Xaa is any amino acid
GRLVQGDLAGWLGHRNHFGKRTAIIAQLLICFDDGSSETIVSDASWTCNKSPVTFSEIYHGETYDARLEEKGWNESGFSGGLWKPVFVESSDLSVLHPMDGLPVKEHEHFKPKAFFTTPGGDKVIDFGQNISGYVCFTVQGKAGDRVKLRHAEALDKAGNLYTENLRRARQTIEYTLKGGGKETYKPHFTFQGFRYIAVDEFPGTLDPPDFDTTTFEAIAVYSGMRLAGSFKSSNELLNQFVSNVSWSMKDNFVDIPTDCPQRDERLGWTGDAEIFVRSAGLIMETAP

SEQ ID NO: 87233 - protein, 272 aa, Unknown
  Obtained from environmental sample
  DOMAIN (9)...(146): Mur ligase middle domain
  misc_feature (1)..(272): Xaa is any amino acid
TFSWQLGDLKNRTRKNAADEALLKPRAAVIGAIMPDHLDRYGTMDAYVADKRIIYQGQDEGDVTVTGDDSWGQSFRDESRGRAMVYSDTPDPSGDWSGWGWGWIEENSGRGLVRLRGAELVEVVPKALLVPGRHQKKNLLAAALALIDLGLPADFIKNSLGSFPGIEHRLEFFHESRGIRFYNDTAATIPEAAAMAIRAFEFPPILICGGTDKNLDFSPLVRAAQEAKALILLEGSGSKKLTLLLDAAGIAYSGPFDSLDKGLQNGLEKAAP

SEQ ID NO: 87234 - protein, 281 aa, Unknown
  Obtained from environmental sample
  DOMAIN (1)...(63): PEP-utilising enzyme, mobile domain
  misc_feature (1)..(281): Xaa is any amino acid
IYALDTASLDRNKALALLTEKGGLTTHTAIIARSYGIPTVFGIQGLMDTVKDGQFAVVNADEGKVILDPKSEVAAEYEKKYNVYRRDKLDAEKYLEKEAHTADGIKIDIGLNISGVLDDELQASSFADSIGLFRTEFLYLGRNTLPDEDEQISSYKKVLECFGERQVILRTLDIGGDKQLSSINYTREENPFLGNRALRFCFSNQDIFRTQLRAVLRASVYGNMWLMFPMVNSIDDILKAKEIIASVREELEKEGKTFGSIKTGIMIEIPSIALLAEHAAR

SEQ ID NO: 87235 - protein, 240 aa, Unknown
  Obtained from environmental sample
  misc_feature (1)..(240): Xaa is any amino acid
SPPLLGRAAAFLGTEGLTAVVWVHGSMAGHFLASGSRRAMAVCSASALALLLALSGGWCLLPRGPELFMDVAIVQPNYPVNTRIPGQLGDMWTRSDALLQSNGLPKQDRPTLLLWPESSLTDGNYLLPNPFLAEIAKGRGVAWLFGTDGWLETGPPQNLVRGEVAGLEPFFQAKVVPMPFGERMPGPEWMRARLEEIAGFNSWAVGELGPNSSFSVPAPDVGSIKVHPLICSEALIPKRV

SEQ ID NO: 87236 - protein, 260 aa, Unknown
  Obtained from environmental sample
  DOMAIN (37)...(257): Conjugal transfer protein
  misc_feature (1)..(260): Xaa is any amino acid
IEKPIFIPQGSATPAPAQGKAAVEAANRAIVTPQEYSNSAMVYDYDRDFVYELYCQPFRVSDITLQPGERANDPPFVSDSERWMLGAGVSYESGVPVQHFYVKPTEANLTASLIVNTDVRVYHLILRSFRDVYMPIVRWRYHDRDMPQNYINANTGQPASGDSAFSTDPRNLSFNYKITYGVFKKPKWLPTLVYDDGRKTYVAFPDLVLTTELPSVFDRRADIVNYRVWQNVMIIDKLIEKITVKLGDRIATIEKKRGKQ

SEQ ID NO: 87237 - protein, 285 aa, Unknown
  Obtained from environmental sample
  DOMAIN (8)...(284): MreB/Mbl protein
  misc_feature (1)..(285): Xaa is any amino acid
AILVNLFTSDLAIDLGTASILIHTRQEGRIVIHEPSIVAINVNTHEVEAVGNDAKQLLGRSPQGVVTVRPMKDGMIYEVDAAEKMLAAFIQKARPRRKFNTRIVVSVPPRAHQVARRAVRQVCHDAKAGDVFLVDQTMVAAIGAGLSIYEKRGCMVVDVGGGTTDVAVISYNGKVFADSIPIAGDEMNEAIIKFIQKKYSVMISESAAEEVKWEIGSAYPSENTRTITVSGRDLFEGLPKTLQLSDSEIREALSEPIVAIMNLVRRALNETPPQLAADLINRGIC

SEQ ID NO: 87238 - protein, 117 aa, Unknown
  Obtained from environmental sample
  misc_feature (1)..(117): Xaa is any amino acid
KQFIDTIPDTLLEAATVDGAKEWGIFMWIVLPMIKPAWLTVMIFSVQSLWNARASNFIYSEELKTLPYALSQIITAGVARAGVGAAIGLFIMIVPLLMFILAQSNVLQTMANSGIKE

SEQ ID NO: 87239 - protein, 156 aa, Unknown
  Obtained from environmental sample
  misc_feature (1)..(156): Xaa is any amino acid
RIAPTEFCQIRGRIVRGEVHDENAMVMGGVSGNAGIFSCAPDMTRLGAAMLTSLEDGIFFKKATAKLMTRNHTSGKGQDRGLCWMLAGPGTSSGDLLSQGSFGHTGFTGTSIWIDPERKFYALLLSNRIHPNRDNEKLFRARHIFHNLAVLEYGNG

SEQ ID NO: 87240 - protein, 259 aa, Unknown
  Obtained from environmental sample
  DOMAIN (88)...(204): Histidine kinase-, DNA gyrase B-, and HSP90-like ATPase
  misc_feature (1)..(259): Xaa is any amino acid
MGKTTRETERKDYCLTKIQDASKHLLGVINDILDISKIEANKFSLSYAEFDFEKMLQNVTHSMSFRVDERSQTLKVYYDRSIPQPLLGDDQRLAQVIINFISNAVKFTPEGGNISLQTHLVDRNDDGCTVRVEVSDTGIGINKDEQQKLFKPFQQADNNTARKYGGTGLGLAISKNIIEMMGGNIGVESEAGRGSSFYFTVFLKYGEKKSAEEAVEVEDINWENVRILAVDNDPDVISYFKEIIAGFGVTHCDTAASGA

SEQ ID NO: 87241 - protein, 256 aa, Unknown
  Obtained from environmental sample
  misc_feature (1)..(256): Xaa is any amino acid
VEVKAEIPIFDGSTLEFSEKPVCAQWGIGDSEYLVAFVFPKNTRIRQRLNGTLIPIHAVSEYQVVNGIFPWKEWKTANELTLTDEMGNEAYGIRIISTNMEQGSLLIYIDGITERAVNPGDSIIYVSDFDQPIHIPTDDATLANLRLPSERIQSDDPEIVALAETITKDINSDQQKAKAIHLWVAGNIFYDRDLYKYNVVDIDAIKYRYERGYSTYVLQNKRGVCDGYASLTVALLRASGISAKYIPGYGYNNGSS

SEQ ID NO: 87242 - protein, 259 aa, Unknown
  Obtained from environmental sample
  misc_feature (1)..(259): Xaa is any amino acid
ELFEDQGIGMVGVIGARTLPESCIWWESEHRCGRVIESSGGYLSELYYPPTSGNNKCEEVIAVDGFLMATQYDIPWRADLFKGWHFYEIAQCLEFRRAGYKVIVPMQPCAQVMHDCGIVNQEHYLQYRDVFRAEYAAEATKQRDSFIATDRISDKDYLHPDVPLAKTIGHTQWLEYLYKIGNKSGTRILEIGSREVTGKSTARARFSKAEYVGFDYYPGNNVDVVGDAHKLSEYFKGQKFDIIYSSAVFEHFAMPWLVA

SEQ ID NO: 87243 - protein, 61 aa, Unknown
  Obtained from environmental sample
  misc_feature (1)..(61): Xaa is any amino acid
MKTAANSSMADIIGIYVYEMGLGKAQFSYTAAIGLFTNVINFIIIMLVNSFSKKVSETSLF

SEQ ID NO: 87244 - protein, 208 aa, Unknown
  Obtained from environmental sample
  DOMAIN (1)...(192): Dihydroorotate dehydrogenase
  misc_feature (1)..(208): Xaa is any amino acid
CGDSHLAGSTAAEYAEGAKLLDDSAVDIIELNISCPNVKAGGMAFGLDPEAAAALTAQVRRAAPNKPLMVKLSPNAPDLTAVAKSCAAAGADAFSLVNTFKGMAIDIDKRKPVFENTSAGLSGPCIRPIALRMVWELYEAVQVPVVGMGGIASADDALEFLLAGAAAVQVGSATFAHPPLMTEIIRGIEEYMKEKGYTELGKLNIRGF

SEQ ID NO: 87245 - protein, 268 aa, Unknown
  Obtained from environmental sample
  misc_feature (1)..(268): Xaa is any amino acid
MIINWLKGIPVIDQKGQKVKRVFFKNNGVLQYEKERGTAHPNSIIRDITTKSGTIEVSAFLGNDVFPFPKPTDLINYFTSAASDSNSNDTILDFFSGSATTAHAVMQLNAEDGGRRKFIMVQIPEECNEKSEAAKAGYKNICEIGKERVRRAGKKVVSDKWSVISRGVKAKYGCKELSRADCLAESNAGSQAGLFAGEETAERGTVLPVRTDAKGGSVHPLKHSGGAGAQLNKGVPAIPGDSQRVESGAGNTANAVRPNWVPCRHGHF

SEQ ID NO: 87246 - protein, 77 aa, Unknown
  Obtained from environmental sample
  misc_feature (1)..(77): Xaa is any amino acid
MKFQFKIQPFQTEAAQSVVSVFTGQPRRDATSYRRDAGTEHVPIYMQSEDFETAYRNADLELSKEQLLKNLRSVQAA

SEQ ID NO: 87247 - protein, 145 aa, Unknown
  Obtained from environmental sample
  misc_feature (1)..(145): Xaa is any amino acid
GLGTPYHHAARVKGAGADCGQFPAAVFEAAGLIPPLDIDYYPCDWHVHRDDERYLSIVERHFTKVPIDLELTKNGDGLANSQLPMPGDIALFRYGRAISHGAIVIDWPIIIHAYIHAGAVVLDDALANTDLAGRFVGIWRLKDGR

SEQ ID NO: 87248 - protein, 56 aa, Unknown
  Obtained from environmental sample
  misc_feature (1)..(56): Xaa is any amino acid
ALKKLKFPDEQIVTTLERRMKCGIGMCGRCNLGGKYICVDGPVFTYAQLRDLPNEM

SEQ ID NO: 87249 - protein, 279 aa, Unknown
  Obtained from environmental sample
  misc_feature (1)..(279): Xaa is any amino acid
MWYQNSNESQEKILKQYELVKIDGSTTKTRNRLRGSAMFLERYRDLLMPGGRLITIIDETILSSPDYNYVREFIRKNFIIRAVISLHGDAFQQSNARVKTAMIYLEKKKRLSDKQGSVFMYSSIYLGVDDLPVTTNPSKVRDARELANKEILTILDEFKKYRNGENGDWLVDINRLQDRLDVKYCLPLVGRFVKTWEDSGTEIHILSEICTPRDEIIEPRKDFPNDEFRILSITYDGHCRSEERRIGKEINYSKMKIVRTGDIVFSEYNAFHGAIGYIT

SEQ ID NO: 87250 - protein, 161 aa, Unknown
  Obtained from environmental sample
  misc_feature (1)..(161): Xaa is any amino acid
MSIDLATVLFQIVNFLLVVWLLNRFLFRPVMRNMALREEAIQAKLAKAGAELKAAEKKSALADKRISDFENIKVEMIDKAAAAMQKEEEEKLLRFKGEMVERREAFRRELESERLKMSDDVKASVGRAFLEAFRKAFSLFGGGKLESALLDNFIVIAKSGK

SEQ ID NO: 87251 - protein, 280 aa, Unknown
  Obtained from environmental sample
  misc_feature (1)..(280): Xaa is any amino acid
YAPDNIYTDILKVVFNTEIQSDTPRLYMVDLKAQGEIGLKLGNSGDYFGVINIGDTSNLIKQCDKKGIVTVPDEFSTQSLFRKINENDSNINILIGSRKFTEGWNCWRVSTMGLINFAKGEGSQAIQLFGRGVRLHGYEGRLKRSAKAESTTTTPPAELPYLETLTIFGIKADYMARFREYLEIEGLPPNTQNNTYKLATVNRYDHKKKLKVLRVKEGINFKKQAKRFLLDVPEAQGKKNMPHISITLDCRSKVQNILSPSEFKFDSESIIQPNTIPYEY

SEQ ID NO: 87252 - protein, 262 aa, Unknown
  Obtained from environmental sample
  misc_feature (1)..(262): Xaa is any amino acid
VKKRLRELYPLHLATTLIMAALYVIKRLGTSEVINVPKLLFSAFMHLSFLWSICPLGSFDLNTPSWALSAMFLCYLLLGPLLKWSLTMKSRYEVMGWMALFFVPLVLWGLLYGAIGSPESLYQLFHGFAPVRFFEFGLGVLLARFFMLRDPLKRSGLFVAARCDAAVLLLCALIFINLSPAVRSTHGMKWLSYHAFMIPIYLTAVYTMSIEKGLFARIMALDIIRKLGRTSFYPYLMHIPLVSIITLFCERVLGYKKFLHSP

SEQ ID NO: 87253 - protein, 138 aa, Unknown
  Obtained from environmental sample
  DOMAIN (11)...(136): RadC, DNA repair protein
  misc_feature (1)..(138): Xaa is any amino acid
NALRVSVLSEPTPITCRSDVLEYLRFTLGGQTIEKFLVVSLDNRNCPVGIDEISAGTVNRCVIFPRLVFEAALKNGATSVILVHNHPGGTAAPSEEDWNTTERVSKVGRLIDIPVHDHIIIASPTNTVSMREFSQWPD

SEQ ID NO: 87254 - protein, 135 aa, Unknown
  Obtained from environmental sample
  DOMAIN (76)...(127): Phage derived protein Gp49-like (DUF891)
  misc_feature (1)..(135): Xaa is any amino acid
GGGTGEGAGGIETHVTPDRMKIRGAQVDSDEINDFQQTDTFRDWLGRLKDKKAKQRINERIKLAIRGDLGDCETIEGGVIEMKLHFGPGYRLYCYQHSPNQYRLLVGGTKKEQQRDIGRARRMKSELEGEGGWLH

SEQ ID NO: 87255 - protein, 167 aa, Unknown
  Obtained from environmental sample
  misc_feature (1)..(167): Xaa is any amino acid
MIDEKQDKNNKILFDRDIFLEILTEKNILLNSRPWHYLKLLKLFNTFIQRWKLLRLFVNNFLFILKIINPLNILYKQKKNTNFTRKNYHKWIKLNEPSYNNLELQKQYNFSYRPKISIIIPLYKININYFKELIISIQTQTYDNWELCLADGSPERNIIIETLCAAD

SEQ ID NO: 87256 - protein, 272 aa, Unknown
  Obtained from environmental sample
  DOMAIN (54)...(190): ATPase family associated with various cellular activities (AAA)
  misc_feature (1)..(272): Xaa is any amino acid
GSLAESERILDEDHFNMRKAKDRILEFIAVRQLLNSSTFAADAVSGGVVKGPILCFVGPPGTGKTSLGKSVARALGRRFVRISLGGLRDEAEIRGHRKTYVGALPGKIIQSMRKAGTMNPVILLDEIDKLSSDFRGDPASALLEVLDPEQNAMFSDHYMEVPYDLSRVLFITTANSLHSIPYPLLDRMEIIDIPGYGENEKLAIAKQFLVPKALMENGLSQAQIRFPDDALRGIIRYWTMESGVRGLEREIARCITRIARRAVTENYNKPDG

SEQ ID NO: 87257 - protein, 278 aa, Unknown
  Obtained from environmental sample
  misc_feature (1)..(278): Xaa is any amino acid
KSARRHVSLSAKIDEYRATLEDLRVSLARMNVQAQSAEEHARLIRREIAGQEGQLKNIQDELFLDRKRLEEIDERIADTQTEIAGIGQKGIKLAADLETLEKDIRKRNDNVASKKVVINKRMAELSRVQEALEKIHMELVQSETEIKNIQDNFRETHSRDLMEFEERIFTITAAPADLREKLAASRSQMKDLGSINFMAPEEFAETKERFNFLSNQMADIEKARNDLEKLTSEIRQESSDKFLSTYNRIKKNFHNMFRRLFGGGRAELRLSDSNHVLE

SEQ ID NO: 87258 - protein, 268 aa, Unknown
  Obtained from environmental sample
  misc_feature (1)..(268): Xaa is any amino acid
EGKYHYDGHRKCNYCVGPEEETQYYLRENLLFDTAAERPGFAGEKICPVCGKALTRGVMGRVMELADRPLESAELSVERKNTNESNKRPFHSFIPLGEILGELLGTGATSKKVRAAYCGLIEKTGSELSILMDMKIGEIEKIKAQGLSGELLATAIDRMRRREVSISPGYDGEYGVIRVFPPGKSIPTSGAGALFAEAPSPASKPGTGASRQKKLPEEKLQKAPNPELPLNNTGSGQSAGLSFDPVQFDSIKFDSSQQEIINYEGSRT

SEQ ID NO: 87259 - protein, 240 aa, Unknown
  Obtained from environmental sample
  misc_feature (1)..(240): Xaa is any amino acid
MEAAVGRGTLLFIDEIHRFNKTQQDTLLPYLENGTVVFVGATTENPSFSLNNALLSRCHVAVLQPLCTEDLLELYSRAEKFLDKKLPLTDAAKTHLAQMADGDARFLLNTVEYLANAKFDEALSPEALESVVAKRPMLSDKSGDEHYNLISAVHKSLRASDTDAALYWVARMMTGGQDPMYLFRRLTRFAMEDVGLADPQAVQLAISCWQAYERMGSPEGDIALTELVIYLGTAPKSNRN

SEQ ID NO: 87260 - protein, 273 aa, Unknown
  Obtained from environmental sample
  misc_feature (1)..(273): Xaa is any amino acid
ASVSSEIKELKRPKNHSHGAWKPIPGKDLEPVLDTIVAGEPDKLAGKLLILQAYGSSDVADGASHSFVELYNNTYSALNLNGITLYYADGTQNTTATEDEPWKTISLSGTIPAKTSFLILGNKKNSTARLQITENSGDINDTAFSLSHRAFKAALIRSKKILAEQNPFDMGEGNTAAGYIDMIGSANSYQTEDLIFGFETHPARHSASTAVRRKTLMDSDNNSEDFASIDYQAWSESEPDRTTDEQLELYRPKNVTFGAWYPMSDANEPTGYA

SEQ ID NO: 87261 - protein, 261 aa, Unknown
  Obtained from environmental sample
  DOMAIN (87)...(260): Predicted permease
  misc_feature (1)..(261): Xaa is any amino acid
DETQLAKVLDAMIRADFQGAVNHINQACEVVVAGVINSPDPLPNGNTAYIPLDVLQSETGMMLQGAVTELVIRERGVPDSRLPGESESSAVITAALNRGLANMGLTLPDDLAIHTWQDYMAEYLGYETIQTGAPRIIEFLLLFLSFLGISNTILLAILERTKEIGMMRAMGITDGQMILIFMLEAGFIGIIGSILGIIVGCVFNYPMVKYGMDFSAMGDLLSNGIGFRTTAVFRSVWNIPIIIGSGVVATVLSSFVAYFPT

SEQ ID NO: 87262 - protein, 54 aa, Unknown
  Obtained from environmental sample
  misc_feature (1)..(54): Xaa is any amino acid
RNSWEVCAEILEKCQVVTTPGAGFGPAGAEYVRFSAFGRRADVAEACQRLPRLR

SEQ ID NO: 87263 - protein, 197 aa, Unknown
  Obtained from environmental sample
  DOMAIN (1)...(162): Branched-chain amino acid transport system / permease component
  misc_feature (1)..(197): Xaa is any amino acid
VFINLKALTGGPNGRQFTTVMKLNGELAFAVVIAILIVTLALLQNFLRSTYGRAIMACREDEIAAGASGIDTFRYKMIGFVIAAFIAGLGGSLYVMVVGLVQPEAARFLKSIDFLIYVVLGGMGSMTGSILSAFVLTYLQEFLRFLQDYRLLIYPLILILVMFFRPQGLLGMKEFSFVRLFDRIAALIGKRKQGEGA

SEQ ID NO: 87264 - protein, 98 aa, Unknown
  Obtained from environmental sample
  misc_feature (1)..(98): Xaa is any amino acid
RKDPKLTNVTAKAGKKKVDWQLQEAKAMFSEVIKAAAAKPQIITVRGKETAVIISIVEYKKLVRPRQTFFEFIQDSPLRDLEFELPPRLPENMREINL

SEQ ID NO: 87265 - protein, 58 aa, Unknown
  Obtained from environmental sample
  misc_feature (1)..(58): Xaa is any amino acid
TAIVRSSFRNLASARDELEKRFSGYWQCLSMGMTNDYEIAIEEGSTLIRLGTAIFGEG

SEQ ID NO: 87266 - protein, 83 aa, Unknown
  Obtained from environmental sample
  misc_feature (1)..(83): Xaa is any amino acid
VNKKYDYLIVGAGLFGAVFAYWAVQRGKKVLVIDKRPYLGGNIYCEKIADINVHKYGAHIFHTDNKNVWDFVNSFVEFNNIDI

SEQ ID NO: 87267 - protein, 222 aa, Unknown
  Obtained from environmental sample
  DOMAIN (188)...(211): 4Fe-4S binding domain
  misc_feature (1)..(222): Xaa is any amino acid
VPGGKKFKAVQTGGPSGGVIPEKYLDLPVDFDELTNVGSMMGSGGLIVMDENTCMVDTARYYTKFLAHESCGKCVPCREGTRQMLNILERIAAGEGKDGDLALIEELAEFMEAASLCALGQSAPFPVASTLKYFREEYEEHIREKRCRSGVCQALIAYDIDQKKCQACGSCQRACPTNAINKSGDKVFTIVQEKCIKCGACFSSCPDKFSAVIKVPAFSIKK

SEQ ID NO: 87268 - protein, 148 aa, Unknown
  Obtained from environmental sample
  misc_feature (1)..(148): Xaa is any amino acid
KKLIVPLNVPEINETFYMRRKDLSLLNEKDQYDGAVRILAPLDNMLWDRVLVQKVFDFQYSWEVYVPEEKRKYGYYVLPVLYRNSLIARLEPIKHGKGRPFSIKNWWWEPSYNECDAKIKREIREAVERGLGNFARYLEADGMEKGEF

SEQ ID NO: 87269 - protein, 191 aa, Unknown
  Obtained from environmental sample
  misc_feature (1)..(191): Xaa is any amino acid
IPVPATPLRLVPAWEGGAKVEVGTANKAGTIFSSDTTIYAQWTLMTYKISYNLDGGKLEDGVTNPVTYTAESGGFMLNNPVKAGLEFLGWTDLNKSAKDRDTVLYVYFEYGNTEGGDRSFKAVWGNAVSYTVEFDANANGEVKNPEPAKTGTGGRLTTMPTLTRENYAFNGWFTEAEGGKQVTTSTLFTGD

SEQ ID NO: 87270 - protein, 75 aa, Unknown
  Obtained from environmental sample
  misc_feature (1)..(75): Xaa is any amino acid
MNIAEYSVKRPVTIVILYGLAVGIAITLIINLAVDLYPSTVRPVLSIFTRFPGAGPADVEKNVTERLERSLSTSR

SEQ ID NO: 87271 - protein, 260 aa, Unknown
  Obtained from environmental sample
  misc_feature (1)..(260): Xaa is any amino acid
GINWTKVSDSKFGSTIINNITYGNNKFVAVGYNGKMSYSSDGINWTAVTDSKFSTTAYSYINGVTYGNGKFVAGGNNGKGTANTYSGEMAYSLDGISWTKVSDNKFGDHQVRGITWGNSKFVAVGDTGTMATSTDGITWSPVTDSKFGTTNIVAISYGNDKFIAVGSDGKMAYSPDGINWTAVANSTFTSSYSIRGIAWGNNKFVAVGDNGKMAYSYDGITWTAEENSTFGSSRIYAVTYGNDKFVAGGNDSKIAYSSGN

SEQ ID NO: 87272 - protein, 51 aa, Unknown
  Obtained from environmental sample
  misc_feature (1)..(51): Xaa is any amino acid
IGLFDMISGNTNQFTLFCAGCVLIAIPIATFYMFFQRFLLEGLMAGANKGE

SEQ ID NO: 87273 - protein, 66 aa, Unknown
  Obtained from environmental sample
  misc_feature (1)..(66): Xaa is any amino acid
LKPELDPELKPELAPELKPKLDPELKPELAPELKPELAPELKPELEPELRHAAFGEAAFLRRWYKS

SEQ ID NO: 87274 - protein, 98 aa, Unknown
  Obtained from environmental sample
  misc_feature (1)..(98): Xaa is any amino acid
GQLYAEYALPFVDGLSLLGGLNHFGKVYTSLDNTTELPAFTTGDLGLRLETKTLGQDVIYRLNVNNVTNEKYWFSGGSISHLQSGQPRSVAWSAELQF

SEQ ID NO: 87275 - protein, 241 aa, Unknown
  Obtained from environmental sample
  misc_feature (1)..(241): Xaa is any amino acid
TARVHRQTATHHQGFDAGTILFEAGSSGTDVRLEIFNGATIENTAGIAIYNNSSSTLNIYGGTVSATGTGIAVVNNSSGALNIYGGTVSKIGPTGNTITNNNTGAVTVFGGTVSRDPSGNGVTIENSGAGSITVAGGTVKGPVINEFTGTINISSGTISADGNAIYNEGNGAINITGGTVSSKTGIAVRNQSQGRIIVSGTATKVTSANNLIDGPNAGTILLLGGTGGSVLEIKGGTIENT

SEQ ID NO: 87276 - protein, 237 aa, Unknown
  Obtained from environmental sample
  misc_feature (1)..(237): Xaa is any amino acid
RRGRGSRFYPYTIARSTNPWIFDYYDAMLTGLPPMGVRIDDPNRRVVLTLEQPDILETLRYYHSWYKDGIINPDANLLAEEPKGRPFFMAQAWPSVAAVYAQQDGIERYDPVRFFGPIYSTASIQGSMNAVSSNSKYKAEALKLLELVNTDTKLRDMLCYGIEGKHFNYVNNGAAVERIIVDWTLVNYQQGNYFIITPQNTVPPGYWDEVRHQNEIATPSVMMGFMMDIDPVLADLT

SEQ ID NO: 87277 - protein, 223 aa, Unknown
  Obtained from environmental sample
  misc_feature (1)..(223): Xaa is any amino acid
MAETKNSFPIASVSERAKNKLELLCIGNALVDVFARGEEDIDIRYGLNEKVQHIPMEQMREILSVLPEFSICSGGGASNAAKIAGLLGIGTAFLGALGAAPEVEHETPDSRIRAEKSIFDQFGRLFEKQLEEAGVKTKLIRKNSPTGVCLILQMNDGQVKIAASPSAALELSEGDLDEELIRQVEVVVLDGFMLGREALVRRILELAHKSGTVVALDLSAAGL

SEQ ID NO: 87278 - protein, 82 aa, Unknown
  Obtained from environmental sample
  misc_feature (1)..(82): Xaa is any amino acid
KYFSNKTVTFIKADIEGFEMKMLRGAEKIIKQNKPKLAICAYHKVNDIFDFVEYLGGIVPEYKFRLRHHSYNSTETVLYCNV

SEQ ID NO: 87279 - protein, 220 aa, Unknown
  Obtained from environmental sample
  misc_feature (1)..(220): Xaa is any amino acid
TSITIPNSVTSIRRRAFFGCNNLTSVTFQGTITNFDRWDWNTFPGDLLEKYLYGGGIGTYTTENPGYYAVWRKKDYNYNGPVNVYMTIPDPNQSVNRFQYIRGYGGMDVAWPSFPRTTQADTELMYNPDKLGYNILRIMIRPDHVDPAQTITELVATDRPDYYENVKIVNKYGGYVLATPWTPPADWKSNNSINGVTDDGNEGHLLPEYYPQYAQYLRDF

SEQ ID NO: 87280 - protein, 76 aa, Unknown
  Obtained from environmental sample
  DOMAIN (1)...(73): NlpC/P60 family
  misc_feature (1)..(76): Xaa is any amino acid
FRFAEQPLGIKIPRSALLPGDLVFFGEIGKDSVTHVGIYMGGNKFANATNSEGVKYSSLNESFFFSKYLFAKRLNF

SEQ ID NO: 87281 - protein, 157 aa, Unknown
  Obtained from environmental sample
  misc_feature (1)..(157): Xaa is any amino acid
RFCLVMLVIVLAFGMTVVGCGNDDGGGTKDGTPIFRGTYTVSGNDVTITFIQMNTDSGWEDYPENVGEEEGLPPKEITGTINGNLFTIEGNENMTFTRKGGGSSTFDGTWTNNDMGMTIVAKDGSFTVFMSDGPSGGSASGGGSTTPGGSGSGSGGG

SEQ ID NO: 87282 - protein, 119 aa, Unknown
  Obtained from environmental sample
  misc_feature (1)..(119): Xaa is any amino acid
DRFGTRGAFEELLKFQDQLVKGAIEFDGTGAIKAEVSRNADAIGYISLGSLDATVKPLSVGGVAPNTANVVAGSYKIARPFILVTKKGAPLRAETKAFVDWIMSGAGQSIVKKSWISVK

SEQ ID NO: 87283 - protein, 137 aa, Unknown
  Obtained from environmental sample
  misc_feature (1)..(137): Xaa is any amino acid
VLDEETGVYNISWLRRTFPDGGVCLVKGVGRIQGLIIQKGNPLGINSVADLRRCRYINRQRGAGTRLFLDYQLKKAGMDAGDIEGYNREAATHMAVAAAVQGGGADAGMGIASAAKALGLDFIPLGEEEYDFAVLPR

SEQ ID NO: 87284 - protein, 149 aa, Unknown
  Obtained from environmental sample
  misc_feature (1)..(149): Xaa is any amino acid
KQEKANLIGVYARQVQSGDLQNREASGARIYWKALFGDNFSRHPEGDWPNGLLNYGYALLRASAARAICAAGLNPIFGIHHENSTNPFPLADDIMEPYRPLVDFFAKKITASDIKEMNPTAKQMISAFLWADLHFENETTPFYAAMERL

SEQ ID NO: 87285 - protein, 154 aa, Unknown
  Obtained from environmental sample
  DOMAIN (40)...(123): Ribosomal protein S3, C-terminal domain
  misc_feature (1)..(154): Xaa is any amino acid
GGTDAEAFKQQLQKLTGKNVQLNISESTNVNTCAILLAENVASQLERRIAFRRAMKQVITKALKSGAQGIKVMVSGRLGGAEIARTEWYREGRVPLHTFRADVDYAVAEAQTTYGKIGVKVWVYKGDILDKKDVKLELKPSAVEIEEEKENVNA

SEQ ID NO: 87286 - protein, 68 aa, Unknown
  Obtained from environmental sample
  misc_feature (1)..(68): Xaa is any amino acid
IVEKNNIKQAKIMVSTGRKITKGTGTMLSSADRETIDKFIDDIVLVMYQLTGEKELKWNGSPLWMPNI

SEQ ID NO: 87287 - protein, 286 aa, Unknown
  Obtained from environmental sample
  misc_feature (1)..(286): Xaa is any amino acid
TPCQQNRLEPLNSYIRSAGIDTKLYGGTTEQITMNGDVYALPFRSDFWLVFYNKDIFDKAGVPYPSNDMTLDQYDALARRVTSGSGANKIYGAHYHTWRSAVQLFGILDGKNTIVDGKYDFLAPYYERVLKEQDDGIVMSYATLKTSGTHYSGVFFNSQAAMLNMGTWFIATQIARVAAGEATSKNWGLVKYPHPDGVTAGTTLGTITSIGVNRNSKNKDAALDFMKFVSGPEGASVLAKTGTIPAIMSQDVINSIASMPGFPTDANSKAALSVYKTYLEMPLHEK

SEQ ID NO: 87288 - protein, 254 aa, Unknown
  Obtained from environmental sample
  DOMAIN (38)...(126): PPIC-type PPIASE domain
  misc_feature (1)..(254): Xaa is any amino acid
RRSFDLAVFPLNSYPDSEVASYVQSNPGKFAVVNLSKITITSSEREARQILDSIKNGSTTFEEAARNYSQDWAADRGGDMGTMMSFELEYEITDERTRTGVINMAKGELSDLIMNNSGWTIYRVNETAHQADLNDASEKSKVRNYLVGFMRGVSEDWVISSAEKFCSQVKESGFDAAIAAAGLTKQSFGPLPLNFGNFILLGSIRSSGIPELEDAGNNQFFWKAAFSTPLKSPSTPLVIGDNVIVLYPLEEIPE

SEQ ID NO: 87289 - protein, 241 aa, Unknown
  Obtained from environmental sample
  DOMAIN (91)...(240): Domain of Unknown Function (DUF748)
  misc_feature (1)..(241): Xaa is any amino acid
NFSLEHEAKTRVRLGGISLHDLSASLPGNKTPVLTAKTLAARGILADLSARNLSVNTLSGTGVSAWPIRDKDGNLVLPLPAGNDAAPSADWHTTIGNVQISSANITLTDHGPRETAVLPFSELRLSASGLSTRPGAQWTAEVSARPGRQGLVQVAAQGAFSPPAISFRIKVDKADIVFLAPYLQQFAAPALSEGFLHAEISGRIASGRRGGIHMDAAGDAGLHGVSLTERGKEVLGWGRLR

SEQ ID NO: 87290 - protein, 122 aa, Unknown
  Obtained from environmental sample
  misc_feature (1)..(122): Xaa is any amino acid
MKVKYFYLTIITGIAVTLLSSCSSAKFGQTANDGGAVEQIALKYPVVLVHGVALYDKMSFLEIWGRIPQTLTDRGIQVFHGNTEGWRDYESNALILKETIEKILLETGKGKSKYYRALQRRS

SEQ ID NO: 87291 - protein, 119 aa, Unknown
  Obtained from environmental sample
  misc_feature (1)..(119): Xaa is any amino acid
EKASPGFSGDQDAFLDSMAEAGKSVVDRLNGKLLYINVMNRLSVDCDCNGNPTAPDMHDIGILSSLDPVALDQACVDLVYAAPDGKSLIQRIESRNGVRTINHATEIGLGSKTYELVKL

SEQ ID NO: 87292 - protein, 100 aa, Unknown
  Obtained from environmental sample
  misc_feature (1)..(100): Xaa is any amino acid
RNGNRSGVRNFTLINADPAKNITICSEKPINFGVSRYSQENMWHSCHTHELLDISKEPDGKWFLSIDICQRGVGTATCGPDTREKYRIRPGLFKMKLYIV

SEQ ID NO: 87293 - protein, 136 aa, Unknown
  Obtained from environmental sample
  misc_feature (1)..(136): Xaa is any amino acid
CAKYGRLYDWRTAMKVCPSGWRLASWDYDWSELPNGGADGTGAKSKNLKASSGWEGKFGYNGNGTNDYGFSALPGGDGSDEYGDGVFGAWWTSDDDTDFSFVTHVLLRLHDDYIGGYGDDNKGDMLSVRCVAGAAP

SEQ ID NO: 87294 - protein, 76 aa, Unknown
  Obtained from environmental sample
  misc_feature (1)..(76): Xaa is any amino acid
KDQSYELMYEYIDRPANLSNSTGTFQWDAKGNTIILDVKNAPPYYKVGENVLIQMDMKGNQIKGVLADHYILKKEL

SEQ ID NO: 87295 - protein, 261 aa, Unknown
  Obtained from environmental sample
  DOMAIN (99)...(218): Fic protein family
  misc_feature (1)..(261): Xaa is any amino acid
MINQTTKLKLAKLQKRCNQLSKGKERVLREIFFAEIPESVYNSNAIENSTLSLENTEKILLQNFVPKELNIREVYEAKNLAKVMEMLLEKKQKLSINLILHLHKILLSGIDDSIAGRFRKGKEWVRVGNHIGANPNFIHNLVNKLVNEYNKENDIYFLDKIAHFHAEFETIHPFCDGNGRIGRVLINQQLMALNLPPIIVPNKSKEMDYYPLFNKYISTFKYDDFTKNFALLLLESLHKRIAILTSEHIIPLNIWAKIHSV

SEQ ID NO: 87296 - protein, 261 aa, Unknown
  Obtained from environmental sample
  DOMAIN (41)...(110): RNA polymerase Rpb2, domain 3
  misc_feature (1)..(261): Xaa is any amino acid
RNVREQLSSPNIASMQPQDVINPKPLMTLIAEFFGTSQLSQFMDQYNPLAELEHKRRVSATGPGGLNRDRAGIDVRDVHPTHYGRLCPINSPEGANIGLITHMATYARVNQFGFIETPYYKVHKGRITEEIIYITADEELGYKIAQGNSSITEHGALRDEFVTARENGEFTMLPRDEIELIDVAPRQIISVATGLIPFVENDDGQRALMGSNMQRQAVPLMRVDSPIVGTGIEREVARDSRTIKIAKNAGEVVSVDANRIV

SEQ ID NO: 87297 - protein, 168 aa, Unknown
  Obtained from environmental sample
  DOMAIN (1)...(163): ABC transporter
  misc_feature (1)..(168): Xaa is any amino acid
FAGLVGSGRTELAEAVMGLRHVNAGTINLSGHGKVHIQRPSQAVHYGLGYISEDRQGKGIVQGFNLPQNITLISLREYIEGLFINKKAEIAKSESYTKTFHIAAASHKMSLRYLSGGNQQKVYLSRWLDTNPSILILDEPTRGIDVNAKQEIYGFIHQLAQQGISCWV

SEQ ID NO: 87298 - protein, 252 aa, Unknown
  Obtained from environmental sample
  DOMAIN (1)...(252): Inner membrane protein CreD
  misc_feature (1)..(252): Xaa is any amino acid
LIVLVLLLLIPLAMIRGIISERSRTADFAEADIMEAWGSQLLEAGPFIVIPGIRTDEVRTRTERDGEKIELIKRPFNLVVMPQKLNIKTDFKTTIRRRGIFSVPLFVTELTLSGTFDPAIASLSPNEEIFPAQAELVIALSSQKGIRKIDRAIWNGRELFFQPGNMGINIIRREGMGIIIARRDDSFWDKPAYTEAPVGSGIHALLPDFTQSNFDIAIAIQGGQLVRFLPVGQDTHVEISADWASPSFQGSF

SEQ ID NO: 87299 - protein, 81 aa, Unknown
  Obtained from environmental sample
  DOMAIN (13)...(68): Phage derived protein Gp49-like (DUF891)
  misc_feature (1)..(81): Xaa is any amino acid
GPDLHRPYADLLEDGIYELRIKLTGEQVRILYFFCYKDIIILTNMFEKHTDKVPKSEINMAKKNRDDFLDRYTEQEIRGLL

SEQ ID NO: 87300 - protein, 249 aa, Unknown
  Obtained from environmental sample
  DOMAIN (9)...(245): Alanine racemase, N-terminal domain
  misc_feature (1)..(249): Xaa is any amino acid
LLERGLIESDTYVLDLDRIADNAGRIGDICRKNGLCAYFMAKQIGHNPEVSRRVLAAGGFNGMVAVDFREAQILHSAGLPVSHLGHLCQVPSGGWDAALDMKPEVITLYSQEKAEELSRAAGKRGVIQNVLLRVRDKDDIFYQGQEGGFPLETLEGTLDQFKNFKGIRVAGVTSFPCFLFGEGKPSPTHNAQTVARAAAVLKERGLDCSQINMPSCNSPATIPMAAQLGATHVEPGHSLTGTNPDNLYE

SEQ ID NO: 87301 - protein, 160 aa, Unknown
  Obtained from environmental sample
  misc_feature (1)..(160): Xaa is any amino acid
VAWEHGDALWDYWGGSPSAGALLVPGLKSGEAGWRQCLLERVSRAALPDWAGQADLVTSAPPSALHRLMRGFDFAEEAARLVADSLVRLYARTLARAWASRRQSQKSEGKRRRMPQKMVYVRKGVDVAGKAVLLVDDVWTTGTTLLRCANALKKAGAGAV

SEQ ID NO: 87302 - protein, 110 aa, Unknown
  Obtained from environmental sample
  DOMAIN (1)...(110): Ribosomal protein S9/S16
  misc_feature (1)..(110): Xaa is any amino acid
IRDGNGKVTVNGKDLPAYFALEEHVNMVRQPLMVTSNENKYDILINVYGGGCNGQAGACRHGLARALCQVDHTNYTSLRSNGYLTRDPRMVERKKYGRPGARRRFQFSKR

SEQ ID NO: 87303 - protein, 230 aa, Unknown
  Obtained from environmental sample
  misc_feature (1)..(230): Xaa is any amino acid
NLELGKFLPPESGIKIPIHYDYSLNLNNPEYNPLDPDVKTRHLSAAERSEINDKIQDRVIRQNINFMNIRKEYTNKDAKQHFYDIENFTASYSYSGQRAWNVDVKNNNKDLHKGGFSYAYNIPAKSVTPFAKTSLAKQKSMAFISDFNFSYLPKSFSFNTEVLREFNENELRNKSVSDLIIKPTYFKKFDWIRNYDMKWDLAKSIQFDYTASAIAFIEEPIGRIDTREER

SEQ ID NO: 87304 - protein, 249 aa, Unknown
  Obtained from environmental sample
  DOMAIN (123)...(200): Fibronectin type III domain
  misc_feature (1)..(249): Xaa is any amino acid
IYGEQTTSATPVATGGGGGGGGGGGGSNPPPSPPATVAVTGVSLNKSSTGLVAGNTETLVPTITPDNATNKNVVWTSSEPNVARVSNSGVVTGTGAGTATITVTTIDGNKTATCAVTVTLPVPAIPTNVSAASGNSIVVSWASVPWATGYKVYRSLNLSTNYVLCQTVSSAPFTDTGLSEDTTYYYKVSAYNSTGESAQSSYVSATTPPPLSDIPTFNDVEAFKIWLNAKGANTKDKPYFVILKLSSLE

SEQ ID NO: 87305 - protein, 194 aa, Unknown
  Obtained from environmental sample
  misc_feature (1)..(194): Xaa is any amino acid
ICSATDERQEEAKRIAQSVDAVIVVGGKNSANTQRLVQIARGCGTHTQAVETEDEIDWEPLRACKTVGVTAGASTPNWMIKRVCDHLLLLSRTKGKNSMGALMRLFDVMANLNLFVSSGAVAAYYASCAIQGITFSTAGGVIALFYFISVYLWNSLTSIENTLHLDISKYRFYNKYPKLLLLLSGASTLAVLVT

SEQ ID NO: 87306 - protein, 97 aa, Unknown
  Obtained from environmental sample
  misc_feature (1)..(97): Xaa is any amino acid
LLITSDHGYAIGRSFSSQIDNPRATELLRKQFGAKRYNTLLPGEIINTIPPVTMIHNNQIVIIGQNKWKVQGGYPNICHGGMSLLEALVPWIELEAL

SEQ ID NO: 87307 - protein, 69 aa, Unknown
  Obtained from environmental sample
  misc_feature (1)..(69): Xaa is any amino acid
MGVLLQAFYWGCPERAGREFEWWDYVKEQIPELAQAGFTALWLPPPSKASTQKAMGYEPFDHFDLGELT

SEQ ID NO: 87308 - protein, 243 aa, Unknown
  Obtained from environmental sample
  DOMAIN (84)...(238): ATP phosphoribosyltransferase
  misc_feature (1)..(243): Xaa is any amino acid
SPAPLGFAVYLDLLERLDFQRRETEADLPERSGGIINIALPKGRLGEKAYAIFESSGYGCPAIREGSRRLVFESPDNGVRFFWVKPSDVAIYVERGAADIGVAGKDILLEYSPDVYELLDLGIGKCRMCVAAEKGCVSDNHDRTLRVATKFTNIARDYYGKLDREIDIIKLNGSIELAPLLGLSDVIVDLVETGGTLLENNLEPVETIMEISARLVSNKASYKFKHEAISRLCERIAITLGNS

SEQ ID NO: 87309 - protein, 202 aa, Unknown
  Obtained from environmental sample
  DOMAIN (31)...(202): Rhodopirellula transposase
  misc_feature (1)..(202): Xaa is any amino acid
LESPIKQVPGRIRKEGGGPKFIEEIYPEMGERIREIIDGSTYGNPEKVLSWTTESLRSIQKKLGEKHDISVSHVTVGAILEAMGYSKQANQKMLQVGEPHPDRNAQFEFIDKKTKAFIDAGEPVISVDTKKKENIGNFKNPGQEYRRNSEPREVLDHDFPIEELGKIAPYGVYNLNYNIGFVNLGTSKDTAEFAVESISRWW

SEQ ID NO: 87310 - protein, 72 aa, Unknown
  Obtained from environmental sample
  DOMAIN (11)...(68): Iron dependent repressor, metal binding and dimerisation domain
  misc_feature (1)..(72): Xaa is any amino acid
EIDESGYITLTGKGRKIAKTMYERHIAISDWLIYLGVDKKTAVNDACKMEHAMSEKSFAAIKKHIEQLTINR

SEQ ID NO: 87311 - protein, 173 aa, Unknown
  Obtained from environmental sample
  misc_feature (1)..(173): Xaa is any amino acid
SPPVDTETITERIEGWGTLNPAVIVQFIQEQNRSYTRNFLEDFIGTYFGEARAVGINPDLAIAQMCYVTNFLRNEKAMSTRNYAGFTTMPAGGRFRNREEGIQAHIQHLKGYADERYRPSHIVDPRWNNIVNVRGTVDNLDGLARIWAPNNRYYAADIANIIDDMRYYAQGRA

SEQ ID NO: 87312 - protein, 252 aa, Unknown
  Obtained from environmental sample
  DOMAIN (3)...(35): Sel1 repeat
  misc_feature (1)..(252): Xaa is any amino acid
ERHENLGVCYHNGEGVEQDYTEAVKWYRMAAEQGNAQAQKNLGNSYYNGEGVEQDYTEAVEWLYKAAEQGHADAQCNLGNRYYYGKGVEQDYTEAVKWYRKAAEQGDAQAQKNLGDCCHEGEGVEQDYTEAVKWLRKAAEQGDAQAQCNLGVCYHNGEGVRQDYAEAVKWFRKAAGQGDADAQNSLGLCYYYGAGVQKSYMEAAEWFRKAAEQGLAEAQKNLGLCCYDGDGVQRDFAEAAEWYRKAAEQGDA

SEQ ID NO: 87313 - protein, 277 aa, Unknown
  Obtained from environmental sample
  misc_feature (1)..(277): Xaa is any amino acid
TDVIDNDFLVAEGSGDINVKPGNNPVRITMDPPSDSSSSPLTFAITMESVGNGTAIAELDRAAQGAEVTITAAPNNGYAFEKWEVVSGGVTLPNDKANPAMFTMPGNAVTIKAFFKEIPPDTPHINFQQLPTFDPVTFGYTTQPSAKNVTIINDGSGTANITRIELDDDKAFTLGSTSITLLFVGKIATFTIQPNPNLLAGTHTGTIIVTYDSGEKAQAMVSFKVTLGSGTEADPFLVYDETALRKVGRGNWEHGNWSLSAYYKQMDDITLVEQSNW

SEQ ID NO: 87314 - protein, 70 aa, Unknown
  Obtained from environmental sample
  misc_feature (1)..(70): Xaa is any amino acid
YPHEIVPAPPPATAAKDRDASPRKQEGVGITGVDGVLVRFAKCCNPVPGDLIVGYISRGLGITVHTLDCV

SEQ ID NO: 87315 - protein, 281 aa, Unknown
  Obtained from environmental sample
  misc_feature (1)..(281): Xaa is any amino acid
NLIGEACRSRIRGDVKRYPGLVAGDAVQSSPAKSPASDGRWMIGSSSGTDVGNLKLTSKGSGAVIYSEGGMTILAGRSTYDIIGTNGPAIESKGAVEIGTEASGKIGNGQINITGYNTAPTAVGSSTAAIVSPTVKVIGRATDAGLTLISSKGKYVILANTPTGAAGSILAKSARFIHQVAANTDGAAVFSTNGGVELNRVKVDGAPTGTAAVNGGLITAGNAGVKIDGGTFATAAGGRGGEAIFTTGGVQIIGASIKSSGILTGSLPSYVISATGAVVVT

SEQ ID NO: 87316 - protein, 269 aa, Unknown
  Obtained from environmental sample
  misc_feature (1)..(269): Xaa is any amino acid
EPLLFPEFCDLLQYINKKGIKRIDVFTNLTFLTSEIIDTIKATDASVRFSIYGHEEKTHDAITKKDGSFKKLISSVELLVKKNIPLRPALILMKENQHCTEPVKRLLESLGVSYNGYDTIRNNIPNNKNTHYITDPGLLEPRYSTKPNFQTKELDFHRNHHRNSCWDGKLAVTASGDVLPCIFARTFTCGNVKSDSFETIKANLLTYWKTTKSDINGCRDCEYRYCCHDCRPVSYGIEGDYYAKYLRCTYDPYTGVWHELATVTKELYK

SEQ ID NO: 87317 - protein, 230 aa, Unknown
  Obtained from environmental sample
  DOMAIN (1)...(230): Aminotransferase class-V
  misc_feature (1)..(230): Xaa is any amino acid
VNIAIKGLLSCGDHVITSSLEHNSVSRPVHCLQQSGVEVTKLPTDIDYGLNTDDIKKAVLQNTRLVVCNHVSNVTGTINDVSSIGAFCRDSGIAFLVDAAQSAGVRRIDVSKMNINLLAFPGHKGLLGPQGTGGLYISPGVEIKTIIQGGTGSDSELLEQPETMPEKFESGTLNTPGLSGLAAGVRFILERGIEEIEHREALLTKRLIEGVSDIESIQLIGPAARCDRGS

SEQ ID NO: 87318 - protein, 94 aa, Unknown
  Obtained from environmental sample
  misc_feature (1)..(94): Xaa is any amino acid
VSGTAKVTSASTDTTYGTIYLSGGTLEMTGGAVENTSTTAGNAIRSDSSGTVSITGGTVRKAGSNGNGFAVYNGGTGTVTIGPSATIIGNNYGL

SEQ ID NO: 87319 - protein, 251 aa, Unknown
  Obtained from environmental sample
  misc_feature (1)..(251): Xaa is any amino acid
SDECLRAYNLDPNGWKLTSFIKAPELDDTPNPRDSTQLRFVKNDLNKLINKMKEGTFPDNGYRDLIDLDSWAKYVLIQLVLDNFDFNSKTQQGGLTGSNFLYKVDSCSKIQAGPLWDFDLAAGVQNGGGGFGGFPPGGWGQPPGQGGGAAGFPAHYQSYQDPIAPTSENYSHAFYKRLWSDPVFKAKYKKLWDRHKSDFQNLSTLIDNIKSQVDGSITGKGTNTWANNSMMASGALTQQQWNTEVSGLKTW

SEQ ID NO: 87320 - protein, 192 aa, Unknown
  Obtained from environmental sample
  DOMAIN (18)...(157): Shikimate / quinate 5-dehydrogenase
  misc_feature (1)..(192): Xaa is any amino acid
AIQAAKAIRTNVVLKSQGADSVPSKAVDKLKTLCQSLAGKNAVVIGNGWMGKLVAELLIYENANVTVTLRENKKGFMQIPNGASTINYNERYKVIEQADIVISATTSPHFTLCHKELTSLTQLPSIIVDLAVPRDVEPFIKEIPSLALLTIDDISSESRALPAESILMIDDIIGEHIKKYYHWFEFKRENVA

SEQ ID NO: 87321 - protein, 149 aa, Unknown
  Obtained from environmental sample
  misc_feature (1)..(149): Xaa is any amino acid
YRGHTFEDVEFWVKKAAQLGINVGAHLIFGLPDDTREKMLSQVHKINDLPIYSIKFHQLQIIKGTTMEQQFLENDPNFKPLFFELEDYLNFVVDFVEQLRPDIIIERIAGEVPPQFQVGPVWGGIRNDQIMVKFEKRLTERETFQGRLF

SEQ ID NO: 87322 - protein, 65 aa, Unknown
  Obtained from environmental sample
  misc_feature (1)..(65): Xaa is any amino acid
AALPELSLRILEYARGHGRVTLKEMVILTGVGRNTLKEHFRKLVENRQLTLHGKGRGAWYRIGRG

SEQ ID NO: 87323 - protein, 100 aa, Unknown
  Obtained from environmental sample
  DOMAIN (1)...(84): Penicillin-binding protein 5, C-terminal domain
  misc_feature (1)..(100): Xaa is any amino acid
KNAVAGNVAIKKAVVENVEVYPKESYFDLVKRGDKGAAPTVSMELFQDVLAPITGGQALGKIVVTDEGVVVREIDLVCNQEIRQSTYWDALKKVTKSYKF

SEQ ID NO: 87324 - protein, 220 aa, Unknown
  Obtained from environmental sample
  misc_feature (1)..(220): Xaa is any amino acid
GVDHHISAIEKNAAWAKEHGVLGIQSVEEAACVLAWQFFYPNQEIPLIVQLIGDMDIWRFSFGENSVNLNYGLELCDILPTAPFWKEYLRPELTMRDLEPILAPGRAVNAYETKRRARLIREYAYETSIAGHKAVACNLRGNSAMFGELEKRYAICIAYMFDGERYHISLYTARNDIDVSKICAQYGGGGHAKAAGFFTDTLPWSLGGKRLRRSDARDSG

SEQ ID NO: 87325 - protein, 290 aa, Unknown
  Obtained from environmental sample
  misc_feature (1)..(290): Xaa is any amino acid
DSPGTDGPGTDDPGTDGPGTDDPGTDGPGTDDPGTDDPGTDGPGTGGGDNGSTAGRWRLSRQKIDYVSSTSGNVVTGRTSSETVYNYIEYTSNTNYECTKSGTSTMYFNNNIGYGTSTSHETRNGQNHIETSESTYNSETYSYTSTSTTTRNYDSAGRILDESNSSSTTTADGTSTSKSEISNEYDAETGLLSMYKKNETSTSTSGTTTTTSSVQNYTILLLSDNDGIRTYKRYLNEVINNGTSVDVSGQGYQEYKIQNGKTIEEKYFTKDGVLNSTTIITLSDNEVIRA

SEQ ID NO: 87326 - protein, 237 aa, Unknown
  Obtained from environmental sample
  DOMAIN (97)...(178): Helicase conserved C-terminal domain
  misc_feature (1)..(237): Xaa is any amino acid
VRARQPASDFRGVQAKTARDAVCLGSPADYELKQAGKDRVVEQIIRPTGLADPQIELRPIAGQVPDLMNEAEKVIARRERVLVTALTKRMSEELSQFLLTKGFKVCWLHSDVETLERVRILNDLRSGKYDILVGVNLLREGLDLPEVSLIAILDADKEGFLRSERSLIQTIGRAARNINGRVILYADILTDSLDKAVRETNRRRAIQLRHNQEHNITPETIKKNIKKSVAADETILA

SEQ ID NO: 87327 - protein, 56 aa, Unknown
  Obtained from environmental sample
  misc_feature (1)..(56): Xaa is any amino acid
MKMWDGRFSKDTDALMEAFNNSLPIDKALIKEDIAGSVAWAGALAKAGRPHNRRTR

SEQ ID NO: 87328 - protein, 130 aa, Unknown
  Obtained from environmental sample
  misc_feature (1)..(130): Xaa is any amino acid
YLRIILYGAIFAAMSPGLTHFIRSDGHPKTSMLVQVVGAGMNIILDPIFIFTFNLGVAGAAWATIISQFISFVFVLGYFSSKWTRLRFRFRNMKLDAKLTGSILAIGFAPFVMQLAMSLVGILQNATILR

SEQ ID NO: 87329 - protein, 190 aa, Unknown
  Obtained from environmental sample
  DOMAIN (64)...(190): Peptidase family M28
  misc_feature (1)..(190): Xaa is any amino acid
RHGQEGLGKAVKYLLDAYKKMGLNPQKQPFTLQSARVQNSNEPDIQLNNVIVVIKGNDPDLCNEYIVIGAHLDHLGTRPGQGGAKPTIFYGADDNGSGSVALIELVRHFQKNPPARSLVFIHFSGEEWGLLGSKHWVANPTVDIKSVRFMANLDMIGRFDNEKAVLTFTAMGMGAKDIERAKDLAPEGFT

SEQ ID NO: 87330 - protein, 204 aa, Unknown
  Obtained from environmental sample
  DOMAIN (1)...(84): tRNA synthetases class I (C) catalytic domain
  misc_feature (1)..(204): Xaa is any amino acid
IFPHHESEIAQSECANGVTFARYFLHNNLVTVNGQKMGKSLNNFITLPDLFKAHDPVIIRFFTLLTHYRRPLDFKETQIEEARDSYNRIYESVSQARSLLKNKQIDGDPVVYNDVKQIISDFSSAMDDDFNTPVAIAHVYAIVKLLNTETHNSASDLGKIKTILDFFSSHVEPILGFSFDEQSASSNDQTQELVKYLSDIRQKL

SEQ ID NO: 87331 - protein, 245 aa, Unknown
  Obtained from environmental sample
  DOMAIN (137)...(245): Histidine kinase-, DNA gyrase B-, and HSP90-like ATPase
  misc_feature (1)..(245): Xaa is any amino acid
KKRDATLHSLREAYKDLETTKPLREIGQSSAFINHEIKNYMMIISGYTVLLTKSKELNEKDRGMVENIAQTIAKLQEFSMSVLELSKSKVTLEHKEVELAQTLRSCIDAHFPKQSSRFAVSCAQHGAAPIEGIFTNGNQKKLERVFINIIRNSLEAGAQRVNVRFYAYNAIVLTVIEDDGDGCDADHLSNIFTTFFTTKHRSGGTGLGLCVIRSIIEAHGGDINIYSKNLLGGGKHGLTVQITLA

SEQ ID NO: 87332 - protein, 124 aa, Unknown
  Obtained from environmental sample
  misc_feature (1)..(124): Xaa is any amino acid
MSEKFIGAVIGFFVKLLFCNVCILFMIYGFVSMLHILYVVDGFNGTPDQIVFIVFTCLLFYFICKSAPGMAQSLLTGTPSLSATGAISAAGGAFAAAGATLAMAKAPGDKLVGTLSEAGAASRE

SEQ ID NO: 87333 - protein, 182 aa, Unknown
  Obtained from environmental sample
  misc_feature (1)..(182): Xaa is any amino acid
GSKGYVFTKYGFKEIEQKKEYPKDYNGSFDHPLSIKILNEEADIVCTNPPFSRCIEYWELLINSKKKFIIMSSHMNPIYTAYIKYFKEKKVWAGFYKVSKFETPKREIIGIPSFWYTNIKIKNRPKYKFLKFVKLNEIPEKDRTYDDNNILLIDNCYIPIDYKKPFAISSYPILNGILEKGL

SEQ ID NO: 87334 - protein, 63 aa, Unknown
  Obtained from environmental sample
  misc_feature (1)..(63): Xaa is any amino acid
RRANLRCRTKDAKKPELMHTLNGSALAVGRTLVAILENCQQDDGSVRIPEALRSFMGTDVIKA

SEQ ID NO: 87335 - protein, 57 aa, Unknown
  Obtained from environmental sample
  misc_feature (1)..(57): Xaa is any amino acid
MKETDHTFKSLYDVVARLRAPDGCPWDREQSPASLRECLIEETYECIEAIDEQNPAH

SEQ ID NO: 87336 - protein, 231 aa, Unknown
  Obtained from environmental sample
  DOMAIN (64)...(229): Binding-protein-dependent transport system inner membrane component
  misc_feature (1)..(231): Xaa is any amino acid
MKYARVKDQYSALKLFGKGEPYLLWGFIPAQRHFITTAPTAYPVFFMGSDNLGRDIFSRIVYGSRVSLTIGFAATLISLALAGLAGGVAGFFGGFADWSIMRTSEFLMLIPTLYLILFLRSLMASNMDPGQSYMMITIILSLVGWPSSARTIRGMVHAIKREEFVLNAKLEMIPSVVIIFRHIIPQIASLLIVSVALSVPGFIMTETVLSYLGLGITDPAVSWGSLIKRDL

SEQ ID NO: 87337 - protein, 78 aa, Unknown
  Obtained from environmental sample
  misc_feature (1)..(78): Xaa is any amino acid
AVTFDKSANIREAAKAIPANRILLETDAPYLAPVPFRGKTCTPAMIPHIAQVLANVKEISLDDLLKICRENTNKMYGI

SEQ ID NO: 87338 - protein, 275 aa, Unknown
  Obtained from environmental sample
  misc_feature (1)..(275): Xaa is any amino acid
NLINFAKPALIRLNNTPLFIWGHGTGWRGGINNNDFLPEPAKAVAFDDSQRQYMSLPSFGRTVAGKGLSLIAFDTCYGALLEVAYQVRKDAELFVGSEGEIMSTGWDYTALFTDFIGKRNLSISNLGDAIQNQFSEHYASLNNATISQIQLSQVNNLYSRFNDFSGAVAEAISDEPAKDAVLNQILHNVESYFFTSFPSDMYIDILDFAKKTAAIRELITTDADQQEAIFKSANKLEEALALVVPSSWAKNGTSKKIGVHLIPLQGIAVPAARHE

SEQ ID NO: 87339 - protein, 272 aa, Unknown
  Obtained from environmental sample
  misc_feature (1)..(272): Xaa is any amino acid
MYVNQQELEIGIPAQDIGSAAAVRFNITETEAAGLSATVTVDARPSSKNSEAAYGRLAAGANSVSYKTSGSLELSTGDFLAVRVRAANGDSLYYKFAPVVEALSIEAPLMTAFTLINATVSGSAKADKTGAINQETGVITMPATSYTTVATDTILDFHKLAANFTLSAGAKLYVGDVEQVSGVTTNNYYQPVTFTVVAPDNASKTYTVAGPVPASGPTASGSVVGTASFQTQGFGVMNITTTNTSLGLPTSANATKLNVVWNPTGTFTYIGP

SEQ ID NO: 87340 - protein, 101 aa, Unknown
  Obtained from environmental sample
  misc_feature (1)..(101): Xaa is any amino acid
MNIGLMGVICQLTWNQGDDFFGLGGNLFLRNCEYVAKYNVANLDVPFTTYVRLNGNGNSPARDTMTGVSPASRGESRPVWALPYYHYSSIKGVVSAKTKYT

SEQ ID NO: 87341 - protein, 263 aa, Unknown
  Obtained from environmental sample
  misc_feature (1)..(263): Xaa is any amino acid
GIINTGTLAPKTLTPTFSGNPIKVITWPVVSGNNNPLGANDSLTVTWRGIVDTSKTGSVVNTAYADLANYPNDAVGAQVRSRFSLVPIPPDTSAPPPGELTVSADPPSCAFAGSITVKLSSSRSGASIWYTTNGQEPDSMSYTSKRYTGELKFEMSTTLKAVAYADGAESDVITHKYDPISTVPIWFATFYDDVGDGKAHGVKLVISPGWESELNWDVVKEHPELLRLPGLPEKDALRLSKDTIVIPFKNGMSANPQGASTKL

SEQ ID NO: 87342 - protein, 232 aa, Unknown
  Obtained from environmental sample
  misc_feature (1)..(232): Xaa is any amino acid
RRAFLAAIREGGATRLSLGVQTFYGPSRNAVHRAGDGAILSDRLTHAAVFFPGAFSVDLMSGLPLQSKSILLDDIAKVVSYKPAHISLYALSGKKAADKNRDEADELWLYGCDALEKTGYSRYEVSNFCLPGGECKHNIRYWQMRNWLALGPSASGTIIDDETGTGFRFTYPPDTDNWLECEKERLDALTLIKETFLMGFRCLEGPDEGSFLRRFKRPATDIIPKTLGVWGS

SEQ ID NO: 87343 - protein, 184 aa, Unknown
  Obtained from environmental sample
  misc_feature (1)..(184): Xaa is any amino acid
MLGDFVPTDKGIVFSLENAPQGVSIDYKGAITVSKNAALDGDHIVIVKAEYEGAVYSEKLLIQVKKRVGENNYIGTVGTLTLNNPDVTIIKGNPTSGKLTAIPGNYVLAVAGGTVGANIWEAGFVYQWSGLAWEKREPEKYSDLYISCFKDGLEAPGLTQGMGWFRAIFAGLICAQQGFIEKLN

SEQ ID NO: 87344 - protein, 268 aa, Unknown
  Obtained from environmental sample
  misc_feature (1)..(268): Xaa is any amino acid
GRELAGSKWISGSGGIVRFSGLSSNTSYYVWARSKENGAYRPGPSKASMGGTVATIALDSAISPDWSISVLSKSQHEFSIKDDAALLYDTGQGIEYALSLVPDQVPNGSAGTVHEWISGSGGKAVFGGLSVYSRYYVWARPKKNSVYDAGAASMGGPAVTLATPEFIGFMESFIVPSSVGAPFSPAYSDGPAHGQTIATTPSLFTDSVLAPNGKVILVPGYSNNIGIYDPIANAYSDGPAHGKVKTEKYAFIGGVLAPNGKVILVPTN

SEQ ID NO: 87345 - protein, 62 aa, Unknown
  Obtained from environmental sample
  misc_feature (1)..(62): Xaa is any amino acid
FITHDLRLVERFCQRVMVMDNGQIVETQVVGEKLTFSSDAGRVLQNAVLPAFPVRRRTTEKV

SEQ ID NO: 87346 - protein, 263 aa, Unknown
  Obtained from environmental sample
  misc_feature (1)..(263): Xaa is any amino acid
YQWYSNTNNNKIGGTLLSSATNTSYTPLNTAAGDLYYYCVVSNDCGKDTSDVSGKHSVTVDEIGTPALVENCNTTTFISGDITYGDELNTDINTNTTTVGSQVWSAPVFVSGCNKTGFTGGSNPFNSDCRKNTNDAVARKHTSGGSDFFSWCAVARYKETLCPSPWRVPTNTDFCTLDKALGGPSNCPAGTPHTTSGVAAKYVSSWGITFGGDCISDGTLFDQGSAACHWSQSRYGSDSAYSLILTTSAVVYPQRYASKYYGL

SEQ ID NO: 87347 - protein, 148 aa, Unknown
  Obtained from environmental sample
  misc_feature (1)..(148): Xaa is any amino acid
AENVRNLAKNPSTIDAKNQYGPVVLLNRGCVLDGFVIQNGLRTGKEKNGGGIWAGDSVVIENCKILNNLAYNGGGVYGKGRVRIINCEVHDNEARAYGADMYGHCLSLATVPFTTLVPPVPSEPPVLCPIPSITAQPSSARYSVVLPN

SEQ ID NO: 87348 - protein, 88 aa, Unknown
  Obtained from environmental sample
  misc_feature (1)..(88): Xaa is any amino acid
MRLESKALEFELHVEENIPAVVVGDVLRVKQILNNVLSNAFKYTSKGGVTLSVFHETDSAAGGRGASRTESGVTLVFRVSDTGQGMTA

SEQ ID NO: 87349 - protein, 296 aa, Unknown
  Obtained from environmental sample
  DOMAIN (14)...(193): SPFH domain / Band 7 family
  misc_feature (1)..(296): Xaa is any amino acid
VWVLTRRRVVSTDVVHIVQSRKSTTSYGVSYKSNVYYEWPSWLPIIGVSVRHLPITNFDLTIDAYPAYDKDRIPFLVDIKAFFRIVDANVAAARVQDFKMLQNHLLGIVQGTVRSILAKSKLENIMEERSIYAEEFTAAVKDNLKEWGIEAVKNIELMDVRDADKSSVIQNIMAKQKSMIEKESRVAVAENMKKAEQAEIQATREIEVSKADAERQSGEAKATSIKMIGIADAEAHREVGVSKEKAEQKIKEEAKITTEKEMQVQEVAIVQKAEITKKAAIVEAEQKQKQMRLPLK

SEQ ID NO: 87350 - protein, 238 aa, Unknown
  Obtained from environmental sample
  misc_feature (1)..(238): Xaa is any amino acid
ERIEVGVRQTASLWFAKDGSDTDFKNFCQTNFVAEPEQLDILFNKLSQNFELLYGYFNKINVDLKLPLHLNLGTITDIDEIFGGFDPSAHLTEDLFLNKVAFTILLNFRTYSLEEKNTLGQHWTRKEWAYARMGDMFTSRVPADLLQEFSEIVQGADNYISEYNICMDELQNNDGKTLFPKNLKLISHWGLRDELKSQYAQPKGLEAQKMIYAVMKRIINQDIPQVVINNPTVQWNPF

SEQ ID NO: 87351 - protein, 80 aa, Unknown
  Obtained from environmental sample
  misc_feature (1)..(80): Xaa is any amino acid
MSESPLILASASPRRKYWLEAVRIPFEVAAPEIDEAALPSESPCDMVGRLSVEKARAIAAANPGRWVLAADTTVVLDQTV

SEQ ID NO: 87352 - protein, 82 aa, Unknown
  Obtained from environmental sample
  misc_feature (1)..(82): Xaa is any amino acid
LGLSKSEFIKRMAYYMGEINALHPFREGNGRTAREFFRQLSLNAKYTLDFSKTEKEELLTADIEAFNGKYDKLINILEKVIV

SEQ ID NO: 87353 - protein, 146 aa, Unknown
  Obtained from environmental sample
  DOMAIN (2)...(141): NusB family
  misc_feature (1)..(146): Xaa is any amino acid
GRILAFQALYFWDTLSADVKSKKDDRSSIEELTSFEWLEEEKRNKLDEGICTFSKILIAGTVENITGIDDIIKKHLENWDITRVNRVDLAILRISVFSLMFQEEIAPSIVIDEAIGISREFGTDDSYRFINGVLDSIRKTLQGQEK

SEQ ID NO: 87354 - protein, 41 aa, Unknown
  Obtained from environmental sample
  misc_feature (1)..(41): Xaa is any amino acid
VLDLAMYLVLGAALGTVGGLFGIGGGLIAIPVLGVLFGLDQ

SEQ ID NO: 87355 - protein, 78 aa, Unknown
  Obtained from environmental sample
  misc_feature (1)..(78): Xaa is any amino acid
VESLGDKLRTAREAKDISLDQAGADTKITVRYLRALELEDFSGFPGEAYITGFLRNYGDYLDLDVQELLSLYRAFKIQ

SEQ ID NO: 87356 - protein, 275 aa, Unknown
  Obtained from environmental sample
  misc_feature (1)..(275): Xaa is any amino acid
GKPITVTLRSVSNLNIHNLFLSGFGALFTVENGVTLVLENIRLVGKRNTSSMIVINPGGKVILNDGSEIANNGNENKDYGGGVTINIGAVLEMKGGEIARNYSVDPTEPSFSSTAGGGGVLVNGGEFIMTGGRIAENDGANGGGVLVKRGGTFTMGPFILPKYESQIYKNASYEGGGVKVTGAIIDNQNPNALPHQSTFTMKGGRISDNNGTGGGVAVGFRGIFNLENGEISKNTSSDAGGLFNRLGTVYMYGGEISDNRGPWSSGGVLNQGQFF

SEQ ID NO: 87357 - protein, 77 aa, Unknown
  Obtained from environmental sample
  DOMAIN (1)...(68): FKBP-type peptidyl-prolyl cis-trans isomerase
  misc_feature (1)..(77): Xaa is any amino acid
IFDSSSHLEKGEEIPLEMVIPGWAEGIQLMNVGSKYRIYIPSHLAYGERGAGQIIPPYSTLVFTIELLEIIQENSEQ

SEQ ID NO: 87358 - protein, 274 aa, Unknown
  Obtained from environmental sample
  DOMAIN (11)...(251): Beta-ketoacyl synthase, N-terminal domain
  misc_feature (1)..(274): Xaa is any amino acid
IYSGGDFPVKKKIYLSAPGLICCAGKNRNELYDSCLRGYQGGMVMRELPGANRKFHVGLIPGELPKVTALPESLIKEPAVYAAGTRIIRIIDAAIEQLRPNIEKAIAKYGPDKIGVCLGSCDNGSEGSLLAHKALLAQGAFPQDYNLRFQSASFPAEYIALKFGLSGAVFTIATACASGASAIIRGAELIRAGLCGAVIAGGADIVSDTVLAGFHSLEAVSDSITNPFSKNRKGINLGEGAAFFLLEAEEISPVELLGAGESADAYHMTGPGTD

SEQ ID NO: 87359 - protein, 131 aa, Unknown
  Obtained from environmental sample
  DOMAIN (15)...(122): Histidine kinase-, DNA gyrase B-, and HSP90-like ATPase
  misc_feature (1)..(131): Xaa is any amino acid
RFYSGVKSEIGDVLFDREQMRRAIVNILQNAINAIAKTARRGEIRVVAEKIDGEVLCIIRDNGCGIPPGTGDAIFTPYFSRQEGGTGLGLSIVEKIVYDHGGRVWYESSPGGTSFYFTIGRNAAAQKTENE

SEQ ID NO: 87360 - protein, 288 aa, Unknown
  Obtained from environmental sample
  misc_feature (1)..(288): Xaa is any amino acid
SLIANFEQVTYTLETPISPSSSGSVSRSLNKDVYNYNDQVTLTATATSCYTFTGWSGDATGTTNPLVITMNGDKKITAGFSQQGPYTLTTNVSPAGGGTVSRSPNQTNYTCGTSVTATPTAASGYVFTGWSGASTSTNTSVTVTMDGNKTLTANFQLIPTTPQYTLTSSVNPSGGGTVSRSPDQTSYESGTSVIVTAKPNTGYEFIGWSGAMSGTTNPLTITMDGNKTLTANFQLIPITQYTLTASANPSEGGTVSRSPNQTSYESGTSVIVTATPNTGYKFTGWSSA

SEQ ID NO: 87361 - protein, 179 aa, Unknown
  Obtained from environmental sample
  DOMAIN (18)...(179): C-5 cytosine-specific DNA methylase
  misc_feature (1)..(179): Xaa is any amino acid
MSTGNRLPVRNAPQKTRFTFADLFAGIGGFRIALEKVGGRCLFSSEWDKYSQKTYRAWHGDMPHGDIREIKPADIPDHDILAAGFPCQPFSIAGVSKRKSLGAAHGFNCATQGNLFFQLATIIKAKRPPLLFLENVKNLRSHDNGRTWTVIQETLHELDYWIFSDVIDAAGWVPQHRNG

SEQ ID NO: 87362 - protein, 262 aa, Unknown
  Obtained from environmental sample
  misc_feature (1)..(262): Xaa is any amino acid
MDLSDTLYLMNCGFVYQLKNLYGPGIAHFESQMNLVNRSGKLLFILSALHKSLYNFKKTKEYSELALKRMPYDEEATVNLSDALWGLGQRAYSLEVAQTLYEKYPTERLGIYVAKTLMGLNRYSEAADLLLDVKKMFGPSSKLAMVYTEVLLFLNRNEEALSVSEEALLKDKKNADLLIAKGKSLFYLRSYKAAEQTFNQALAIKSESEDAKSYLSATKAFLGKADIKAIQKAIDPVGQKPADIKKLVLGFLVTENYPIVRI

SEQ ID NO: 87363 - protein, 238 aa, Unknown
  Obtained from environmental sample
  DOMAIN (23)...(186): Radical SAM superfamily
  misc_feature (1)..(238): Xaa is any amino acid
YLGRIIHREHWDPNVIQFCTLDSIKTGACPEDCAYCPQAARYNTGVAPEPLKERERVLEGARQALANGSTRYCMGASWKEVRDGEAFEQVLHIVKDVAALGLEVCVTLGMLNEDQAKRLKAAGCTVYNHNIDSSRAFYQTIISTHTFDERLQTIRAVRAAGLEVCCGGIVGMGEKIEDRMHFLHELTMMEPPPESIPINQLVPVSGTPLEGIEPPPPLEFIRMIATARILFPKSRIRL

SEQ ID NO: 87364 - protein, 146 aa, Unknown
  Obtained from environmental sample
  DOMAIN (2)...(129): Semialdehyde dehydrogenase, dimerisation domain
  misc_feature (1)..(146): Xaa is any amino acid
NRLHVIPQIDAFDDNKYTKEEMKVVNETRKIMHLPNSVPISCTAVRVPVLVGHSEAVDIEFEKPIDENTAREILANAYGVKVVDDVANFVYPVPLDAAGTDPVYVGRIRKNIAFENGIALWCVADNLRIGAALNAVRIAERVIEFY

SEQ ID NO: 87365 - protein, 279 aa, Unknown
  Obtained from environmental sample
  DOMAIN (1)...(263): C-5 cytosine-specific DNA methylase
  misc_feature (1)..(279): Xaa is any amino acid
DPFCLVSYETTFGFKPSGDITRIDAKEIPDHDILLAGFPCQPFSIIGDMKGFNDIRGTLFFDIARILFEKRPQAFVLENVKLLVGHNKGKTMRKIMETLKELNYNVSFKVLNAINFGLPQKRERVFIVGFKNNLNFEWPNKNTKMKTLDEILEKKVDKKYYASKEIINKRLAMKDKPNETTIWHENIAGNIGIYPYSCALRAGASYNYLLVNGERRLTEREMLRLQGFPEEFKIVCNYTQTRKQAGNSLPVPVASSVLTNLLSALNNENVYTNCIIDSQ

SEQ ID NO: 87366 - protein, 139 aa, Unknown
  Obtained from environmental sample
  DOMAIN (1)...(138): Phosphoglycerate kinase
  misc_feature (1)..(139): Xaa is any amino acid
IRGSGGIYVTTHSVRTPCPQFTAGVTAYIPAVCGYLIQKEIEFMGGALANPKRPLCAILGGAKVSDKIGVINNLLDLVDTLIIGGGMAYTFFAANGWSVGTSLCETDKISLARQMIDKAAEKGVKFLLPVDTKVGKAYA

SEQ ID NO: 87367 - protein, 77 aa, Unknown
  Obtained from environmental sample
  misc_feature (1)..(77): Xaa is any amino acid
MLMTEWNWDDALAVRYEEGMEKGREEGMEKGREEGMEKGREEIARNALVEGASIEFVQKITGLDMDTIKSLQASNNH

SEQ ID NO: 87368 - protein, 259 aa, Unknown
  Obtained from environmental sample
  misc_feature (1)..(259): Xaa is any amino acid
YPSGKATPAAYRRQLSLDDATAKVSFVSDGVTYTREYFAAFGHDVLVVRLHASKAGKLNFRVGIDRPQVFETTLQGNELLMRGQLNNGTDGKGMKYHTRVKVKLSGSGNVVGKDNRIEVTRAGEAYIFISSTTDYRDPAFESKCQALLQKAVAERYAAIKSAHQKAYKNYFDRVQLHLKPHPDKDTMPTDRRLAAFAADPADNGLVELYFQFGRYLLISSSRPGLLPPNLQGLWVNTVNTPWNGDYHLNINAQMNHWPA

SEQ ID NO: 87369 - protein, 274 aa, Unknown
  Obtained from environmental sample
  DOMAIN (54)...(274): Glycosyl hydrolase family 3 N terminal domain
  misc_feature (1)..(274): Xaa is any amino acid
VIHDYSKIIAIDNPKVKSWLNKLTLNDKLAFLMGSGVSPNAAGLIVPGAAASTTTEYLDEGICNVALGDGPAGVRLQRTSVITKKGAVKAVEPMMEMLRYAGTLVKMMLFAKPNHGKQVYQYATAFPVGTAMAQTWNVPLVEKFGDAIGAEMEEFGVTFWLAPGMNIQRNPLCGRNYEYYSEDPVLTGKMAAAAIMGVQSHDGCYAAIKHFAANNQEQLRNHSDSILSERTLREIYLKGFKIAVREGGAKSVMTSYNLLNGVYTANSYDLCTKL

SEQ ID NO: 87370 - protein, 274 aa, Unknown
  Obtained from environmental sample
  DOMAIN (21)...(130): NlpC/P60 family
  misc_feature (1)..(274): Xaa is any amino acid
KDRAYSEARGSVISAAAKYENTPYRYGGITSRGMDCSGLIYASFKDAVGASLPRSAASLYSWVEKIPFDKAQPGDLLFFKTDSSGKITHVALYLGGRRFIHSASFGARTGVIYTTLDEGSWLRNFAGAGRAFPETSEDYQRTQADGRSGAASAGGRGGSQFGITPEPAVSANDSGARNILFGAAFASTWKGFVKEGGMFRGFTSQFRAGFNTELLNLPMLFGIEFRPEYDGALGVFRLPLTLSWGLSDKLRIFAGPVLSLGEASLSTSDGERRY

SEQ ID NO: 87371 - protein, 52 aa, Unknown
  Obtained from environmental sample
  misc_feature (1)..(52): Xaa is any amino acid
STKLADVIYVLDKGKIIETGSHAELMAHNGLYAEMYNAQAGWYAQDRETQYA

SEQ ID NO: 87372 - protein, 100 aa, Unknown
  Obtained from environmental sample
  misc_feature (1)..(100): Xaa is any amino acid
KALEKSDIVISATASPHITISKNEMSALARLPKIIIDLAVPRDVEPSIKDLSGVTLLTIDDISGDGRRLSQESVATTESIIDEHIAKYNKWLLVKDGKNV

SEQ ID NO: 87373 - protein, 236 aa, Unknown
  Obtained from environmental sample
  misc_feature (1)..(236): Xaa is any amino acid
VAAPVEPEAGGGSIDDLNFSDLINALPGELSVPDIDGTEPPIPADDKVAPSEDDSYFPPDELLSDLPDKLEPVPPTDSLEGDNSGLENLDNLENFNFPEASAEPEGIDSEPALADAPSPEDMSSKEDIGGALDLSVFDDLGDFGDLGLPKEPAAADSGETSDLDDLDAFGDLGLPEEPAAADSGETPDLGDLDAFGDLGLPEEPAVADSGETPDLGDLDAFGDLGLPEEPAAADSG

SEQ ID NO: 87374 - protein, 232 aa, Unknown
  Obtained from environmental sample
  DOMAIN (19)...(232): Carbohydrate kinase
  misc_feature (1)..(232): Xaa is any amino acid
AHALPRAATGAHKGTFGHVIVIGGSEGLTGAAHLAASAALRTGCGLVSVAAPGGLCAEIRAAMPEIMSFPLGRGRSWKNALDEGAVDELPSLATKASALIVGPGMGRSPEAGTLLSALLRLPRRPPMVLDADALTLSAEGKLSLESLHAGDILTPHPGEAGSLLGVDARRIQEDRFAAMRELCALHPALWVLKGAGCLIGRQGEPVLIAPHHVPCLAVGGSGDVLAGCVGSL

SEQ ID NO: 87375 - protein, 98 aa, Unknown
  Obtained from environmental sample
  misc_feature (1)..(98): Xaa is any amino acid
TAKKTTKTLKKPSTPKKSTPKTAKKTAKSPGPAKKAPVKKAVAPKKTVSAPKKTVPVPKKTPVEPKTTEILPVTPQPEASQQPQTQLSHRRPLLIIPK

SEQ ID NO: 87376 - protein, 253 aa, Unknown
  Obtained from environmental sample
  DOMAIN (77)...(156): Fibronectin type III domain
  misc_feature (1)..(253): Xaa is any amino acid
IPVTFNGNYGQNAPNALSARNGTVITIPGQGNLVRDGYNFKGWNTDRSSEEVEYSGNSSYTVKRDVEFYAIWDLAVPQIPASVNVTAVSSNSIAISWPSVSLAAGYNVYRSAESDGDYSYVTGTTSTSYNDDGLLSNSTYCYKISARNDAGESLLSSHICETTGLIPPGVPTITVTLVPPNSVTVSWPPVNSATGYRVYGSVSFSGDYNEIVTTSSVSYTNTGLLSGTTYYYKVSAYNGAGESAPSSDESATT

SEQ ID NO: 87377 - protein, 94 aa, Unknown
  Obtained from environmental sample
  DOMAIN (8)...(94): L-fucose isomerase, first N-terminal domain
  misc_feature (1)..(94): Xaa is any amino acid
MAVNRYKGAYPRIGLRPTIDGRQGPLKVRESLEIQTMNMAKAAKTLLEKNLRYSNGEPVQVVIADTTIGRVAEAAACADKFRREGVDITLTVTP

SEQ ID NO: 87378 - protein, 291 aa, Unknown
  Obtained from environmental sample
  misc_feature (1)..(291): Xaa is any amino acid
QLLNGEYGAWRSIDLHTEGGFDQKGALSEDRMTLLMEMKVRLAEAAKDRICGQFQWLFNSHENPGRTQNGEGLREMDRVGPVNYKGLFTAWGEPVDVFYMYRSNYAPKDKEPMLYIAMHTWADRWTTIGKKDSIMVFSNCDEVELWCDTLMLARQKRDGSGGVGTHFTFSNVNITSNLLRAYGFNNGSKSAVASDVVLLHHLPQAFYTDSLALDVKNIAQPMQDYSYLYRVNCGGSDYTDINGNLWLADVHKTQPDTWGSLSWTDDYEGLPPFYGSQRRTHDLIHGTHDRQ

SEQ ID NO: 87379 - protein, 73 aa, Unknown
  Obtained from environmental sample
  misc_feature (1)..(73): Xaa is any amino acid
SHICFNVPKRHYKHFFNKIKESTIKEWQKNQTEGDSIYILDDSGNKLEIHFSTLKERIKYGKKHFGNNVEWYT

SEQ ID NO: 87380 - protein, 274 aa, Unknown
  Obtained from environmental sample
  DOMAIN (12)...(274): AMP-binding enzyme
  misc_feature (1)..(274): Xaa is any amino acid
AQALIFQNKTLTYSELRKQAEIFAASLRLLPVNPGDRVAVMLPNLPQTVIAFWGTLKAGGVVVMLNPLYMEKEIIHHLGDSGATCLITLDLLWPKIKALRSKLPVRHYIITGIADSLSFPYNWIYRFTAERAANAPKIDFHEETLVPWQTMMSGTRRFCCGGDARPDAPALIQYTGGTTGLPKGVMLSHRNISANARQVLAILQQTEDTPHIFLSILPFFHVYGLTAALICPTALAATALPLPRYVPRDVLAAIKKHRPTLFPGAPSVYISLMQ

SEQ ID NO: 87381 - protein, 234 aa, Unknown
  Obtained from environmental sample
  misc_feature (1)..(234): Xaa is any amino acid
MLINEKTGRYSLSFLNDTKKMKYKQLIYSNSNTSFLDVRVDDVAYRLGSSRVFKTRIDRENKEPVVIYESSFLTVKTSFTPVKTISSPTANGVRITIQLINKSEEVSSVGLRFLIDTYLGEGSKNIPFITENNNIIREKIIESSSNEKYWISRGKDVSLMGSIADPLDETAIRPDYLHFANWKKLSDVPWKAPYHEGRSFNNLPYSIGDSAVSYYWEPVFLKKGGIVTYTVYLT

SEQ ID NO: 87382 - protein, 175 aa, Unknown
  Obtained from environmental sample
  misc_feature (1)..(175): Xaa is any amino acid
NFAGGLPAKVQDIDSFIKAKASFSRLGVSFVYVKPLPGGKIDGVSFKIDNHPAIAISGRGKRFDKVFFALLHECAHVSLGHWLSGTTIREDDHCSGVTVDKERAANELAQHWLFPSGLSAPSRLSQTMLLEIAKNHNVAPEVVLGRLQNENRIPWRTTLARGLSSFSDEQLERLV

SEQ ID NO: 87383 - protein, 163 aa, Unknown
  Obtained from environmental sample
  misc_feature (1)..(163): Xaa is any amino acid
VQRGQIFFSSAEGFLVQGYGNPGDPGYFASYTAHYIEAAPSGSGTLAWASPEYISAPINGTETAIGTGRKNTALILAIDANAPAAKACNDLTAGGKTDWFLPSKDELDMLFENRGYVNNLGNATYYCSSGASTKFFQQINENDDGWRSASKSDTHYVRAIRAF

SEQ ID NO: 87384 - protein, 230 aa, Unknown
  Obtained from environmental sample
  misc_feature (1)..(230): Xaa is any amino acid
FEGSWYSSEWTETFTFHVAGDVCTFTKMDDEGWGERGTFTCTEARFTCVITEVYDGGSWGSPKPNATLIWPRPYRFENGNLIINDNVYVPKATQSGNEPYPHTGGNAPYRILAIGNSYSQDSMRYMRDILIANGADTNDIVIVNAYVGGQSLAGHAANAKSDSPAYERQSFGRRGEITSQYGVILKDIIKSGDWDYITLQQASVSSGKPETYNDDLTYLIGYIKDKCHQP

SEQ ID NO: 87385 - protein, 79 aa, Unknown
  Obtained from environmental sample
  misc_feature (1)..(79): Xaa is any amino acid
ALELRIDGLDMDKVYENFFRQIAGERLDAEIDIKQAIVGDEIRQQLTKRIEALENKAMREKQPRRKWELMEEVKRLNNY

SEQ ID NO: 87386 - protein, 132 aa, Unknown
  Obtained from environmental sample
  misc_feature (1)..(132): Xaa is any amino acid
KKIPTVIVGSFRNESSEHIDTAIITSILETTIFNSGKMDFVAGGAARDALRAERQDQQGNAREGTVAALAKETGADFMLLGTVRTIIDKADNKSVRTYFVNAELTSIETNQRMWMGQNTEIKKVITRPKNKL

SEQ ID NO: 87387 - protein, 179 aa, Unknown
  Obtained from environmental sample
  DOMAIN (4)...(179): Glucose inhibited division protein A
  misc_feature (1)..(179): Xaa is any amino acid
MDYDCIVIGGGHAGIEASLAVSRLGFVTLLITQNPDRIGALSCNPAVGGLSKGNLVREVDALGGEMARLIDATMIQYRVLNRSRGPAVQAPRAQADKQAYMSAARSVLEQQKNLTIFMDTVTDLIVEAGPPAGGYAAGQIAGVITRRGHRITARTVILCAGTFMEGKIFIGEYDAPQGR

SEQ ID NO: 87388 - protein, 127 aa, Unknown
  Obtained from environmental sample
  misc_feature (1)..(127): Xaa is any amino acid
VSSIFKEDVRLFLDEQNVVYTSEFIAKGRTGLEFAFDFQIAHRDREIVIKSFNSLSKLNVPNFLFTWDDVKSVREQISNKKVIGLAFVNDEEKGVEREYIEALKSRHAECILWSDRRNPENIQKLVA

SEQ ID NO: 87389 - protein, 84 aa, Unknown
  Obtained from environmental sample
  misc_feature (1)..(84): Xaa is any amino acid
VDSLKIDKSFVDGICLDKESTAIVQAILSLAKALDISVTAEGIENADQLGLLRELGCHIGQGYYFSVPLPPQDAEKMMEQDPVW

SEQ ID NO: 87390 - protein, 239 aa, Unknown
  Obtained from environmental sample
  misc_feature (1)..(239): Xaa is any amino acid
DNNSGMSLKGCQPKIEVLDCSHNDMENFEGGPEEVGALNCVHNRLTSLKGCPRVKKLTCSSNRLSSLEGAPEGLEDLMCANNQLTSLKGCPSTLDTIICVQNRLTSLEGAPENLKTLDCSFNQLTSLKSCPQGLRVLNCSYNQITSFEGLPKKCLGTLNCSQNQITSFEGLPEKLRELYCFYNQITNFKGVPKHITLDFKYAGNPFDGKAVRPVYSYCSFGELLNEAELDPDADAEKIA

SEQ ID NO: 87391 - protein, 161 aa, Unknown
  Obtained from environmental sample
  DOMAIN (2)...(63): Ribosomal protein L6
  misc_feature (1)..(161): Xaa is any amino acid
APLLTVTGGQTVLSRRLHPSIKVEMAGQTVRVLPAEEKSESGGALWGLSRTLVNNMVVGVSTGFTKVLEMTGVGWRAEADGQSLKLALGFSHPVVFPLPRGISVQVDAKTNRITLKGADREILGETAAKIRALRKPEPYKGKGIRYEGERIIRKVGKAGGK

SEQ ID NO: 87392 - protein, 95 aa, Unknown
  Obtained from environmental sample
  misc_feature (1)..(95): Xaa is any amino acid
ASGAVGAIARGTELIVVGDPRQLPPTSFFATNQADEDNYEKEDLESVLDDCLALPMPQMHLLWHYRSKHESLIAFSNRKYYENKLYTFPSPNDIV

SEQ ID NO: 87393 - protein, 98 aa, Unknown
  Obtained from environmental sample
  misc_feature (1)..(98): Xaa is any amino acid
YKPDISEYCFNGNLRDKETFIDRRNGTEYKSVVIGTQTWMAENLKVNLPYFSKCYDDLESNCDIYGRLYNWTAAGSVCPDGWHLPEAEEWLTLINYVE

SEQ ID NO: 87394 - protein, 109 aa, Unknown
  Obtained from environmental sample
  misc_feature (1)..(109): Xaa is any amino acid
IRKASIDVMVDTGATMLVINEQLFQQLGLGVTGERKITLANDTKEMCKLTEAVEINWEDRSITMPAVVVKDASDFLLGVLPLEGMDLMVDTVNQRLVGAHGDQPLYYAK

SEQ ID NO: 87395 - protein, 64 aa, Unknown
  Obtained from environmental sample
  misc_feature (1)..(64): Xaa is any amino acid
KDIACGSAEVFIKNQATASLYNYTPYLPNAAALAAGRGKGDECSSYGNRSFHVYFNEWFGNPRR

SEQ ID NO: 87396 - protein, 69 aa, Unknown
  Obtained from environmental sample
  misc_feature (1)..(69): Xaa is any amino acid
IMVGTPGRVLDLNHIGQMNLMDIAVLILDEADRMFDLGFYPDLKKIIRRAPSADKRPTMLFIATLSAWG

SEQ ID NO: 87397 - protein, 71 aa, Unknown
  Obtained from environmental sample
  misc_feature (1)..(71): Xaa is any amino acid
VEAVYESVNVATARWVECADAKKFEEFKRKNESQLALDGGDNLAYIATSMVNLRLAQERYPDVQFHQTREH

SEQ ID NO: 87398 - protein, 221 aa, Unknown
  Obtained from environmental sample
  misc_feature (1)..(221): Xaa is any amino acid
LCDDYWHPGHIPVDGVAPLAAQGFQFDIISDAKDFTPNTLSSYPVALLAKCDEVSREDKTSWKTEAVQKAFVSYVDNGGGLLVVHSGTVAGERTETLNRLIGCRFVYHPNSCPVTVQPVKPHPVTEGVGMFCETDEHYRLEILAGDADIIIASYSPPQGGTDKYQEDPYNNTQAWICPAGYVRTQGKGRVCVLTPGHLLPVWLNPQYQRTIANALKWCGSR

SEQ ID NO: 87399 - protein, 179 aa, Unknown
  Obtained from environmental sample
  misc_feature (1)..(179): Xaa is any amino acid
CDSRDGKLYKAVVIGDQKWMAENLNYNANGSKCYSNSEANCTKYGRLYNWATAKSACPKDWHLPSNDEWNTLMKFVEPSCSDNSHCEGAGTKLKAADGWNSSTNGTPKGTDNYGFSALPGGYDYSDGYFSSVGYYGYWWSSSENSANYAYYRDMDYGYEGVYWSIVSKSYSQSVRCLQD

SEQ ID NO: 87400 - protein, 216 aa, Unknown
  Obtained from environmental sample
  DOMAIN (28)...(195): Glycosyl transferases group 1
  misc_feature (1)..(216): Xaa is any amino acid
SQKFIEQYRRLQPHKNLDRLYAIAEPLENFCNELPNFEDKDKTIIFVARMVEKEKRPSLVLKIWELLYEKNPEWNLLFLGDGEDLPILREKAKNLPRVEFLGFQNPEPYYEKASILLQTSAKDFEGFGMTLAEAQKNACIPIAMDSYLSLSDIIENEKNGFIIPNDDINAMAEKIQILINNPALRREIALGGVQSARKFDIKLLANEWEKIFAEIL

SEQ ID NO: 87401 - protein, 126 aa, Unknown
  Obtained from environmental sample
  misc_feature (1)..(126): Xaa is any amino acid
FTDEERRKQILVILQNHCIETWLLGNRKIFVHNPQDEDLKKYISHYNVNENDPEQMGKYPNINTTSQFHVKYLKRLLREKNISYTKHNPSDTAEPHYLEQLIKRVQETSDLKSFKNFLETIKKFLY

SEQ ID NO: 87402 - protein, 75 aa, Unknown
  Obtained from environmental sample
  DOMAIN (14)...(37): 4Fe-4S binding domain
  misc_feature (1)..(75): Xaa is any amino acid
GCLTGALTVSGGLVTIAADRCVGCYTCILLCPFGAVSPSGNGAMQKCELCARTAAGTPACVKGCPNNAIVFEERG

SEQ ID NO: 87403 - protein, 84 aa, Unknown
  Obtained from environmental sample
  misc_feature (1)..(84): Xaa is any amino acid
MQSILQEAYGEENGAAVVIDLRDGGILAMYSSASYDPNAFMDRRNPQKTEYLLDSDGRKRLYNRAIKSAQMPGSTFKLLTALAA

SEQ ID NO: 87404 - protein, 191 aa, Unknown
  Obtained from environmental sample
  DOMAIN (22)...(191): ATPase family associated with various cellular activities (AAA)
  misc_feature (1)..(191): Xaa is any amino acid
SGNSFKDIQARLNESNMRTGFACLFSGSPGTGKSETVCQIARETGRDIVMVDIAETKSMWFGESEKRIKDIFTRYRSLAEEMELTPILLFNEADDVIGKRKDVSSSSVAQTENAIQNIILQEMENLNGILIATTNLTQNMDKAFERRFLYKIEFKKPELSVRQSIWQCMMPSLSGEDAQTVASRFDFSGGQ

SEQ ID NO: 87405 - protein, 134 aa, Unknown
  Obtained from environmental sample
  misc_feature (1)..(134): Xaa is any amino acid
LRIERILHDTNSAVEVIGDVSDIINKINTSIDSIASNVEQQTFASNEIANNAGQASTGTKRTVNAIGEVAHTAEISAQSANKVAEEAQNIFDSIGIIHQDAKESEMDSGELEKTSALLKSTAEELYSTVSKFKT

SEQ ID NO: 87406 - protein, 122 aa, Unknown
  Obtained from environmental sample
  misc_feature (1)..(122): Xaa is any amino acid
YYRSGFENTALRQWRAAADAYGINSGPGMVVGNRIETVTNRRTLLPTADDDVRYIESGRYPGRSENNIYYRQPTSVLPHNDGSTWVVAYGSNEIVRIDANGIIRDRKRGPLNGFDRPYDLVR

SEQ ID NO: 87407 - protein, 158 aa, Unknown
  Obtained from environmental sample
  misc_feature (1)..(158): Xaa is any amino acid
MSRLIHPTAIVSSDAELGDDVKIGPYCIVEGSASIGTGTVLEAFVSVHDRVSVGINCRIYEYSSIGGDPQDHNYKGEESWVRIGNNNIIRENVTINRATGKGGETVVGDHCFIMDGVHLAHNVRLGNNVTIANKVGLSGYVRVDDHTVFGGMAGVHQF

SEQ ID NO: 87408 - protein, 178 aa, Unknown
  Obtained from environmental sample
  misc_feature (1)..(178): Xaa is any amino acid
SHITEIPASAFATYTGNSQNFDKNPDNFNGCKTLTGIIIPYDVEFIEFAAFANCINLKNITIPYGIAEIDIGPAAFAWCESLTDIYIPNSVTNFAAYAFYNCTGLTDINISSRITFIYEGTFEGCSSLNNITIPSSVTEIRNHAFSGCTSLTRVTFDWLISVDKFAESAFGIPNQPTG

SEQ ID NO: 87409 - protein, 149 aa, Unknown
  Obtained from environmental sample
  DOMAIN (1)...(149): D-ala D-ala ligase C-terminus
  misc_feature (1)..(149): Xaa is any amino acid
MAKRVWEAEGLPVVPYRAVSEEAWGRGAKDFLSQCLSLGLPLFVKPANTGSSIGIEKVKEADALSAAIENAFRFDRRVLVEKGLSVREIEVAVLGGDDPMVSVPGEVLVAGEFYDFADKYTDGKSSTQVPADLPLDVVQDIRTMAKRAF

SEQ ID NO: 87410 - protein, 110 aa, Unknown
  Obtained from environmental sample
  misc_feature (1)..(110): Xaa is any amino acid
EFTLVIIIFLAVRIGFLIFFVVKGIIVPKITADSANFNNRGETLKAIRAAKAAIEKDPQNAEAHYLLGKAFLADKRDEQAYREYKSANRLGISGKNIPETAFRETLAALY

SEQ ID NO: 87411 - protein, 96 aa, Unknown
  Obtained from environmental sample
  misc_feature (1)..(96): Xaa is any amino acid
TITWSPQVLGVFEPLTVYTATITLTAKSGYTLQRVAANFFTVAGAASVHNNANSGVVTAVFPATGGVTINIAAIQGITAPAADSTPVTAITETEQF

SEQ ID NO: 87412 - protein, 123 aa, Unknown
  Obtained from environmental sample
  misc_feature (1)..(123): Xaa is any amino acid
FKGIEGLKLTDTIPLELTAQVYNINKGHNSEILKKCKTLDSYSVFIDKIREYQKNGLTLENSFKNAIEYCKENNILKNFLETHSSEVFNMLLTEWNWDDALEVAREEAWEDGHEEGFGEGMEL

SEQ ID NO: 87413 - protein, 245 aa, Unknown
  Obtained from environmental sample
  DOMAIN (1)...(162): Pyruvate phosphate dikinase, PEP/pyruvate binding domain
  misc_feature (1)..(245): Xaa is any amino acid
GSLHHAVFDSWKNPRAGVYRKLHGISDDLGTAVNIQQMVFGNRGDTSATGVAFTRNPSTGAKELYGEFLVNAQGEDVVAGIRTPNPLPELESVLPQAYAEFIATMKKLEDHYGDMQDIEFTIEEGKLYLLQTRNGKRTAAAALKVARDLVEEGVISKDEALMRIEPDQLDQLLHPALDPSHGAVSLTRGLNASPGAAVGRIVFDADEAARCGEAGEAVVLVRWETTPDDIHGVIRRSGCPPLAWW

SEQ ID NO: 87414 - protein, 108 aa, Unknown
  Obtained from environmental sample
  misc_feature (1)..(108): Xaa is any amino acid
MKRVERRPLQAATLVYRILLGIAAALVLVLIVGTIYGFAKRGKSATPVPEAVGGDDIFSGIGRLRIPTSDPEPETLIISIAFPYDKNDRPFSEELAYRLSWFRTATTQ

SEQ ID NO: 87415 - protein, 63 aa, Unknown
  Obtained from environmental sample
  misc_feature (1)..(63): Xaa is any amino acid
MIIRSKAPLRLGLAGGGTDIADYYNLYGGYVLNATVDMYAYCTIEPLETGKIEFIAADFNKKE

SEQ ID NO: 87416 - protein, 140 aa, Unknown
  Obtained from environmental sample
  misc_feature (1)..(140): Xaa is any amino acid
GVLPFEHTPATPEQRKQVKDMARRMHQAEALFQLTPAAECRLENVRLASEKLDAALLDPNSPLDPAQADSGKGQHGKGKRAAKEEHGDLDADFLFTCAKPEKLNSAGRSPVYRVAQDEKDRSPRRHSQGTARRQTDRQKA

SEQ ID NO: 87417 - protein, 39 aa, Unknown
  Obtained from environmental sample
  misc_feature (1)..(39): Xaa is any amino acid
MTQTNILLEAGGNELEIIEFYIEEKLPDASPYCGYYAMN

SEQ ID NO: 87418 - protein, 164 aa, Unknown
  Obtained from environmental sample
  misc_feature (1)..(164): Xaa is any amino acid
VTDIKQQLAYREANKQEVSRFSITRQFGQNTKVLIDDRAGKFIVTSSSRWQSENPDVIDISKITNFRIDIREITEEIKTQDSDGNSVSYSPPRYEYYYDFYVVINVNSPYFSEIEAKLNKNSAGYRGSPEYRDFERQVYDLQEALKVRPGAQGAAAANSPPNTN

SEQ ID NO: 87419 - protein, 113 aa, Unknown
  Obtained from environmental sample
  misc_feature (1)..(113): Xaa is any amino acid
KRRPGQDADALKYIPAEYRTEKIITAPIKKCGCSLRYIDDRQKTEKLCLTAVKRNGFALQYVPYRLRTPVVCLAAVKGTSGDWAIEFVPEHIRTSDFYVEHLEYTDQDSPFGA

SEQ ID NO: 87420 - protein, 209 aa, Unknown
  Obtained from environmental sample
  misc_feature (1)..(209): Xaa is any amino acid
FNGPWDKLDEYLSDQRFIGDDGKVYRIQITLVDSGRYTDYVYEFVKRHSFGVYACKGKDWINTGETYALFSEKTLEKIGMAQAFHINTGKLKDRISGALTSAFWETDKFQPLWYPNFPEDFRDDYFKMFEAEKKVFTKLKDAENITRVQWVQEFGKDNHAFDTYVYNLAALEIAAEYYCKETLFLETLNWRAFWESAKTGVFYDEPDNK

SEQ ID NO: 87421 - protein, 184 aa, Unknown
  Obtained from environmental sample
  misc_feature (1)..(184): Xaa is any amino acid
FFQRSGLEIDPSGVDAILELVENNTDAMQRECSKLLFFLPKDRPARAEDVEQWLSHSREESAFTLFARIASGDSAKAIESLHTLLAAKESPIAVLGGLAWCFRKLRDYLVLSEYGEPDNFELKKIGLSAVSKNNYALASRRYNIRDVEKCLAVTAEYDILARASGPSLEETLMDVYILKIMNPS

SEQ ID NO: 87422 - protein, 370 aa, Unknown
  Obtained from environmental sample
  DOMAIN (5)...(368): Protein of unknown function (DUF342)
  misc_feature (1)..(370): Xaa is any amino acid
AEYYELNHIFVKKPVRKTDHKGKIDYREISPFTIVKKGQVLATLRPLKPGKEGMTVRGTPLPYGNITPEGVSCGNNTRIEGNSIVASIHGQLIIENRTVLNVQDTLVIKGAVGYSTGNIVFPGDVFINGPVSDGFKIFAGGSLSIKQTLDLTRVVTKGDILVTGGIVGKGAALIKSGGSIRTKFIEKCRVAARNSVLVDLEILHSDVFALNTVEMGEKGKIVGGNIYAAHGLRTGSIGKKGSPATHIHCGVDFAAQQEKENCNSQLHIIAAKLRKLREMMEDAVLDEKVLVKIKALLKKLENEQKTVTERLTKVMGNINIDENAFVEVSGGITTGTLIEICQVALFVEEPLKRVRIRLDKEKNKLAAEPL

SEQ ID NO: 87423 - protein, 533 aa, Unknown
  Obtained from environmental sample
  DOMAIN (440)...(529): Fibronectin type III domain
  misc_feature (1)..(533): Xaa is any amino acid
MKKGSIFIFILYTFLYVSGSVHGVGEKTLSLGGEQSWKYASYRFGITEVKSVRPFPVLVLSSVNQPAAVYSSAVGVSGNLLPLKTTSPDLSLSFDEKNAALFHDGAGHYSVTSSSNVEAVERRFARAGTGAALFDADNPAGDPIVIKPKSQDALFSSGSRIKDFTIEFWLYPLNLDNGEHILSWAASELVNKNYSIQRIVCSASRNRLQWSFDNFFMSPKNSLPMKIEFSGDTYLVPKKWSHHLVRFDSVTGMIEYIVDGNSESIVYATATGRENSEVFTPIAGTSGAFILGGRFKGMMDEFKIHGVCAGRSSVQKYATAGGRAETTHIDLGDINSAVLRVEVTGGRTSLKGTKISNEFRENGRFRFSDDSEMSFYIRSGENPWRLNEKKWTAFIPGTNLKETIRGRYVQIAVDFYPSGDGETTPYLDEVRIVYQPNEPPLPPTNFTAVAVDGGVMLRWKKSPDATAAGYLIYYSSVRGELFGSDAALGASPIDAGNVTSILITGLKNGTLYYFRAASYEVTEELGEYNIGEF

SEQ ID NO: 87424 - protein, 468 aa, Unknown
  Obtained from environmental sample
  misc_feature (1)..(468): Xaa is any amino acid
IFKPDPNYLYVIRADKAKKVFGKNCPKHVIISGDIPKGLPEKTDTLIHIPHAYPVEEIIQTLDALFSSYDAWYNSLLMTVINHRPIDVFLNVATRMLANPILVMNNNLSIISTAGSILRPTEGTIWEKVNVPGFVLDNFYTPEEIRKISLHIAQKSEQIISLRPANDPARFTLGINIWIDGKLYGAIGTVDMNEPFTDGQKETFVIAAKVMKLYFQNHSIYMQIAEDKANWLNSLLDGAPVNGVDISPDIISNYLYRFQWKLDDHFCIVTFTASADMKIPIISILDIKQINDIFPDALISVYDEHIVMIIRCADKLQPHGKKKERLEQFLKKDIMLHCGVSMVFNNFMQLRFYYTQSKFAASQFKPSLSPTICLYEDCQAKHVLHALSLGADLRCFCHPGILSLWESGNESQRDLVHCLYHYFLNGRNISATADAIHIHRNTLIYRLDKAEEVLNIDIKQTTPKQAFL

SEQ ID NO: 87425 - protein, 295 aa, Unknown
  Obtained from environmental sample
  DOMAIN (101)...(134): Tetratricopeptide repeat
  misc_feature (1)..(295): Xaa is any amino acid
MSELVTAIVEKNGIETALKLLNDGIKKAPDTLETYLVRGELYMEMGNSEKALNDFKNAIMINPNEPESYFLRGSLYARSGSDIDKAINDFSKTIALNANHAGAYCNRANMYLKKKEPQKVIDDCTKAIELSPNSVEPYYNRGLVYANTGEFATALEDYNRVIALSPIDNHLYVEAFYKRGLLHSQLGNMDDAIRDYEKFLVLDPNNKNAELARNVLNELRSSKISDENTYHSPEFNRAAITMIVGSIIGGVIGGSIGAETESVGGGFVGALVGVFLGLGISPFWASARKDLASMW

SEQ ID NO: 87426 - protein, 474 aa, Unknown
  Obtained from environmental sample
  misc_feature (1)..(474): Xaa is any amino acid
LDRALDLIMASRDESARNLLVTLNGTGSRDVSLSYVIPTPVWKVSYRLDISGKEPFLQGWAIVDNDSDADWKGVELSLVTGRPVSFIQRLYPPYRLSRPVVPLAIAGFAESRTYESGYNFGARAPEAAPMPSAAMRTQSMADTAAKAEMDYYYEKESAAVGSVAGGAMDTASGRAAGDQFEFTLKNPVTLDRRQSAMLPLVEGSIKAEKILIFSGTRALGGATINPAISAELVNNSGMKLPAGPITVYEDGTYAGDALIEFFPENEKRLISYGEDLSVGGSVASSGTRFITAVNISSGVMTITRRQSYEKVYTIKNVSGQAKKIIIEHPITSGSELMEPKEADDRTGSLYRFNRNLPANETFTFTVREETPVFERITLAQLRADTFLSYASNQEIPANVREALTKAIELKKVADDASSAQSRLEIQMTRLTSDQDRIRRNLEAAGNQTPQGQEYLRRMAALDDEIDDLKKQIDA

SEQ ID NO: 87427 - protein, 103 aa, Unknown
  Obtained from environmental sample
  misc_feature (1)..(103): Xaa is any amino acid
ADIGPHTEQTVKAIIASRKVEQQGYKTCIALLKLADSYSPGRLETACEKALSYSRCPSFRSIRTILKTASKQQAPSRQRPDESVQKFAFTRGNAYYGGKKDGE

SEQ ID NO: 87428 - protein, 148 aa, Unknown
  Obtained from environmental sample
  misc_feature (1)..(148): Xaa is any amino acid
LKSLRYQSKTYAKLQTLMNRVNEESLKAEHLKQACRKASGVDGVTKDEYGKNLEANIAELMKRMRGFQYKPQPVRRTYIPKINGSMRPLGIPSYEDKLVQGVMAGMLTEVYEERFCDCSYGYRPGRSAHDAIRYVDTVLGTKKVKYVV

SEQ ID NO: 87429 - protein, 263 aa, Unknown
  Obtained from environmental sample
  DOMAIN (30)...(200): Radical SAM superfamily
  misc_feature (1)..(263): Xaa is any amino acid
MQNEIIIKGYHYNQKIYDEYSNDGIFYLALNFTSHCNYRCPYCFVGHHELNKIDSDLSLEKVKMLLDEAKCLGAKTLVIPGQGEPFLDKKFWNILEYASISGYWIVIYTNGYYLDNETIKRIKQLPVSLFLKTDSLNRAIYEEMVGVKDTYSKFRQNLDMLITDFHEPENIDARIVSRLAINSVVTKISAYSIEELYNFCRKHQIYYTCRSPVKVGEANKTWDYLTGSDVERFQSIGKKFASRNFTSATPSGTCGIYRFGLTI

SEQ ID NO: 87430 - protein, 553 aa, Unknown
  Obtained from environmental sample
  DOMAIN (292)...(357): His Kinase A (phosphoacceptor) domain
  misc_feature (1)..(553): Xaa is any amino acid
MRLRLETAVDSELALVLKMADTPVIRQYFINPSDPVLKSHADAEIATYKEHFKNKILYWINDVDKLFYTTRSDPYFVNPDEPKNYWYNLTLYETENYIFNINYNPDLDQIYLWVNVPVFAEAQTREKPVGLVGTGINLTDFSNFVTSGYQKFDENITTYMFNKYNEITSAADYELVQNKVRLDEHLGVTGKELIKVAQELSGDESRSFIYDKKIYLINSLQSMEWYLTVSYPAPGLLSLNNAMNTVFFSMLFLILFLFIIINVYIARSENAIAKQNLQLIEANKKTESASRAKSDFLAKMSHEIRTPMNAITGMAELLLRGELSCEARGYAQDIKQAGNNLVSLINDILDLSKIEAGKLEIVPVKYMLSSLINDTVNIIRTRFKEKPIRFFTNIDGNIPNSLIGDEVRMRQILLNLLSNAVKYTEKGHVGLTITADKLDDKQVLLRMDVADTGKGIKPEHQANLFDEFVRVDIKKNQGIEGTGLGLPITRRLCAAMDGKLIMESEYGKGSVFTVIVPQGVESKEPFAAVDEPERKKVLVYESRVIYAKSAAWS

SEQ ID NO: 87431 - protein, 61 aa, Unknown
  Obtained from environmental sample
  misc_feature (1)..(61): Xaa is any amino acid
MLRGAESVIKRDRPLLAVCIYHNALDMYSIPLFVKELCKDYKIKIRHHSYGLGETLLYAYA

SEQ ID NO: 87432 - protein, 83 aa, Unknown
  Obtained from environmental sample
  misc_feature (1)..(83): Xaa is any amino acid
MEQRMEIKRAAEFGDNIREKLGEVYVNAFYDDVLRYFSKNKTKLIKLFACGFLLESFYVAIIDNEITGMAACMSKGEVCIKLD

SEQ ID NO: 87433 - protein, 227 aa, Unknown
  Obtained from environmental sample
  misc_feature (1)..(227): Xaa is any amino acid
LYGTTLFFNKDNFAYKDGDTKNVFSKIYTDNFWLSKESRSGGGSLISTTKTVREKLPAIWEQYGVKTFLDVPCGDYNWMKEVEKKNITYIGGDIVDKLIEQNNEKYSSENVSFKVIDITKDEIPTVDMILCKDCLQHLSYEKIFKALRNFKSSKSKYLLTTSYSATIYNWDILDGDCRPLNLRKKPFCLPEPIMKIREKSRGVQVDSDKDLYLYRIDDFDFDVICGV

SEQ ID NO: 87434 - protein, 148 aa, Unknown
  Obtained from environmental sample
  misc_feature (1)..(148): Xaa is any amino acid
VSPDDRLNMLRLALTGLDWCGVWDGELRRSGYSYTVDTLRELSELHGGVKFYFIIGTDNLSEIVKWRSYKEIISQVTLCVAFRPGYEFARPESLASADIQEFPGPMWGSSSTMLRDYLSKGHSCKFMIPDAVLGYIRNRGLYGYAHRL

SEQ ID NO: 87435 - protein, 138 aa, Unknown
  Obtained from environmental sample
  DOMAIN (13)...(138): Binding-protein-dependent transport system inner membrane component
  misc_feature (1)..(138): Xaa is any amino acid
MGRDLFSRLLYGGRVTLVSALGVVILSVIIGAPLGLFSGFYGGKFDSVVCRCCDVLLSFPSLLLAFLFVTALGRGIISAVVALGIVYVPMITRLIRSLTLVEKNKTYVEAAESIGFSRPYILFRRYFAQLRLYHTGTA

SEQ ID NO: 87436 - protein, 185 aa, Unknown
  Obtained from environmental sample
  DOMAIN (1)...(185): Amidohydrolase
  misc_feature (1)..(185): Xaa is any amino acid
VSPNAKGAEKEIERCYAAGLRGIGELYPDGQGFNIDNEKETRALTGACIERNIPLILHVNEPVGHDYIGKNDIPLKKIEKFVNNSQNLKIILAHFGGGIFFYETMKEIKEKFRNVYYDTAAAPFLYDSRIYSAVKALGLCEKIIFGSDFPLLPPSRYLPALEKSGLSPEEIQLILGANAEKLLKC

SEQ ID NO: 87437 - protein, 198 aa, Unknown
  Obtained from environmental sample
  misc_feature (1)..(198): Xaa is any amino acid
MLLNFLFLPQSAQCEVFEYKHNTGDLYRILSVVKEDVYINRILSHRAEILNRIAVEVTDVKNGKGQHKAVFQTSERIIYDSASREVQQGVAGLEWTREYESVFERDKLGYLTIDSKYYMPVVRNVPVFPERDLRVLERWSAEGYEIHDFRDSFGIEEPYRIPFKANYQFIGEHPWKEKIYPAFSVDYHVETRPPSVRG

SEQ ID NO: 87438 - protein, 219 aa, Unknown
  Obtained from environmental sample
  DOMAIN (12)...(152): RNA pseudouridylate synthase
  misc_feature (1)..(219): Xaa is any amino acid
LKRLDVVYEDNSCIVINKPAGLAVQGGKGIGISLDSILSQTWPQRPLLVHRLDKDTSGLVLVAKTKTAAAEFSRLLRGEGAAGKAVIKRYRAVCKGKPAQPEGVIKADLAIHGTVKKSETSYRLLSGTEEFSLLELELGTGRMHQIRRHLALLGNPVLGDDKYGDFDLNHKLRKTMKLHHLLLHASSLIIPQTPDGVRLELTAPLPDYFQPFIVHETND

SEQ ID NO: 87439 - protein, 524 aa, Unknown
  Obtained from environmental sample
  DOMAIN (466)...(524): Anticodon binding domain
  misc_feature (1)..(524): Xaa is any amino acid
VVKLFPGTKVAIGPSIENGFYYDFLLPRPITADDLETIETEMKRIIDSRQDFVKVTVSREEALARFAGGEFKIELINELPVDAEITIYENRDADGKALWADLCRGPHVANTREINSAAFKLQSIAGAYWRGDENRPMLSRIYGTAWETPKDLKAYLAFLEEVEKRDHRRLGKDLDLFSVHEEAGAGLIYWHPNGGRMRVAIEDFWRQEHYRNGYEILYTPHIGKSWLWETSGHLGFYKSNMYSPMQIDNQDYIIKPMNCPFHILIYKNKGRSYRDLPLRWAELGTVYRYERSGVLHGLLRVRGFTQDDAHIFCTPEQMEDEIREVLRFSLWIWKQFGFKEIKAYLATKPAESVGEQSRWDAALESLRRAIDAEGLGYEIDEGGGAFYGPKIDLKIKDALGREWQMTTIQFDFNEPERFDMTFVDADGKQKRPYMIHRALLGSLERFFGVLIEHFGGAFPVWIAPEQIAVIPVSESYNEYAKKICAELKDVNLRVTSELGDARLNAKIRDCQNRRIPYMLIVGER

SEQ ID NO: 87440 - protein, 849 aa, Unknown
  Obtained from environmental sample
  DOMAIN (793)...(849): Bacterial regulatory proteins, luxR family
  misc_feature (1)..(849): Xaa is any amino acid
VSQKESYTGNIEAVLQARQNGETSFYFERSRLNNLFMEAVKYPLVVICAGAGYGKTSAVHDFLEKYEATTAWVQLTELDNERAHFWETAVHAIGQINQALAKATNKFGFPDTKEKLKHYTAIIQNHIEMKRRIIVFDDFHWIDDPLIIRFMEECILFKMPPGTSVFLVTRTAPRVNLAGMIYRDQIFDISESDLRFTESELAQYFHRRNNYIQSESLREIMRDTGGWAFAINLIARSYQKAPGYGGYLQSAMKTNIFQLIETEIWDEISERLQSFLVRLSLIDHLSVDLISLLAEEDETLIAELERQNALVRRDSYVNAYLIHPLFLEFLRKRHGLLSEDQRKKTYAIAGGWCSKNGFRIDALSYFEKIKDYKSIIYILFGLPAQIPDEISRYAASIFDRAPAEDFDKVEFLAVMHLRTYMCQGDWQKSQELVRYYEKKFLELPEDNIVARRTLARLYVCWGYIRALVCLTEDVYDFDFYTGKACKIISSTIDPGKLGPHCPGAWINSVGVSRKGALEDYIAALERNQVIVSPSYISGFMAGEAELAHGELEFYRGDATAAIPYVTLALKKSRDKKQPGLIHRSLYCALRIVASQGNFAQVEQIMKETKNILNDTEYLSRFVDYDISLSWYYCFLGMPEKTVDWVKEDFSFFTHPGFIENFKNQIKARYYYITRKYTPLLIHIDEMKRRESFLFERIEMLAMEACIQYKIKNKRKAFSIFFEAYENALPNGILMPFIELGKDMRTLTAVALRHTDNKIPKPWLEDVNRRAASYAKRRTHVIAEYKKAYGITDGIVFSPREAEVLADLSHGLSRVEIATNRNISVNTVKMVINMLYTKVGAENLADLIRM

SEQ ID NO: 87441 - protein, 360 aa, Unknown
  Obtained from environmental sample
  misc_feature (1)..(360): Xaa is any amino acid
VESLGNKLKEAREAKGLTFDYISRDTNITSKYLEALEREDYTPFPGEPYVLGFIRNYGEYLGLDPDELMSLYRSIKLREQPVPVEQLLKKSSSLPKILKGFAICLAVLALVGGAGYYIYRLPKKPNVPQQTVRTATEYVLNNDSFERRMYPGDSILVVEGSNSYKLVFSSLSDAITITTPGGPVMLDLGQEVTVDLNTDGFGELRILAADFVKNDNLAGALLRFEQEVLPQMAASPEFPIETISSGSETPLVLLNTTSAFPFTLQAVFQGYCLFRHEILFERDKPGRNEQFYQRSDELNITAMNGIRLGISNAQAVKMQVIGAGRTVPFEAGGAGEVVAADLRWVRDDENRYRLLLLRLE

SEQ ID NO: 87442 - protein, 563 aa, Unknown
  Obtained from environmental sample
  DOMAIN (406)...(563): Domain of unknown function (DUF323)
  misc_feature (1)..(563): Xaa is any amino acid
IDTDVFPKNSGTVKLSPNKDTYSDERVTVTAEPKPDYAFDGWSGADTSKAERIEIFVDESKTLVAMFKPVVRTLTATANPADGGAVYINSAAVLGNESQEVESEVKVLAKEAEGYVFSRWSGTAVTFGNERSPSTTVKLSADAVITAHFERGNGATVAPQAVICTLTVNNNIEEGGSVSLIPEGKIYNVGTKVTATATPNENYTFTGWAGASTSKDTVVSVFMGESKTLTAMFERQGGASDSAKYLVTVSGGTGSGNYAQGATVSISAGTPPSGQKFKNWTTSSSGVTFANANSAATTFTMPGNDVTVAVIFEAVSTPTPTYAVTVSGGTGATGGGNYTQGATVSISAGTPPSGQTFKNWTTSNSGVTFANANSAATTFTMPGNAVTVTANFEAQTVTPGTVFDPKDTAMVFVAGGTFEMGCTSEQGSDCYSDERPSHSVTLGSYYIGKYEVTQRLWKAVMGSLPSSISSSYGMGDEYPVYYVSWNDIQTFIQTLNSKTGKTYRLPTEAEWENAARGGNESGGIQYSGGNTIGDVAWYSSNSGSKTHEVGTKSPNELGIYDMS

SEQ ID NO: 87443 - protein, 85 aa, Unknown
  Obtained from environmental sample
  misc_feature (1)..(85): Xaa is any amino acid
MSGGTVKAKGTGTLKSYMPPWFNGDGPDGDVVISTRIRLARNLSGHRFPAHASIAEKEEIFDKAAASFRGSSRRKTAYEFEVINV

SEQ ID NO: 87444 - protein, 310 aa, Unknown
  Obtained from environmental sample
  misc_feature (1)..(310): Xaa is any amino acid
MENGYFKRIIDSTLVDWSLEKGRKPLLLRGARQTGKTAAVRELGRRFKHYVEINFDNDAGAAHYFQDNLEPEELCKRLSVYVRTPITPGETLLFFDEIQSCTEAIKSLRYFYEKFPQQHVIAAGSLLEFALGEIPSFGVGRLHSVFMYPFSFYEFLDALGEEMLSAACREAAPDKPLPPPVHKQLLDRLKIFLLIGGMPEAVASYAQSRDILQSQVIIEDIITTFRDDFSKYRTKMPALILNEVFESVMHQAQGKFIYEHAAIETANARIKQALDLLIMAGLAIPVTHSAANGIPLGAQTNPKYRRLFHA

SEQ ID NO: 87445 - protein, 109 aa, Unknown
  Obtained from environmental sample
  misc_feature (1)..(109): Xaa is any amino acid
IDGLFEPQPSPDILLNEGDAIGPFTVLHLPGHTPGSIALWDEKAGVLFTGDTLFCGGYGRTDLPGGNGKLLHASLTRLFGMNGDIQVYPGHDGITTIKNEELGMRNEEY

SEQ ID NO: 87446 - protein, 78 aa, Unknown
  Obtained from environmental sample
  misc_feature (1)..(78): Xaa is any amino acid
MQKMYKYPWLIIAVVAVITVFFGFQLPKAELDNNNLRFVPFDDPALKTSRWIDGMFGSSFFILIGLERQYDTVFEPEF

SEQ ID NO: 87447 - protein, 146 aa, Unknown
  Obtained from environmental sample
  DOMAIN (27)...(144): TruB family pseudouridylate synthase (N terminal domain)
  misc_feature (1)..(146): Xaa is any amino acid
MNPHPDGLILFNKSPDLTSFDALRDIKRALGTGKVGHTGTLDKFAEGLLLVLTGRALKLSQWFTHCDKQYEGAICFGAETDTLDPEGAVIANAPVPSREDVEKAIPRFWGAIEQAPPAYSAIHIDGERASALARRGETPEMCKRPV

SEQ ID NO: 87448 - protein, 280 aa, Unknown
  Obtained from environmental sample
  DOMAIN (70)...(275): Binding-protein-dependent transport system inner membrane component
  misc_feature (1)..(280): Xaa is any amino acid
MGDIKKTNPILLVLIYILMVVFAVLAIYPIFWVVIQSFKTTQEYMTTSKLAFPQRWFARNYPISWENAQFGILIINSIFYTSITVVLEIALSFMAGFAFAKLPNKITPIIHGSFIVGILLTLQSILVPLYLMIHAVGLYNTRWGVIIPYVGIGLPMGVYLSTEYIKSIPQSVIESARIDGAKYLLIFWKIIMPIAAPVAVTMAILGVTGTWNEFMLINILVSKTELKSLPVGINQFSGARASDFGKQFSALTIGMTPMIIFYMIFRKQITKGVVAGAIKG

SEQ ID NO: 87449 - protein, 818 aa, Unknown
  Obtained from environmental sample
  DOMAIN (1)...(64): Putative carbohydrate binding domain
  misc_feature (1)..(818): Xaa is any amino acid
MQYGYFDDDAREYVITRPDTPYPWINYLGSEDFYGLFSNTSGGYCFYRDARLLRLLRYRYNNVPTDSGGRYFYIRDSGDIWTPSWMPMKSALDHYECRHGMGYSRISSARNGLAFSQTSFVPLKDNCEIHKIVLTNESGADKDVDVFSFIEFCLWNANDDMTNFQRNFSIGEVEVEAGGARIYHKTEYRERRNHYALWAVNVPVAGFDTDRQTFLGLYNGFDHPETVFAGKANNSVASGWAPIGSHHIKAHLKPGESKALVFVLGYCENPDDQKWKKPGVINKAPANALLEKYGSPEVADKALAALKEYWDALLGRFSVEAEDKRMARMAGVWNQYQCMVTFNMSRSASYFESGIGRGMGFRDSNQDLLGFVHLVPGRARARILDIAATQFPDGSAYHQYQPLTKRGNNEIGSGFNDDPLWLICGAAAYIKETGDYSILNEKVPFDNNDELADTLFIHLKRSFYYTVTHTGPHGLPLIGRADWNDCLNLNCFSKTPGESFQTTANYESGVAESVLIAAIFVFVGPDFVEICKRTGRTEEAQRAEKAIADMIEAIKTHGWDGKWFLRAYDAYGKKIGSRECEDGKIFIESNGFAVMADIGIKDGRAQKALDSVKEQLDTKYGIVLLQPAYKDYHLELGEVSSYPPGYKENAGIFCHNNPWITIAETRLGRGTRAFETYTKICPAYREEDSDLRKMEPYVYAQMVAGKDAVNHGEAKNSWLTGTAAWTFVSISQYILGIRPVFDGLLIDPCIPSDMKGFTVTRHFRNADYHITVNNSAGVEKGVKSITIDGKPMEGEWLKNAVIPTFNDEKVHNIDVVMG

SEQ ID NO: 87450 - protein, 543 aa, Unknown
  Obtained from environmental sample
  DOMAIN (266)...(455): Adenylate and Guanylate cyclase catalytic domain
  misc_feature (1)..(543): Xaa is any amino acid
MFTNPGETRDKFWGQQAGADIYIEKTSENFEYLSRQIRQLLDESRPVDYERIKKEGEKITDNSIVEMVNNLFDNKLFQATLTSLLAELSSKVSSLEETVKGVFALLKNACRSEMCSIMIKDADDALVVYNANNAGYTEAIAEDFKAITIADFNTRFSDYKVDSKEVHDFFPAGEKNERIESYILIPLTSSGEEFATVHIGTSVKEYFSPLILENINVFLSAASPIIANALHLKQMETLQKKTRAAFARYVPIDVMDEIIKKSSSPSSQSESRVVTILFSDIRSFTKISENTPARELVDFLNTYFSVMGDQIIAEGGNIDKFIGDAIMAIFGAPKTLENSAASGVRAAIRMVKALPQVDTSSITLPEGGFGAGIGLNCGECVVGNIGFQNKMDYTVIGDTVNLASRLEGITKYYHQTIIVSEYIYNAAKDDFIFRKADSVRVKGKDQPVGLYTVYAAFRGEEAEGVPPVLVIDREALDQYNKGLKLYGMREFETAKQYFTMALSIEEKAGKSDYLASLYLSRIEEFLVTPPPPNWDATITMTEK

SEQ ID NO: 87451 - protein, 59 aa, Unknown
  Obtained from environmental sample
  misc_feature (1)..(59): Xaa is any amino acid
MGNAVVRNNLLVSYCSKLMNYRGFGSGITRVLKNQSNVEFINDVDGEQFKVVIQRPEKK

SEQ ID NO: 87452 - protein, 236 aa, Unknown
  Obtained from environmental sample
  misc_feature (1)..(236): Xaa is any amino acid
MNETCAVCKKGKGPEKCEVCGFSDNGFIDRQFLIPEDTKSWIETVVKPYHVQWEARKREAELQVQLEESRKKIAQLEATKLEKNVENREEKVIVDYDQIMSEAMEQKYLEYYGRKPRSFEPTNHFTDPRDCKIYRIVKIGNQVWMAENLNYEVKCIFGIFTSKGSKCYNDDPKNAEIYGRLYNWKAAMRASPPGWHLPSTDEWQTLYDFVGGGFFVENKLKAKYGWDKDNNGTDAF

SEQ ID NO: 87453 - protein, 94 aa, Unknown
  Obtained from environmental sample
  DOMAIN (3)...(83): Ribosomal protein S19
  misc_feature (1)..(94): Xaa is any amino acid
MARSVKKGPFVDGHLVKKVDDSNKTGQKKVIKTWSRRSVILPEFVGQTFSVHNGNKFLPVYVTENMVGHRLGEFAPTRNFRGHSGAKTDKSAKR

SEQ ID NO: 87454 - protein, 68 aa, Unknown
  Obtained from environmental sample
  DOMAIN (4)...(61): Ribosomal L29 protein
  misc_feature (1)..(68): Xaa is any amino acid
MITVKEIRELSPEEIVKKVDSLEEEFFNLRFQAKMGQLTNPLQLRYIKRDIARAKTILNEKNRTAAKA

SEQ ID NO: 87455 - protein, 308 aa, Unknown
  Obtained from environmental sample
  DOMAIN (62)...(305): Methyl-accepting chemotaxis protein (MCP) signaling domain
  misc_feature (1)..(308): Xaa is any amino acid
RPPPDPYGRWYSSSRFSIVLSLALGLYIASIIVKQLRELFATVGESVDGVSSGSTELSATAEEMATTTGEIAHSAETQRDSSEHMAAAMTELSASIDEVSRDSQNSLVQMDAALDATLQGNNAGLSTKEAMNGITQTTTKIAAAIGVIQEIANQTNLLSLNAAIEAAKAGEQGKGFAVVAEEVRKLAERSGASAKEIAQHNIDARNAVERGEEMVGPTVEILGQIKENLDQFAVRTKTAVDATMEQSKAGTEVAKQVDQSVHEATSIASAATELSSTTTQVASTADELSKLASELKGKVAMVRVDLGV

SEQ ID NO: 87456 - protein, 444 aa, Unknown
  Obtained from environmental sample
  DOMAIN (1)...(387): Alpha-L-fucosidase
  misc_feature (1)..(444): Xaa is any amino acid
NYVRPEDPQILRRLEWFQDQKLALMMHWGIYSQIGIVESWAMSDGDSDWSRHGVDWDVDSQSFKRQYRDLYKSFNPIRFEPNKWAKAAADGGFRYLIFTTKHHDGFCMWDTKLTDYKITNRGCPFSINKRADIVSNVFEAFRRQGLGIAAYFSKADWNVPFYWAEGQFKGEFTSRGPSYLPAEQPELWEKFVNFTHGQVMELVTGYGRLDVLWFDAGWVNRQNGQDIRIEELVEKARKVQPWLLSADRTCGGICENYVTPEQSVPGKPLAVPWESCVSMGDGFAYSYDDNYKSTKRLLRLLIEIVAKGGNLALNVAPQPDGRLPKPALCRMAEMGAWLTKYGEAIYGTRVCAPYTSDEFAFTQKAGEGKVFAFYLSDKGFTPELTIPYDRKHVVAVKNMTTGEKILFKMKNDCVAITIDAPAHSEAYGGEFVAEVFELTVETKE

SEQ ID NO: 87457 - protein, 306 aa, Unknown
  Obtained from environmental sample
  misc_feature (1)..(306): Xaa is any amino acid
AGGADTAGKALKAQNGWNKNGNKNGNGNDKFGFAALPSGFNSSLYKDAGKIGTIGSWWTSDGILSPQMEAVVWSSAFRQNVMGAGGSVTSIAKTIGYDRDDFDQGKAPRRDYRSIRCLQNDEKYEAAKKAEEEAMKAKEEAKKKVETEVVEKSEAYVKANGGTFTDTRDKKTYKTIKINGQVWLAENLNYAAENTKCYDDKPENCTKYGRLYNWETAMKSCPAGWHLPKNAEWDKLYRTADGTSGTESPYKSNTAGKFLKAANGWNNNGTDKFGFSALPGGYNSKGSFSDVGGSGFGGSGNWWTAS

SEQ ID NO: 87458 - protein, 437 aa, Unknown
  Obtained from environmental sample
  DOMAIN (181)...(368): ATPase family associated with various cellular activities (AAA)
  misc_feature (1)..(437): Xaa is any amino acid
MFPAGDLIRLSDKDRYCMVTFNRWATDPKFIKGDISIILLTENLADISSRLSGSPSTVKISVPFPDLKVRESFLRSKEKKGKLLLERGLTPEKLAAITSGINLMNLNRLTAESFEENKPLSFDFMRRRKKEIIENEAVGLLEFMETSFNLSHVSGHDFVKKRFKNAAKAIKMGRHDVLPMGYLIAGPVGTGKSFMVNAFAGEIGIPMVKFRNFRTKWQGETESNLEKVLNILVAMAPVGVMIDEADAFLGDRDQEGDSGTSNRVFAQIASFMGNTEYRGKIIWFLITCRPDLIPIDLKRQGRAEEHLALFYPETDKDREDLFKTLVRKLDLDIRNFSVSDLFKKYNHEYSGADLEAVLVRAKLLAAMDERVFVKREDMEEAMSDFVPAAYPHEVELQNLVAVLECTSREMIPKKFQKLPRSKIISEIQELKVLCRER

SEQ ID NO: 87459 - protein, 72 aa, Unknown
  Obtained from environmental sample
  misc_feature (1)..(72): Xaa is any amino acid
LWKSIKPASLFIPLDVHVARTARKLGLLERKSNDKKAVIELTERLKTYCAEDPVKYDFALFGMGVGASKKNK

SEQ ID NO: 87460 - protein, 263 aa, Unknown
  Obtained from environmental sample
  DOMAIN (5)...(192): PHP domain
  misc_feature (1)..(263): Xaa is any amino acid
MSFLYETHLHTVFSSACANSKGSEYIRLYKELGYSGIVVTDHFYRGNTAVPRGLPWKEWVKQFCKGYEESRNEGERQGFDVFFGWEETFEGCDDYLVYGLDKEWLLEHPEVRNWTRGQQFSAVTAAGGCVVQAHPFRQHTYIPRVVLSTGCVDAVEAANATNSGQSYDALAMRYAQKLRLPYTAGSDIHDARQVTVDGVFGVYVKKKVSSILDFANEIRTNNLAGIKISEGRCDYFGDEKVDLPVVVRDKYDRITGKSWKDFI

SEQ ID NO: 87461 - protein, 447 aa, Unknown
  Obtained from environmental sample
  DOMAIN (183)...(412): Methyl-accepting chemotaxis protein (MCP) signaling domain
  misc_feature (1)..(447): Xaa is any amino acid
MKIEIVSFQIGNSNSTWSVMLGSTESYILQDVSNITKFTIILAIAAIIIAVVIVYLALNSTTKPIVKVADTLKDISEGEGDLTRSIAVSSKDEIGDLALYFNKTVDKIKNMVVTIKKEAVDLQNIGSDLSSNMTETASAINEITANIRSIKGRVINQSASVTQTNATMEQVIANINKLNGHVENQADTISKRSAFIQAMVNNIDSVNETLQKNLENVHNLKEASEIGRSGLQEVAADIQEISRESEGLMEINGVMENIASQTNLLSMNAAIEAAHAGESGKGFAVVADEIRKLAESSSVQSKTISNVLKKIKGSIDKITHSTENVLNRFEAIDTGINTVAEQEENIRQAMEEQGEGSKQLLKGTSNLTNITEKVRDGSAEMLEGSKEVIQESKALEQATQEITGGMNEMASGADQINVAVNTVNEISVRNRQGIESLTREVSKFKVN

SEQ ID NO: 87462 - protein, 520 aa, Unknown
  Obtained from environmental sample
  DOMAIN (3)...(238): HMGL-like
  misc_feature (1)..(520): Xaa is any amino acid
GFFALEAWGGATFDSCIRFLNEDPWERLKKLKSAMPNSKIMMLLRGQNLLGYRHYADDVVAKFVEYAAKDGVDVFRIFDAVNDPRNFEAATKAAKKTGKHIQATISYAVTPFHTIEKYAEFAKQLVNIGADSICIKDMAGLLKPYEGYDLVKAIKKVTDIPIEIHTHATTGMSVATLTKCAEAGAEILDTTISSMSMGTSHSPTETMVEIFRGTEYDTGLDINLLLEIAAYFRDIRKNYKKFESSFLGADTRILASQVPGGMLSNLESQLKEQDASDKIDEVLKEIAVVQKDAGFPPLVTPTSQIVGTQAVFNVLFGRYNKLSGEFQDLIAGKYGACPTQKNPDVVKKALEALKMEKEVTNRPADDIPPEYSKLEEETKKLLGTSTVTPEDVLTYAMFPKVAPDFFKKRANGPVVFKAEAECCSAAPAGQGQAARYSVNVNGANYDVVVAPAGTVAVAPTAGAPTAAVAAPIASGGVGSVTVIAPVTGIVLRYAVPEGTEVKSGQTIIILESMKMELEIK

SEQ ID NO: 87463 - protein, 374 aa, Unknown
  Obtained from environmental sample
  DOMAIN (21)...(191): Type III restriction enzyme, res subunit
  misc_feature (1)..(374): Xaa is any amino acid
MTFKDLNIIEPVLKALINKKYETPTPIQAQAIPVALSGRDLLGIAQTGTGKTAAFAIPIIQNLYQPSRQEHKREIKALILTPTRELAIQIEECFRDYAKYTGLRHTVIFGGVNQRPQIEKLKRGVDILIATPGRLLDLINQKFITLDHIRHFVLDEADRMLDMGFIHDIRRILPMLPKRRQTLLFSATMPADIVNLSKSMLYKPERIEVTPASSVVDTIEQSLYFVEKPQKNDLLFLILRDRPNKPTLVFSRTKHGADKIAKVLNRRGIGCEAIHGNKSQGARQSALSNLKSGKTSVIIATDIAARGIDIVNLDTVINYDLPDVAETYVHRIGRTGRAGNSGTALTFCSQDEHVMVRDIQKLTGRILNVVSLTA

SEQ ID NO: 87464 - protein, 159 aa, Unknown
  Obtained from environmental sample
  misc_feature (1)..(159): Xaa is any amino acid
VRKDGTSITYIEPEYPAYADFYVTLALIAACERLGFRYGLGLAHTVGSFYIGQGRPLNEDGSGYWPSFANNILPDLAAAKVTNIEMECSAQFVIGRLHGMRMGAVLSVISNRVLDRWGDNGGEDKASLAASEAVCILAEWDKSGKISLNMKMKGAGSKR

SEQ ID NO: 87465 - protein, 132 aa, Unknown
  Obtained from environmental sample
  DOMAIN (32)...(131): ABC transporter
  misc_feature (1)..(132): Xaa is any amino acid
VNGQELLRLENITKSFGAVEVLRGLDLSVGRGEFITLLGPSGCGKTTILRIIAGLETADAGRVFMDGVDVTALGPDKRGVNMVFQNYALFPHMNVEQNVGYSLKLQGMPKAGMRAAVAETLALVRLEGLKNA

SEQ ID NO: 87466 - protein, 500 aa, Unknown
  Obtained from environmental sample
  DOMAIN (13)...(77): Heavy-metal-associated domain
  misc_feature (1)..(500): Xaa is any amino acid
METIENQNLQKLSFRVGGMYCKNCQNIIEKELKKTAGVQKASVNYRSGRAAVTFDAEVIGFNKIREVIESLGYQALEENGKNQALQSKTIPQIAGTLVIILALFMLMRTFTTSNLAAAFPLAREGMSYAMLIVIGLLTSVHCAAMCGGINLSQTLKTSEEGNELAMSNEQLVIREKGIYSLLIPGVLYNGGRLVSYTAVGVLVGALGSAITLSGRFQGIIQLIAGVFMVIMGINMLGLFPFLRRIIPSAPKIFSKNIDEQKIGRGPLVVGFLNGFMPCGPLQAMQVFALSTGSPVKGGISMFLFCVGTIPLMFALGAVSGLLSGAKGRVFSRRVMQTGAVLVTALGLVMFSYGWNLSGLTVSPDKTASAKPAGAPEKSNQDRQQKQGVELTPNPGSQDAGKFEPVIENGVQIVNSTLRSNRYPAITVQQGIPVRWTINAPPGSITGCNYSIILYDYGIQYDFKPGENIIEFTPEKTGKFLYSCWMGMIRSVITVVAEKEG

SEQ ID NO: 87467 - protein, 304 aa, Unknown
  Obtained from environmental sample
  misc_feature (1)..(304): Xaa is any amino acid
MKETQDNEKKTSIKVRYIIFSISLFLIIFIGGSAAFFFSMWKMLHSTAGYELEQAMELERAKLETSVNSEIAIALKMATSPLIQRHFLNPSDLDLKRIAFEEINGYCRAFKSNSAFWASDIDKEFYFNEDNHYKVDTENPDNYWYKMTLYETERYNFNINYNPEIQKTLLWINAPVFDSRHTPIGLVGTGIDLTEFINNIYKNYKGGADLYIFNDLNEITGSKDVNLVTNKTTLDKALGDTGVEILKKIKSDDKSQFFTTPEGVATITNVPSLNWHIAAILPLTIIDALNSGMTLLFIVMMAAI

SEQ ID NO: 87468 - protein, 400 aa, Unknown
  Obtained from environmental sample
  DOMAIN (1)...(113): MGS-like domain
  misc_feature (1)..(400): Xaa is any amino acid
LDLAAFLAETGWEIISTGGTSKYLKENKIPVTDISFVTGFPECLDGRVKTLHPMVHAGILAKRDEASHMNTLKSLGIETIDLVCVNLYPFFEKVQDGLSQEETIEFIDIGGPSMLRSAAKNFRDVIVLIDTTDYAEVMEGIKAGEVSSETRKRLAGKVFALTSAYDAAIARYLLEPEKQNTDYPAFLPLPLRKAQSLRYGENSHQSAALYLNTDRPGALAGIQQLHGKELGYNNIRDLDLAWKAACAFGLPAKKIAPMGEDEVKCLVPLAAESTAGKVCCVAVKHSTPCGIALGDTPIEAYEKTFAYDPVSIYGGIVACNSQVDEKTASKLGELFLEIVIAPDFESGALEILKKKKNLRIMKAGYAPRDTKEYVSVDGGLLVQDTDKLLLEKWEVATRLA

SEQ ID NO: 87469 - protein, 673 aa, Unknown
  Obtained from environmental sample
  misc_feature (1)..(673): Xaa is any amino acid
LQGIPSQGIQDAETTGSQALPVTKISIYSSGLAYFEHSGALNGAAVIKLPFRENAVNDALMSLVLNDPASANPVVSYQSPYTLFQTLRSLKIDLSDESDILNILRKLRGVEVEIAVPSPVSGKIMGVEYRSRQTPSGFETNNPWLSLYTAQGIRMFSFADISAITFKDPAIDADLKRALDLIAGSGNNDSRDLTIKLPGNGSRGVSLNYVIPAPVWKVSYRLDLGNEKAKPRLQGWAIVDNDGDMDWDKVELSLVAGRPSSFIQNLYPPYYVSRPVQPLAIAGAADAATHDSGYAPSPAVPRESSERMMAYDYAPAAAAKPGVEAESGSARSRPSSGGVLETNISGAAAAAAGEQFEFTIKNPVSIARQMSAMLPLTDAFVEARKLLIFSGNGPANRNQNPRLGVELTNTSGIKLPAGAITVYDGGTYAGDALIEFWNEGEKRLISYGEDLSVIGAVMNSSSNTFSSVTISGGVMTITRSQEYLKTYTFKNNAAQEKQLLIEHPKSQGFSLNSPKADEETPTLYRFTVTLPAGSELTVPVRESRPIMERVTLLQLRPEAFLSYASSQELPANVRDSLQQAVNLRSSLNSAQAAVTEAERQRQGFVSEQDRIRKNLEAAGSTTQQGQEYLKRLLSLDDSIDKLDAELQTLRENARTAQKAYEDYIGSLRIGTRD

SEQ ID NO: 87470 - protein, 348 aa, Unknown
  Obtained from environmental sample
  misc_feature (1)..(348): Xaa is any amino acid
GTLPLMTAQGTFIVNGTERVIISQLHRSPGIFFDHDKGKTHSSGKILYSARIIPMRGSWLDLEMDPKDIIYVRIDRRRKFPVTLLLKALGYTSQDLLDYFYDKDILRFRDGRVFRDVAPHLLIGQKVQADIMDPETGRALVRRGKKITKLAARRLEEMGVRETEAALDDFIGRYAARDVINPETGEIILGLNEPLTEEALANLKTTGITELPLLFIDNANVSSSFRDTLTMDKVETTQEAVFEIYRKIRPSTPPTPEVAQTFFDNLFFNPEHYDLSPVGRLKLNLRLFGEQGLGDQAADLGVQVLRPLDILAAVKELVKLKDDPTSEVDDIDHLGNRRVRSVGELLEN

SEQ ID NO: 87471 - protein, 90 aa, Unknown
  Obtained from environmental sample
  misc_feature (1)..(90): Xaa is any amino acid
IGPEGCRGAPDLVIEILSPSNTAIEMERKFSLYQEASVREYWIVDSKNNILRVHCFRDSGVLTNTYKSPDAVPVAVLPGFSVALEPVFAE

SEQ ID NO: 87472 - protein, 382 aa, Unknown
  Obtained from environmental sample
  misc_feature (1)..(382): Xaa is any amino acid
MEGRMKGASILIVPACERGRGGGHLIRSLLILKALQANERGAFLWVSEYLKDDFLQRFSDFFDSIDSPCLLSREEELKSRTWDFIVLDRFRTSRKEYEFFSGFAPVIGIDEGGPFRNRFDFLIDLLPSLKDKAVNLFSPALLSLPRNRRPNVASETASGSPFRILISFGAEDSAGLGIAAARSISGFLAEAKTENKLEVTLVSPIPPHNTQYEIEELFGITVLRRIPYLSERLAEYDLLVTHFGLGAFEAVYARLPVIIVSPGAYHERLSRKAGFFSLGIGTGAAGRLGKIASDFGHRAEGYTSRPDTLKTLERKSREIAERYGLWEDQKETIAAYLCRVSPRSPLNCPVCRKPRAVPVLARFPEESYRQCLYCGNIYLARL

SEQ ID NO: 87473 - protein, 206 aa, Unknown
  Obtained from environmental sample
  misc_feature (1)..(206): Xaa is any amino acid
MKLNTRKLIAIFLAVFAITTYAQTDITDKFTDPNFKAVVYSKIGKTTPEPIYDSDLSGITILDVERKNIASLAGIEYFTALRSLYAYNNQLTTLDVSKNTALTTLQVNSNQLTELDVSNISLRYNLKVQNNYMADETAVTGFTNIWNGTTHIFWKQNIATHPDKPTNLTATYGQTLTDIQLPTGWQWQTNEPTPVGTVELKHTQQK

SEQ ID NO: 87474 - protein, 206 aa, Unknown
  Obtained from environmental sample
  DOMAIN (46)...(78): Ankyrin repeat
  misc_feature (1)..(206): Xaa is any amino acid
MSMASTYSDQSRKEGLQLVIASEKGDVETAKTLLKKDVYIHAQDREGKCALVAAAYKNYLEIVDLLIAAGADVNMKDNTLQSAYLISTSDGFTELLKKTLKAGADVHCTDSYNGTGLIRAADRGHVEVIKELLKTDIRVNHVNKMGWTALLEAIILGDGGKRHTEVVRLLVDAGADVNLADKDGVTPLAHAKNKDFIDIISILENL

SEQ ID NO: 87475 - protein, 225 aa, Unknown
  Obtained from environmental sample
  misc_feature (1)..(225): Xaa is any amino acid
SFGRLYANSDKISYGAGGGIVFDSIIPAMLSKFRDVMIGIVILLVFAASMSTLSSLVIASASTLTLDFLKGHVIKKMNDKSQLLVIRMLIVVFIVISSFIGIVQYRGGISFIAQLMGVSWGALAGSFLAPFVYGLYWKRVSKLAVWCSFVFSTGLLTLNIFFRSSFPALLQSPINAGAFAMLAGLVIVPVASMITKAPDKALVDNCFSCYEETVTVKVRDDLGSN

SEQ ID NO: 87476 - protein, 111 aa, Unknown
  Obtained from environmental sample
  misc_feature (1)..(111): Xaa is any amino acid
VVDESSQNIVEQEDKKEEDAISLELLRILKGDLYLWVLVDKTHPIGDYEPQDLVVLKSVNYDNTAGIQLREIAAAALEEMAVAARKDGVKLSVSSAYRSRSYQANLYDRYV

SEQ ID NO: 87477 - protein, 342 aa, Unknown
  Obtained from environmental sample
  DOMAIN (41)...(342): Glycosyl hydrolase family 57
  misc_feature (1)..(342): Xaa is any amino acid
MGVCGAISLVLNVHHPYVKEFSTLVQQDEDLSEDAPFENVNLAPGSVEESWFFETLSETYLPLLMLFDKLEADHVPFRLGLALSPVIAQMLRDDLLQKKYAAYLDNQIDFGKQEIERLSGKPALRLLAQRYLDQAVDRRAALSARYEGNIFKALEQHQQKRNIELLAAPATHAFLPFFCSFPEAIQAQMETAISFYHYSLGMSPQGFWLPELGWSKELDPFLRSYNFNYTIADSHGFVLGNPPPSRGSFYPIRTPQNIIVLARDFCACSDIIRISREGPYRDNSRDVGYELPPERLGPFIAQNGARCQTGYKYWQASSDDALYNPAAAQATAEEHAKTFLKM

SEQ ID NO: 87478 - protein, 441 aa, Unknown
  Obtained from environmental sample
  DOMAIN (34)...(150): Histidine kinase-, DNA gyrase B-, and HSP90-like ATPase
  misc_feature (1)..(441): Xaa is any amino acid
MLRKVVTVVNFRVDEKQQKLRINIDNKIPQTLIADDQRLSQVVANLLSNAVKFTPVEGSITVNALFMGEEKDLCTIQVSVSDTGIGISKEQQKRLFNSFQQAESSTTRKYGGTGLGLAISKSIVEMMNGKIWVESEPEKGSVFKFTVKMKRGSIDKQGLLSSDVNWNNIRIMVVDDDPDILTYFSDVTQGFGVTCETAISGKDALALVEQKGGCHIYFVDWKMPGMDGIQLARELKTRTPENSVVIMISAVEWSAVAEEAKKAGVVKFMSKPLFPSTIAEIINECLGTGNRQKEEVKTDITGLYKGHCILLAEDVEINREIVLTLLEPAQLEIECAENGAEAVSMFTEAPEKYEMIFMDVQMPEMDGYEATRRIRTVEAEMHSSSAASYDGESHRQVPIIAMTANVFKEDIEKCLEAGMNGHIGKPLDFNEVLEKLSKYLS

SEQ ID NO: 87479 - protein, 511 aa, Unknown
  Obtained from environmental sample
  DOMAIN (148)...(216): His Kinase A (phosphoacceptor) domain
  misc_feature (1)..(511): Xaa is any amino acid
VLEYTPIGIVIFQRDATAVFVNQYVLTLFDCAREDVLDNTFKELADKVAAKLMREVDLEPIMSGFTNGTLYDHKVELVFDSRPDIVCRFSVFDVVATGPYPDCTVLVIRDITHEQRVAELVEAKNIQMAKMNTELARSLAELKKVSDLKSNFLSIASHELNTPLTSIKGYSDIIIDNMRDKVDPSVYRMIETIGRAADRLHRVVNNILDVTKIERGRLRLRPEFMDIVAAMRDCAEEQTQIAQKRNITFRTNAPEALPQFYGDKHRIMQVFINLMNNAVKYSPDGSTVNVAITVDGESFHITVADNGIGIDKSEHKNIFAPFYEIGSANRHSTDPSKFMGGGSGLGLSIVKGIVERHGGTVWVESQGTNEGTFPGSIFHVSLPLNSEISWDDDESNLSESRLQEADNIDLDALDKEDLERPVILFIDQDKESTALASTVIENVFDILVVESGEQGLITALSQKPSLILIDSRLPGLDGYTMCRILRSLEETKDIPIAIFSAGVQDEEIQKG

SEQ ID NO: 87480 - protein, 189 aa, Unknown
  Obtained from environmental sample
  DOMAIN (21)...(189): tRNA synthetases class I (C) catalytic domain
  misc_feature (1)..(189): Xaa is any amino acid
MSKKSLFLYNTASRSKEKFVLPQDVDEVRMYACGPTVYHYAHIGNLRTYLFEDLLRRSLEYFGFKVRHVINITDVGHMTSDQDDGEDKMEKGAERTGKSVWEVAEFYAEKFKEDLKLLNILPPVIWCKATDNIKEQIELIQRLEEKGYTYKTSDGIYFDTMKFPRYADFAHLDIAGLKSGARIDIGEKK

SEQ ID NO: 87481 - protein, 470 aa, Unknown
  Obtained from environmental sample
  misc_feature (1)..(470): Xaa is any amino acid
MQLFTPKNTISYSVTMFNADIPDAIALRFIDEKAGYAQNESKVYNTSDGNQSADEPDTIQTVDLWGVTNSKQARRIGTYNYACLKNRPFVHVIEADIEYLICNKGDWVQYAGDVALAGSTQGRIRGVIWADGACVGVDTDEPIVMTEGKQYAVRIRLSNGTIILKDVIFDSGERHEKEIAYFPSDGGDPYDPFVGDLRAVDADDNVYYEPRNAVFFTEPLGKDEVPKAGDIYAFGVRGYEVLDLIITDIAPGQNLTAVLTCVEYAPEIFGVDREGFVLPDFVNRITPVSGAVDSGVVNPDRWRSFATYHDGEDEPARPSGDGQGGGWHQVQTYRSVWQSTKVAESVEGGEWGPPVRIRAERGNDDVTPIWLSLAPQYVELDTDGNGSLLAGLLPLAVQARLLKWNSVLTGVNFSLTGAPSGVSINSSGVITVNANAALGETNNITVRADYQGATYTAALSIAKNINNSAP

SEQ ID NO: 87482 - protein, 296 aa, Unknown
  Obtained from environmental sample
  misc_feature (1)..(296): Xaa is any amino acid
TVTIVKGPVTGQVRARQGDFVLAIAATGGRLAGSVFQWGGVAWEYRAPENYSDLYIRCFQDGLDVPALAQDIGWFGALIAKLLVAQKAFIEELSSQIITLKRGGVIQSETVTNGERDFLVKADGEAVFNKATVRGRVEADSGTLKNINIKTYAEIDGDITIKSGRFQVVPDTVIERSYSSIGAAILRNRIASDFGIPASDTYSLSYGRLNASPYPEFDTIVFGANQANQMYLYKNGALIGIPGTSNPISGLGTAGITIRIGTADMVMVYDAPGSTLKTNGVYRASDNAGNYYLKIK

SEQ ID NO: 87483 - protein, 69 aa, Unknown
  Obtained from environmental sample
  misc_feature (1)..(69): Xaa is any amino acid
MDNAAFHRKKELRKIARGKARLLFLPPYSPDYNPIEKTWANMKRFLRNSLKDFQSVDSGIYNHFGLIEN

SEQ ID NO: 87484 - protein, 208 aa, Unknown
  Obtained from environmental sample
  DOMAIN (148)...(207): Beta-galactosidase C-terminal domain
  misc_feature (1)..(208): Xaa is any amino acid
GIADKLAAFVRNGGILVTTYFSGMTDENDLVTIDGYPGELRSLCGLWVEETDALSPDQFNRLIFTDGPFAGTWKADLLCDIIHPESAQTIARYADDFYAGTPAVCRNSYGKGYVWYFGARPEAALVDRFTAEICGECGIKPVFPRQEGIEATRRIKGEKEFVFVLNHNKSEAEIVIPFACRDLLTDKNFSADSRYTLPVAGVLILEKK

SEQ ID NO: 87485 - protein, 460 aa, Unknown
  Obtained from environmental sample
  DOMAIN (3)...(246): E1-E2 ATPase
  misc_feature (1)..(460): Xaa is any amino acid
VIIVLSMVFISGLLRFVQELRSGNAAKRLSEMVETTACAVRKYKEKESGETFSQKKEIPMDEIVVGDVVYLAAGDMVPADVRILQAKDLFISQSALTGESEPVEKFAETATKTGNNPLEMNNLAFMGTNVISGSATALVITVGDDTVLGTIAQQLQTKTPPTSFEKGVNSVSWVLIRFMLVMVPVVLLINGFTKGSWFDAFLFALSVAVGLTPEMLPMIVSANLAKGAVSMSKKRVIVKSLNSIQNFGAMDVLCTDKTGTITQDKVILELHLDIHGNDNVDVLRQAFLNSYYQTGLKNLMDLSVIEYARKADLSNLWVDYKKFDEIPFDFNRRRMSVAVEDSSGHIELITKGAIEEMLSISVQADDNGTSTPMSKELREQIVTTSKKLNEKGMRVLGVARKTIKETEENQATALSATDESDMTFVGCLAFLDPPKDSAATAITALREYGVKVKVLTGDND

SEQ ID NO: 87486 - protein, 237 aa, Unknown
  Obtained from environmental sample
  DOMAIN (36)...(236): Iron only hydrogenase large subunit, C-terminal domain
  misc_feature (1)..(237): Xaa is any amino acid
MNGSEKKLQINHDMCIGCGNCINACTHKARKFIDDTGRFMEDLKQNKKIIAVAAPAVASFFPNQFLNLNGWLKSLGVEAFFDVSLGAELTVISYLDYIKQKNPRTVIAQPCPAIVTYIEIHHPELLPFLAPADSPILHTIKLVKEYYPQYKNHKIAVISPCIAKRREYDETGLGDYNVTMIELKKLLDEQKISLSSFPQIEYTGVSAERAAGFPIPGGLLDTAERFVPGIRRSTEKM

SEQ ID NO: 87487 - protein, 220 aa, Unknown
  Obtained from environmental sample
  DOMAIN (35)...(212): ABC transporter
  misc_feature (1)..(220): Xaa is any amino acid
MVGAIQIERLRKTFPQPDGQSITVLNNINVNIKAGEFISLIGPSGCGKSTLLRTVAGLIVSDEGRIILDNDIINKPGYDRGLVFQDPTLFPWLNIYENIAFGLKTRNIYKEKKNDVAHFIKLVGLNGFEKSYPHQLSGGMAQRASLARALVNHPKVLLLDEPFGALDAFTRMNMQDELINIWKERGTTTIMVTHDVDEAIYLSDRIFVMSARPAKIESVI

SEQ ID NO: 87488 - protein, 63 aa, Unknown
  Obtained from environmental sample
  misc_feature (1)..(63): Xaa is any amino acid
MTAEMLGVKFGIGWYINWQREVLAYANVYAGLITIAVSFSLFITALFKVRDKLLSWQKGVIKW

SEQ ID NO: 87489 - protein, 299 aa, Unknown
  Obtained from environmental sample
  misc_feature (1)..(299): Xaa is any amino acid
MRVSLKPDERSFVFDQSKVREYRFTIGKTDSAKLDSEGWKEEYVSANMKFEETSYGEIGLRYKGSDYTLPRCFGMGTTGRTCPKVSYKVKFTEYDKDKRFYGMKKINLHALTGDNTKMHDMLAYELYRDMGIHAPRTAYANVYVNDRLVGLFLAVEDIDGRFTKSRWPDHGNGNLYKEKWPNSNKTSHYLDGLKTNDDPEDNPNVQRMVSYYNAIQEANEQTFEQNLSPYMDFDHFLRYMAVDVAVQNWDGIRSWYSDQTALRWANNHNYYFYEEENAGGKIWLVPWDMDNTFWEIDPY

SEQ ID NO: 87490 - protein, 398 aa, Unknown
  Obtained from environmental sample
  misc_feature (1)..(398): Xaa is any amino acid
SDERTFEQNLSPYMDFDYFLRYMAVDVAINNWDGIRSWYSDKTALQWANNHNYYMYEEENAGGKVWLVPWDLDNTFYEIDPYYETAKVPQWNETPAHCGGYMIWGDPNQFIRPPNCDKLTKLTASVFWERFVKFGERFLKDQFASQRLIDKINVHRQVISESVRRDPVINSNSWTNDVNILILYLPDLAVKFSNHIHSIKSDLSSNRYLSPTRVNNYEFTLSSDNMHWVRKYFSDNSEGSVTHNKEHPLSGMADMRFDFTFKETSDPKEWDVWGNFQPEFEQAANLSNLKEIRITLRSDKARNWRISLGNWDVYQKYGASSEYGWEFSVAAQTQTVTLEMSKIAYPSWASNKPDIKAEILKTVRTLMFSPSARCNSGGFLSVIPDVGYLQVDDIEFVY

SEQ ID NO: 87491 - protein, 86 aa, Unknown
  Obtained from environmental sample
  DOMAIN (12)...(79): Phosphopantetheine attachment site
  misc_feature (1)..(86): Xaa is any amino acid
MEFFVNKDAVFEKLKELMIAEFKVSADSVSPEKRLHDDLQLDSLDMVDLILNLSDYIGKKIDPTLFKDACTVQDLVVSISPLWKTA

SEQ ID NO: 87492 - protein, 82 aa, Unknown
  Obtained from environmental sample
  misc_feature (1)..(82): Xaa is any amino acid
MLCPKITDVEALDNYKIKLKYETGEIKIFNVLPYIFGKWYEELRNNNYFKTVHLISDGKGIEWEHGQDIAPHELYDMSVVAN

SEQ ID NO: 87493 - protein, 88 aa, Unknown
  Obtained from environmental sample
  misc_feature (1)..(88): Xaa is any amino acid
MPILSLFYGIVIRMHKEISEKHHKPHIHVEYAEDEAVMALDGEILEGSIPKSKIKLVEAWLEIHHDDLEANWKLLSKGEEFFKIDPLK

SEQ ID NO: 87494 - protein, 85 aa, Unknown
  Obtained from environmental sample
  DOMAIN (28)...(61): Tetratricopeptide repeat
  misc_feature (1)..(85): Xaa is any amino acid
EYPKALEWYQEALGIFEKVLEKEHPSIAAIYNNIAVAYDNQGVYLNALEWYQKALAIYEKVLGKDHPDTVATYNNIANVNKKHGI

SEQ ID NO: 87495 - protein, 142 aa, Unknown
  Obtained from environmental sample
  misc_feature (1)..(142): Xaa is any amino acid
VSKNRLWGGRFAAGPAEAVAEYTQSVSFDCALALHDIAGSKAHARMLGAQGILSPAEAESLIRGLDRVREEVEQGRFVWKRELEDVHMNIEARLTELAGDIGKKLHTGRSRNDQVALSFRLFVSARVQEWQKSACLLAGVLR

SEQ ID NO: 87496 - protein, 402 aa, Unknown
  Obtained from environmental sample
  DOMAIN (1)...(231): EAL domain
  misc_feature (1)..(402): Xaa is any amino acid
MNLTSDNIIAYFQPILSADSNYVYAFEVLGRYIDDDGTVNSLGPFFTDPNISHDEALRVHRIVRRYAMKKYSEEKRNEYLFINIRLVWLLPYVENPEEMLTLRLAKEFGIASEKLVIEITEEDFNSSEEYLRAIVHYKKAGCRIALDDYGKKASNIDRLAKLHPDIIKINIDYIHNSEMSYHYREYLHAIAAFADSVGIEILYEGIETECQLDICISSKGRFFQGFLFAVPQPSMRDANINTFVFSTLMAAAYSAIQTNAVNVESLKNSFDVHVERFFLENPFDREKINNDEYLIKLFRELPEVIRIYLCSREGIQLSNNIERESDNIVCRDYKNKIWAWRGFFHETMKAFIRGRKSCLSNPYRDFTTKEKICTYCYAITDDIFLFADMIKNSEETKDNAVR

SEQ ID NO: 87497 - protein, 854 aa, Unknown
  Obtained from environmental sample
  misc_feature (1)..(854): Xaa is any amino acid
MPLDRRVSTGMPGLDQAIDLLRLGDNVVWQVQSLEDYLHVLRPYIRQAKQDKRRLVYFRFGNHEQLMADDEPSIMYQLDKSEGFELFALKVHDIIDREGLKAFYVFDCLSDLLTSWSSDMMVGNFFRITCPFLFILDTLAYFAIIRGSLTHDTIARIRETTQLLMDVYNVDNKFYIHPLKVWERYSPTMFFPHLIDGDEAVTITSSADAATLFSRVSKGGQPRDYWQIKLDHARSSLSSDEKSQEDMKNLLTGWIIGKELRITNLVAKYFTLRDILDIAEREIGTGFIGGKSVGMLLARKILEKEAGDVIRNHWEPHDSYYLGSDIFYTYIVHNGLWDLRIKQKTTEGYFTVAKELQEKMRQGKFPDNIREQFIQMLEHFGQAPIIVRSSSLREDNFGNAFAGKYESVFCANQGTPEERYAAFEQAVRTVYASTMNDDALAYRQRRGLTNQDEQMAILVQRVSGNHYDELFFPHIAGVGNSINLYVWDKSMNPEAGMLRIVFGLGTRAVDRVSGDYAKIVPLDCPNKGPPVSYGDEKKFSQHKADVLDLSNNKLTDAPLEKLADGDLKTDKEIFFTTDTEAINRMRELRINSATTPRIPDFRKLLNETGFPEFVRSALLTLRTAYNYPVDIEFTANFTPDGEFRFNLLQCRPLQTKGIGRVMEAPQPRHEHIFFSSTGDFMGGNVRLYFDYVVFVKAMEYLDLPDQDKYQAARTVGFINQKLKDKTVLLMGPGRWGTTTPSLGVPVHFSELCNMAALCEVSYLKAGIVPELSFGSHFFQDIVESDIFYAAVFDGEPGITFCPDQILSKDNLLAELLPEEKKWESVIHIAQTPGLILHSDITNQKLLIYWDKDIV

SEQ ID NO: 87498 - protein, 310 aa, Unknown
  Obtained from environmental sample
  DOMAIN (161)...(302): SpoU rRNA Methylase family
  misc_feature (1)..(310): Xaa is any amino acid
VISVNKLEKLPRHQKLRKIAKIFTLAENRLCLSAKADESDPSKPSIIQNTFTHSELVFYADVSKLLADDALFPDNAKKAFEEASSTFVAASAFAASSAFSAASAFAAASELAAQESTIKIRRVLNSVKHLLLSAIGRDQSDWDFTANDGRLDAASRQVFSGMRVYMEDIRSPFNVGAMFRTAEIFGVEKIFLSPFCADPRHRRAERTAMGCVDIVPWERRGFFTDDENSALPFPVFALETGGIPIDKFPFPRDGLLIAGSEELGVSPRALAAADASLGRVSIPVYGAKASLNVSVAFGIALQAWTKVFKT

SEQ ID NO: 87499 - protein, 78 aa, Unknown
  Obtained from environmental sample
  DOMAIN (20)...(73): Helix-turn-helix
  misc_feature (1)..(78): Xaa is any amino acid
VPVRKPTDYKAGCHFHTDDIKRIRQKTGLSQVVFASSLGVSPKTVEAWENGRNKPEGASRRLLEIVRDDPCFLRRFQA

SEQ ID NO: 87500 - protein, 451 aa, Unknown
  Obtained from environmental sample
  misc_feature (1)..(451): Xaa is any amino acid
FPPETLEKFGAVDKVDDDLILKSIHNELIAAKDYELERALDKNIFRTIAGQERDGVIRYIAETLLALHSCDTEMIRGAFAVQLPECNAFPLLKARIQINQSLYNLGFRNNEPALEGAKKAAIICQNSGSPCLAMSYRLMALASLSHKRINETVNYLGFALENAVLSGEPQEIGMASYYAASVQLLYGNLSLSKKHAERARRHFLEAGSPQWADRSRFLEGRLAFEAGYYQQASDIFEDILKNPDGEHNGEKQKLIEAWIYRAVINGRNPSYPPPEDIGPDAGLFQLEALYLEGKYAKMEELSEYLSRVPAYNNFIHIEQPDWRSGFTQCELLYFSWADLWERMLGAWRSLAQCRLSAKKAGEAQITMQQLIRKCQFPEIDTRDPFYYYALYQTCEHAGASQVDIRTAASAAFNRLQNRANRIDDPETRRQYLKQPHWSKTLSKAAVEFKLV

SEQ ID NO: 87501 - protein, 207 aa, Unknown
  Obtained from environmental sample
  misc_feature (1)..(207): Xaa is any amino acid
MSLIYVERAVSELPYTQSVLQNFPGAQVIYIDDIRTLIKQHKKVTFTKEQQPLVLAKQRGRFLEKCPGTKEHICCNYYTLNTAVGCPYDCTYCFLQSYSNNPYYTIYTNNEDMLAEIRHKVRGKIRLGTGEFTDSLAMEMYTQFVYTYAPQICAISPDITLELKTKSAPLNLNFAGEKNPGLQKQLVLAFSVNPQSLIDSDEHRSAS

SEQ ID NO: 87502 - protein, 209 aa, Unknown
  Obtained from environmental sample
  DOMAIN (5)...(203): Pyridine nucleotide-disulphide oxidoreductase
  misc_feature (1)..(209): Xaa is any amino acid
VKQYDLVVVGGGPAGLAAAIAAAERGARGILLLERDQYLGGILNQCIHPGFGLQYFQAELTGPEYAARFIAELPKYPQIKISLQSFVIKLNARKEITYLKPGLCETVLAKAVIMATGCRERTREMIHIPGDRPAGIFSAGLAQKLINIEGLLPGKEAVIIGSGDIGLIMARRLTLEGAQVKAVLEIQPKPSGLTRNIVQCLQDFDIPLY

SEQ ID NO: 87503 - protein, 95 aa, Unknown
  Obtained from environmental sample
  DOMAIN (15)...(70): BFD-like [2Fe-2S] binding domain
  misc_feature (1)..(95): Xaa is any amino acid
ETISKLIKKNPAYGDIVCRCELVSAQEIREAIRRGARTLDGVKFRTRAQAGRCHGGFCTTRIVKILAEELKLPLTAVSKNGSGSELIMENRREAI

SEQ ID NO: 87504 - protein, 430 aa, Unknown
  Obtained from environmental sample
  DOMAIN (367)...(424): Bacterial regulatory proteins, luxR family
  misc_feature (1)..(430): Xaa is any amino acid
AKSLDLVKFYEAKFLKLPHDDEVRNRTLAQLYVCWSYIRALMAVTDNNYDYAIYMEKANKLVSSLDDPGKFGPYYSGAWINYAGSSKKGVLEEFINFSARIRDNLSHNFLRGSVAGEIELMKGELDFYRGNVNSALPLLNLAVKEARLEKQFGFVHRALFYILRSAVYQGNLALAEQALKDTKTQLDENIYISRFFDYDISLSWFYCYLGLPEKMADWLKEDFSPYIHAAFIENFGNQIKARFCYATRNFAPLLSYIEEMKIRESILYGRIEMLAMEACIHHKMKNKKKAFAALRNAYENAFPNEIVMPFIEMGKDMRTLTSVVLKESDDVIPKAWLEEINRKSASYAKRRAHVIAEYAQANRMSDSISITPRESDILSDLSHGFSRAEIAASRNLSINTIKMVINDLYYKLGAENLADLIRIATIRKII

SEQ ID NO: 87505 - protein, 421 aa, Unknown
  Obtained from environmental sample
  misc_feature (1)..(421): Xaa is any amino acid
MGHPAADELNANPPPIPDAEPRGSRAVFIPPVVGDTRMFWVETYYHNDIWVKKQATLRAAGQYSNIWVMDENYGSGGGNKVTTAQAQTLAAKFDLIYPIETNLLGYEYGGGPGGDGGRDGDPKIQILIYSIVDASGVVQAGGFFWSKDFYPQIINDLLGYKTNQAEIFYIDASQVNNSPDYTYSVLIHEFQHMINFNVKTVKQIMNSETWYNEMLSLMAQDVIEGLIGINPSHPDHITMNKIPIFLSLYKGLSFTIWYINDPFTINYGKGYAFGAYLLRNYGGASLLKSILANNTADIASITEALNTVAGSGLSFEEALRRFGEAMIFSGSKIPAGVMTFDKTVSDTINGFTYTAYGFDVWNIPQFIFGYGPSVNDLSQAEMRSHSISIHQVPEWKNKTGDFSITLEKPANSGIEFYLMMR

SEQ ID NO: 87506 - protein, 416 aa, Unknown
  Obtained from environmental sample
  DOMAIN (4)...(416): Glycyl-tRNA synthetase beta subunit
  misc_feature (1)..(416): Xaa is any amino acid
MALFVLEIGTEELPAAFLAAQEEELKQRFQAAIAGAKLPYGALRVGSTPRRAAVLLEDLALKQEEREEVCTGPSLNAAYDVDGRPTTALEGFARGHGLTTADCFVLNVPEKKGDYVAIRKRVGGASALRLLADICPAIISALPFAKRMRWGGGDFAYARPLRWILALLDGDVVSFAVGRVQSGRRSFGHRVHGPGPFDLAHANEYLDCLAGRAEVILDTAERRSRIRAQGDALAAAVGGSVLWKESLLDEVQGLCEQPVPLLGGLDKGFLELPREVLLTSMEGHQKSFGVQGADDALLPYFLTVLNMRPPDEAVVRNGWERVLRARLEDARFFWKTDLAGNFDAWLAALDKVVFLGPLGSVGEKAHRLEALCGMLARKCAPGDTQLARDAERAGKLCKADLVSGMVREFDTLQGIM

SEQ ID NO: 87507 - protein, 67 aa, Unknown
  Obtained from environmental sample
  DOMAIN (1)...(64): Glycyl-tRNA synthetase alpha subunit
  misc_feature (1)..(67): Xaa is any amino acid
VIERKLPWPAYDCCLKCSHLFNLLDARGAVSITERNGYIGRVRALASAVARLYVAQREELGHPLMQK

SEQ ID NO: 87508 - protein, 417 aa, Unknown
  Obtained from environmental sample
  DOMAIN (116)...(383): ATPase family associated with various cellular activities (AAA)
  misc_feature (1)..(417): Xaa is any amino acid
MARMRNTEGMNERVCSFCGKSTDMARRLIAGPNKVFICDECVEVCRKILTDEEHEITSQFTGDIPTPVEIKLYLDQFVIGQDAAKKALSVAVYNHYKRIANPNSGGNSDVEIEKSNVLLIGPTGTGKTLLARILARKLKVPFAIVDATTLTEAGYVGEDVENILLKLIQNAGSNIAVAERGIVYIDEIDKIARKGENVSITRDVSGEGVQQALLKIIEGTIASVPPQGGRKHPNQELIRIDTTNILFICGGAFVGLDKMIARRVVQHPLGFGTEGASSEKNLRELYDALHPDDLIHYGMIPEFIGRLPITVSLDELKRDDLKRIITEPNNAIVKQYQASLAYDDVKLEFTEEAIDAIADTAIKQKTGARGLRAIVEKLMIDIMFEIPSLKGHKQVIITEDVVKNLQTPIIHQLQKSA

SEQ ID NO: 87509 - protein, 113 aa, Unknown
  Obtained from environmental sample
  misc_feature (1)..(113): Xaa is any amino acid
MIKHFGSLVKDGGMFIVITSEAGSMTNIGQKYPLYSISKAAQNKLTAIFAKTIKNYTVYAVHPGRMNTVMGRSDAQIEPEEAAEGIYRIITGEKKMSPENGWFIDYNGEPMEI

SEQ ID NO: 87510 - protein, 515 aa, Unknown
  Obtained from environmental sample
  DOMAIN (262)...(513): Bacterial DNA polymerase III alpha subunit
  misc_feature (1)..(515): Xaa is any amino acid
MADFVHLHVHSDFSLADAAVSMMRLADRAEELGMSHLALTDHGNMFGAMEFIKACEHEKRKKTVKPIIGCEVYVSPGSRFEKKGSENENKYYHLILLAYSRAGYFNLVKLCSFAYTEGFYYRPRIDEELLSKYHEGLISLSACASGEIPRLIQAGKMDEAEKKALYYRDLFGEDAEGNPNFYLEIQDHGIPSGVLRGSDLSQKDINEAVAGISKKTGIPLVATNDVHYLDKDDYIAHDVLLCVGTKNVRTEEKRKKYFGDQFYFKTGDEMAKIFAEYPQAVENTVKIARRCNADVPKIETKELPQYLPEFEIPEGFKGPGEYLRHLTDEGLARRYAKIKESDVNKWEEIKKRADYELDTIINMGYTGYFLIVADFINYAKGRDIPVGPGRGSGAGSIVAYSLRITDIDPLKYGLIFERFLNPERISMPDFDIDFANEGREEVISYVTRKYGKERVAQIITFGTLGAKAVIKDVARVLGISIPESEMITKLISFDPEMTLDKAKEEEPRLQELESD

SEQ ID NO: 87511 - protein, 244 aa, Unknown
  Obtained from environmental sample
  DOMAIN (24)...(244): Aminotransferase class I and II
  misc_feature (1)..(244): Xaa is any amino acid
MSAYWNSRIKNLSPYVPGEQPRDRQFIKLNTNENPYPPSPNVIKAIHEAANERLRLYPDPQCTAFREAVARRYAVKSEQVFAGNGSDEILAFAFAAFFESNNGNKADPILFPDITYSFYPVYADLWDIPYRTIPVSEDFSINTADYKIPSGGVVFPNPNAPTGIPIPLSDVLSLAEYLEKRDKVLIVDEAYAAYGAESAVPFINKHGNILTVHTLSKSASLAGLRGGFAIGNSELIEGLCRVRD

SEQ ID NO: 87512 - protein, 408 aa, Unknown
  Obtained from environmental sample
  misc_feature (1)..(408): Xaa is any amino acid
MAEEITKLQRPQQFYAASYYSSTEIRLTWTEVKGAAYYMVERATASFQDWQKPGYQPDDGDFEVLDRYIYNASFTDVILKTASLDAPEYQNKYFYRISAFNTAKKYDESDPTEPVSAMLFNAPVNLKASGGVSVDYVELRWERSSGADSYEIFRSDFPSGVSASSLGIVYGNQTWFRNMVSAAEQGKDFYYMVSARNNFGNKTPLTKPAYGYSRIFGAPDEPKVSLAENSGRGQSPTEIKIKWDAADETEAYYAVYRYSSVDSSLTRLTDKTEATEWTDKAALKPGIYYYYKVQAIVDDIKSGKALKSPFSTSDDKTESYILSPPDNVVAVKNPNGKVTLKWVPAIGSEGERLLFTYNIYADRNMNGNFDTNVLSNVEPNVDGGGFISEEGLSVESGAFFKVTTVNTS

SEQ ID NO: 87513 - protein, 309 aa, Unknown
  Obtained from environmental sample
  misc_feature (1)..(309): Xaa is any amino acid
EISITVTRATEYTYDGNPKNGYTGTPTAAPYTGALLIEYAGESGPPTNAGEYTIKISLPSDAPYVGVESYKFIIEKANPSYTAPTNLTATYGQTLANVAFPTDNWAWQEASTTPVGNAGQRTHKATFTPDDTHNYNEKKDIDVTITVERANPVVTFPTSATITYGQTIADAVFAGHSGAGTFAYTTGTTKPTVSQSGTAYEVKFTPTDTDNYNTLTQNVAITVSKASGLVATNPGKQMISKGDLSPNTFDLSTIVLNKTASDHGTLSYALGTLTDASGILATPAISGHTLTYTGTGKESGTATQNITIT

SEQ ID NO: 87514 - protein, 512 aa, Unknown
  Obtained from environmental sample
  misc_feature (1)..(512): Xaa is any amino acid
GRRGLVYYGTAIYNINSTGKTTVSGDAIVTSSSNNTINNYDGTLEITGGTVKNTASSATARAIYSDGGAVTISNGIVTAKDGYAIYRSNGTITLTGGTVFAYGTAASNVIYGTYNASGSSEIVAWNPSLTATYGQTLANIASNLPTGWSWQGQTTTPVGNLGTQTHKAKYTPTKAGNNNILTDIDVTINVEKAPGSFISPTALNTIYTTTLKLSDLSLPNGYAWTTPTTSLNAGSGQTFAATYTDPSGNYNAASGTITVNVAQATGTFVSPSALSTTYTPTLKLSDVTPPTNYAWTTPNTALTVANNGQAFAATYTDPSGNYTAASGSITVNVAKATGSFVTPSALSTTYETGLKLSEVPPPAGYVWDDQTTNLYAGNGQTFAAVYTDPSGNYNSASGSITVNVAKAGGFHNTAPPSRQISASNTETHTIDLDILGFNKSDHGAITYSLGAFTDDTDILSAPPSLGEDKLTLSYTGNRKTSGTATQVINIVSGNYRDTTTTITFTATAKEEV

SEQ ID NO: 87515 - protein, 375 aa, Unknown
  Obtained from environmental sample
  DOMAIN (88)...(159): Sigma-70 factor, region 1.1
  misc_feature (1)..(375): Xaa is any amino acid
MSDTRRTEAGAKSKTLPPGKNKKPETGAKTAYTKKNPLHKKPAPDRNTKHPKVPGENAGEGLILKAAALQGTETAGNPNPAATVTISGSALLDPAVLKLLEYAKEKKTLSFEEISDYLPEHISDTEKIEPVLALLEANNVQITVDDSTGEDDADADGGKRTGTGKKRSANNDKEASLVDDPIRMYLREIGRESLLTAEQEIELSRQMEEGENIIKNVIKKSGMIIPEFYRIVEEAFSKKDLRELNLTKKETTERMAERRRLSAFYRDSLRTIQGDLKNYIEIKQRVIDRGGDYLDDKDLTSLRKRISRSIKNAAIHPDEINLFSEKFIQASKKIKKYKKEQERIEEHLKVCSLKDLRTLGRNLTIKEERERLEQE

SEQ ID NO: 87516 - protein, 596 aa, Unknown
  Obtained from environmental sample
  DOMAIN (18)...(524): RecF/RecN/SMC N terminal domain
  misc_feature (1)..(596): Xaa is any amino acid
MAFVQFSKVSLAFGDRDILKDVSLHLASGSRACLAGANGSGKSTLMKVLAGELSADSGDRAVQRGTRISYLPQSGIVHRGKSLRDEAETAFAHIQELIDRSEKIAALLQDAKSDDGTSKALLEDHHRLQEQIENSGYYRRDAAISSVLAGFGFSPNDLDRDTGEFSGGWQMRIALAKALLEQPDILLLDEPTNYLDIEARAWLENWLAKFPGGCLLVSHDRYFLDVTVNEVYEIFQGNLKRYAGNYSAYEKTRQMELASLMKRYTEQQEEIAKTEALIRRFRYKASKAAFAQELIKRLEKMERIEIPENLKKININFPPPPHSPRVALTIEGLGKSYGAKKVLHGLDLTLDSGERLVVAGPNGAGKTTLLRILAGNDNDFEGSVKFGSGISAGYFSQDAAEALNGSEQVLEFMEANAPTALIPKIRDMLGAFLFRGDDVYKPVSVLSGGEKSRLALLYMLLKPLNLLILDEPTNHLDLHSKDVLLETLNQFKGTIIFVSHDRAFMEALSTKTLELSPGDGGASSRAMLYYGNYAYYLEKIGSGEWGVGSRGQGAGSREQGTGNGGRGITYNREQITDNREEGEGKRKEGRGSDIKR

SEQ ID NO: 87517 - protein, 402 aa, Unknown
  Obtained from environmental sample
  DOMAIN (2)...(118): Histidine kinase-, DNA gyrase B-, and HSP90-like ATPase
  misc_feature (1)..(402): Xaa is any amino acid
VADDQRLAQVVANLLSNAVKFTPENGAITLEARFMGEERGFCTIQISVADTGIGINSEQQKRLFNSFQQAESSTTRKYGGTGLGLAISKSIVELMGGKIWVKSESHKGSNFAFTIKAKRGTLKEKGALLPPGIKLEDIRIMVIDDDPDILAYFNDIMHEYGMNCDTASGGEEALKLVEKNGPYHIYFADWKMPVMDGIQLTRELKSRGPQNSVVIMISAVEWSVISEESKKAGVDKFLSKPLFPSTIFEAINECIGAGKEQEEEEQAAVGSSYSGRNILLVEDVEINREVVQVLLEPTQLEIDCAENGVEAVRMFSENQDKYELIFMDVQMPEMDGYEATRRIRLLNPKGKTVPIVAMTANAFRENVVECLAAGMDDHIGKPIDSEKIIEKLCVYLFKKQRK

SEQ ID NO: 87518 - protein, 400 aa, Unknown
  Obtained from environmental sample
  DOMAIN (107)...(250): GAF domain
  misc_feature (1)..(400): Xaa is any amino acid
MRESDYNADQAAFMRVYGIKSILLIPIFTHGGLWGAVSFQDHTNDRYFDEDCFDLVYSASRIFSNAVIRAETEDSAIKAIEELRHREKMEAALNRAAILFLSQNEKTFEATMTAGVGAIANTLNLDRFSIWRNTPSPDALYVSQIYRWDRDSGGTTTPTESLINVTYAQFAPRWEKLLASGEIINSPAKLLPEAGLLKSFGCVTAFVTPLFINNVFWGFALLEDRREERFFEEDAVEMMRAAAFLCANTVMRADMEREIADAGEFNRALLDASPLGFTIFDENARAFDCNDFTLKALGTTRQYYIDHFLEFSPEYQSDGIKSAEKAFNVITRALKGEKQVLEWENITSNGKIIPYEITLTRAMYKGKYVALGFQYDLRNTKKMMENIRKQGEQLRIRLEQ

SEQ ID NO: 87519 - protein, 510 aa, Unknown
  Obtained from environmental sample
  DOMAIN (204)...(415): 7TM diverse intracellular signalling
  misc_feature (1)..(510): Xaa is any amino acid
MISRLFFAVFLTILSAITSAAQTRENRFYIDLQKYPLYIKAGFNHSDAVSPYLQDGSWLVREQWYGAVIRRLGLPGIPKRIFLWPRGKPEKEWTFTIPFTIDASLLNNDAPIIPCLYLATIGINWEIYLNGTLLKKEMHLANGHIKEQHYERNVIVPINNNLLQKGDNVLVFRIVGDPTDYTTGFTYKSPYYLADYDFITRKHNETAQIILISILAILGIYHFVFFAIFRENRYSLLCGSFFLGMSFYYMMRRTQWIRQFIPNSDIAMKLEYLTLFFMILALMAYTDKLCNGRFFIATKIYGILCVVMAVSQLFFSRTYGSEAAAVWEAASMIAIVWLFIYNFILPINRELKKSKNFIDILINTYPGNLLIAFSIISITGIFDLLDSAVLHLSLSLTNYGIVVFALSVTFMLFRMSVIKDRELKEKSALLEKATNPESAREKVFNSYGLTEREKEVARLMAEGLDNKEIGERLFVSGRTIAFHATNIFRKFGIIDGKNKGRAVFLAKLFN

SEQ ID NO: 87520 - protein, 326 aa, Unknown
  Obtained from environmental sample
  DOMAIN (255)...(288): Tetratricopeptide repeat
  misc_feature (1)..(326): Xaa is any amino acid
MDQGFIDILKKLTTEQGKETLLNPPKCKAFLADYTKGEYKKESRLLLQALDVGVQKAIDTTEELEICKKQQTRVLQDEHFLSAEAAADVVNVLALVLREKKESETPQGAFCTNCGKELQKDWGVCPYCGTSVAKIQQNPPKAEITRAEPAKAETPKMESTSAPLQETTTTSQSPSETLAIQPLLNEKIINKRNLIIAGAVLLVILIIAAITERYNSNQQRAKELYDIGKTYSNNNDYDSAITQFNEAIRLNPNYVDAYRDRGFAYLMKNQYDMVIKDLNNAIRLDPNHAWAYGLRGEAYRMKDQYDAAIKDFDNAIRLDPNDPLST

SEQ ID NO: 87521 - protein, 258 aa, Unknown
  Obtained from environmental sample
  DOMAIN (127)...(253): MutS domain II
  misc_feature (1)..(258): Xaa is any amino acid
MNDDRFTPAMRQYMDLKARYPGAVIFFQMGDFYEMFFEDAEKVAPLLEITLTSRQRKGEDPIPMCGVPVSAGLAYANRLTEAGQRVVVANQVGDPSKIKGLVPRAVWQVGTPGLPLTAEGTAPGEAHYLAAVRPQAGRLGLAALEVSTGELVLGTFEDWENLRSEFSALNPRECLLPEDSPPEFLELLKQEHIFPTFRPARDPAEGLRELETLFGTSALAAWELDKWPEAAGAAGAVLAYARECGQGEFKHLAPPRLL

SEQ ID NO: 87522 - protein, 187 aa, Unknown
  Obtained from environmental sample
  DOMAIN (1)...(184): Cys/Met metabolism PLP-dependent enzyme
  misc_feature (1)..(187): Xaa is any amino acid
PNPSYHGAIFSQVAGNLAYIIKARTTLLRDTGAAISPFNAFLLLQGLETLSLRVERHVSNTLKVVDFLKKHPQVESVSHPSLPEHRDHKLYTRYFPNGAASIFTFLLKGDAEKAKRFSEELKLFSLLANVADVKSLVIHPASTTHSQMSEAELLEGGIKPNTIRLSIGTEHVEDIIGDLMAGFEAVK

SEQ ID NO: 87523 - protein, 393 aa, Unknown
  Obtained from environmental sample
  DOMAIN (1)...(393): Uncharacterized ACR (DUF711)
  misc_feature (1)..(393): Xaa is any amino acid
MLFTPFEIKETVDMFMRYKLDIRAITLGVSLLDCVCSTGKATRTKIREKLLRIAQPLVKTGHDIETEYGIPIINKRISVTPIAIVAASSEEEDFTPFAVTLDEAAKELGVDFIGGFSALVQKGISSGDRRLIQSLPDALARTEQVCASVNVAATKNGINMDAVRLMGEIIKKTAESTAERDGLGCAKLVVFCNAPEDNPFMAGAFHGTGEAESVLNVGVSGPGVIKAAIENYRNAGFDELSDVIKKTAFKITRMGQLVGMEAARRIGVPFGILDLSLAPTPEVGDSVARILEEMGLEAAGTHGTTAALAMLTDMVKKGGVMASTHVGGFSGAFIPVSEDEGMVAAVKNGHITLDKLEAMTCVCSVGLDMIPLPGDTSAATIAAIIADEMAIGM

SEQ ID NO: 87524 - protein, 289 aa, Unknown
  Obtained from environmental sample
  DOMAIN (58)...(279): DnaB-like helicase C terminal domain
  misc_feature (1)..(289): Xaa is any amino acid
AVGQKGGSEEDMPETLVETAGRDLFGIAQGHERGGLEHIAQVAQDVHGRLIERLESGGSPGVRLGFQRLDALTRGLQPGNLVVLAARPGLGKTALALNWLLHSSRVYGCHAAFFSLEMSKEEVFNRLLASHSSLNVRALMNGDIDEQNDPDAPHAYGHMEEARERLLRARDELVQLPAYICDRASITVHEITAMVDRLCTQADRRLDLVIIDYLQLISSPADSRGAKQNEAVRIGEISRALKLLAKDRGIPVVVLSQLNREVEHRQSSRQSSRPQLSDLRDSGAIEQDA

SEQ ID NO: 87525 - protein, 169 aa, Unknown
  Obtained from environmental sample
  misc_feature (1)..(169): Xaa is any amino acid
MEQVLTDLAAKLGECFAESTSSVFSMLTGREFTVSSKPDEVASEGDLLAKLPPDSIFVKTSYTKGVTGIALFSLPLKESTILVDLMLGGDGTPSDSLAGDSKDALSETFNQVMGSANQTLSDLAGETLSISGLEIIDQGGIDAAAMTKLIGEANFLAIPLATAADTLNT

SEQ ID NO: 87526 - protein, 329 aa, Unknown
  Obtained from environmental sample
  DOMAIN (42)...(232): Flagellar motor switch protein FliM
  misc_feature (1)..(329): Xaa is any amino acid
SQEEVDALLKSHVKGGKPSAAAPEKPAPKAKKAAPQKKVSLYNFRRPDRVSREQMRSLHFMHDRFARNFSSSLSAYLRSITEVNLLSVEQLSYQEFLLSVPDPTCFNAISLRPLEGALAMEVNPQLVFPIIDKMLGGPGEAIRHMRTMTDIEQSIFDGVLKLALEDLRDAWKGILDLDFKVQTRETSPQLIQIVAPNEVVILIVFEVKMGPVTGMINLAIPSIILEPVANKFDQEMFTGYKKSATFEEAKLLVKSLKHCSMEVSAEIRGTSLLMADVLQLQVGDMITLSKKYDDFLDLTVDGIPRMKGLVAINPHHKRVFQVTKGAEEY

SEQ ID NO: 87527 - protein, 825 aa, Unknown
  Obtained from environmental sample
  DOMAIN (155)...(235): Cache domain
  misc_feature (1)..(825): Xaa is any amino acid
MKKPKKTSFAKLFTTVSLLMILTITVSLSVIFFYNLRHIVTNLTELNTKTSVARSQDMVLSFIKEHEEALKQLSVGVTHLFNQRTVSEESVADFLRDIKEITPNSLDLYFTNNLMWNKPGGFAAFAGGWIPDDDWDNTQRSWFTDAKKAQGKIAFSEPYVDSETGDVIITLSMTVFDGEGADIGVAADDVAVNVMREMINAMRGFPGQEMYMINADGLFITHEDINAVMEKDFFKELKLDKYRASVLGSSDFFKIDNKFFIYSSAIPHTGWILVSTIPSSVIFNDINTLILRLIILCIAMLAVVVFILIFFIARRISSPIKAIHSALEKLKDGDLTVKVDVKSEDEIGELSGFFNMTLEKIKNLVGTIKYKINGLTHTSFELSVNMGKTSTAVTQISSNLDNMENLMVKQENGAEEAGKAVGIIKTNIDSLNKMIEEQTESVNMSSSAIEEMTANIHSVTQTLAENTKNVGVLTEASENGKTGLQIVAQEIQGISHDSEGLLEINSVMNNIASQTNLLSMNAAIEAAHAGEAGKGFAVVADEIRKLAESSSEQSKTTATMLKKIKASIDNITKSSNDVLDRFGAIDSSVKTVSEHEQNILKAMREQETGGKQILESISRLRDITHSVKDGSYDMAESGKTLVKETDEFIKTSQEAVEGMNEILKGVNQIKVSAGLVNDMSLENNRNFDALKQETEKFYDTVGDEKQKILVVDDDGIHLEMVEAVLRNKYDVSSVKSGKEALALFYQGLVPQLILLDLIMPDMDGWNTYARIKAISGLYNIPIAFFTSSNDPKDIKHAQEIGAVDYIKKPYDNDDLLRRIGKILKL

SEQ ID NO: 87528 - protein, 204 aa, Unknown
  Obtained from environmental sample
  misc_feature (1)..(204): Xaa is any amino acid
MNKKTVLCILILIMVYASCSQKYDSENDFQINPMLDGVSAEIANYSGKKIIVNIPPMILEMPIVRIGDDAFMRKEMDCVIIPEGVTSVGNRAFAYSSLESVNIPAGLTMIGESAFAFCEKLDTYIIIPDSVKTIDKKSFANCKKMPGITIPASVTYIGEYAFHGWNYPQTINIIGFESQDEADNAWQASWRSGCNAKINYYGKQ

SEQ ID NO: 87529 - protein, 257 aa, Unknown
  Obtained from environmental sample
  DOMAIN (48)...(137): Cyclic nucleotide-binding domain
  misc_feature (1)..(257): Xaa is any amino acid
MSQALYAYHQYLAHCPYAENTDTVKAKIAKLERNVTGTPLKYPPDTMVQKYPKGHLLFAEGESGHTMYIIQSGQVKITKIVDNKEVVLAVLSKGDIFGEMAIVENKPRAATVEVCENCTLLAVNRANFSNLIKEQPEVVVRIASIMSERIWLLYRQLDNTLIENPLGRIYDALLIQLEKNHVALNSRESYQFNFGFKELLGMVGLSENENKLFARKVIGDGKISFDNDKILVEDISAMYKEAMFYRKARKIASINRK

SEQ ID NO: 87530 - protein, 254 aa, Unknown
  Obtained from environmental sample
  DOMAIN (120)...(243): RadC, DNA repair protein
  misc_feature (1)..(254): Xaa is any amino acid
MSDVSYSEYSADEFQANKRKKTNARRSPLNLPPDQRPRERLLGRGPSALSNAELLAILLNTGSKGKSVSCLADELVKLLDKNNEIPPIPELLKIFGMGTSKACAVAAMLEFGRRRWGAAGSVIKRPGEIFSLVRHNADRKQERFISLSLNGAHEVMAVRVVTIGLVNRTIVHPREVFADLIQDRAAAFAVAHNHPSGRLSPSPEDDEITSRLLRASEILGLHFLDHVIFSETAWWSYRQNGRFNKLTNYATVNP

SEQ ID NO: 87531 - protein, 524 aa, Unknown
  Obtained from environmental sample
  DOMAIN (4)...(524): 4-alpha-glucanotransferase
  misc_feature (1)..(524): Xaa is any amino acid
SAFKESVGIGEFLDLIPFGKWAKKCGLDLIQLLPVNDTGEEPSPYSARSAFALNPVYIRLQEIEGAEEILGEEPDKHNKKFMKHPRIPYVEVVRYKRHALREIFNKRRHEILGNEHFTKWLEQNEWVNSYAVFCALKAENHEAAWKHWEKKEKPKASDVMFQKWMQWVAEEQFLKAVSELNKLGIRLKGDIPILINEDSADAWHYPQFFSLDNRAGAPPDMFCYSGQNWAFPTYRWDNLEKENFGWWRDRVKHAAKFYHAYRIDHVLGFFRIWVVPEVEHTGILGHFVPSVPIYMDEILQAGIPRETVHYITTPNFGEEQLGHWFSFDTESVKQKYFEHLRDDRYLLRPEYRSERAIISLQEEQHIKDALLNVYWDRIFVPSSTEETLWPYWYWYNAPVLLTLPEHERNAIRDIIKSNEIKQEDLWGKNGHRLLGVLAKEADMLVCAEDLGAVPNCVPNVLQDLGILALRVERWSRNWSQPGSPYIPYSEYPRLSVCTTSNHDSSTLLGLWNEHDFDRDFIGSI

SEQ ID NO: 87532 - protein, 211 aa, Unknown
  Obtained from environmental sample
  DOMAIN (6)...(211): PHP domain
  misc_feature (1)..(211): Xaa is any amino acid
MDKMFSSLHTHTIFCDGKDDVETMCRAAYEKGLVSIGFSSHAPVGKTGLKTTWHMKDEKLGKYINEINAARLRWEGKLAVYLGLEVDYIKGLRSPSDSDIKDLNLDYTICAVHYLIPPHGEPFTIDGHLEELENGILDGFGGDGESMLKAYLNNVMEMITLGGFDIVAHLDLVKKHYNSKGSPAFRERHGRWFEIENADYMRRMEEIARAI

SEQ ID NO: 87533 - protein, 762 aa, Unknown
  Obtained from environmental sample
  DOMAIN (17)...(133): Aldehyde oxidase and xanthine dehydrogenase, a/b hammerhead domain
  misc_feature (1)..(762): Xaa is any amino acid
MSVGQSIPRVDAWEKVSGRAKYTDDLVDRNALIGKVLHSTIANGLVKKIDTSEAEKIPGVVKIITCFDVPDFPYPTAGHPWSTDPGHHDPMDRRLLNARVRCHGDEIAAVIAEDEVSASRALRAIKVEYEEYPPVLSPEEAMGENASLLHEECPRNILKQTNIIDGNFDEAIKEEGLLCYAGVFETPIVQHCHIETATSWAYMEKGRIVIVSSTQIPHILRRITGQALGIPWGKVRIIKPYIGGGFGNKQDSLFEPLNAFLCTKVGGRLVKLELSREEVFAATRVRHSEKIYLKSWVRPNGRIVARSYTAYSNQGAYGSHGHGIAAKGTNVFRQLYNDEKARKADIYTVYTNTAAAGAMRGYGTPQAVFAIESHIEDIAKSLKLDPLEFRFLNVMPVGFVDNFTKNVNRFDSFRQCVEAGKKRIKWDEKRTRYANQSGPVRRGIGMSLFWYNTAVWPISIEISSCRMVMNQDGSVQIQLGETEIGQGADTAFSQMAAQTLGIPWQMVHIISTQDTDITPFGLGSYGSRQTYVGGAGVHKAALLLKEKILKAASLYTKLPAGELDIVNGEIVNTSLNGKTICSLGELVIDTLYHTEHSEHFTAETTAQVKSNAFSLGCAFAEVEVDIPFCKIKLLEMVNCHDCGTLINPKTAEAQVHGGMSMAIGYGLYEKMLYDSKTGKLLNGNLLDYKLPTIMDHPRLEAEFIENHEPTSPYGTKALGEPPTVPGASAIRNAVLHATGVGINTIPLTPHVLFAEFSKAGLI

SEQ ID NO: 87534 - protein, 493 aa, Unknown
  Obtained from environmental sample
  misc_feature (1)..(493): Xaa is any amino acid
ALAGKLLDKTIPIPKGYERKTGEEMEAEQSSFAYIFMHTFLPMLMRFMAIALVVLSAGYLCYRYIYMPIKAEKIYKLGIERIDAGEYTRANERFSEAYRIHPKKPWFYTYARAFRDSRQYPLAEEKYKELLHFTASKNKRGIPEKAAVLEYADMETNYIGDYQTADNIIRRNILDYFPADKDALLALGDNNLIWGEYDKDRLEDAREAYARLIERYGRTDPLMERMLKYFIRTDNLEQVLPLQNYFMYSEKRIISAATLAEMGGYFLDKRLEKVRGVPNEYLDQIGGIREILIRAIRQDPMLPESYYHLARYYNYFENSTDERLTLEVAVRAFEAAKEESPKRIGYHINALRRYAEVLTNGKEFFPAEESLIKGINVYQNGLSRRLLTPSPEYGKLYADLGDLEFFVKDGDMQTALDYYNYSEQNGWAPPEIQYRMGAAHYQLRQWGPALERFFAAFREMPFNRRILYALGNVSYMRGNYFAAQGYYDRLRKF

SEQ ID NO: 87535 - protein, 267 aa, Unknown
  Obtained from environmental sample
  misc_feature (1)..(267): Xaa is any amino acid
MIEEVLLPYQKAWIEDEAKVKVWEKSRRIGASYAEALASVLEAAKSKEAGGQSSYYLSYSKEMTQQFARDCAFWAKHINAAAKELEEIVLKDEDKDITVYRIRFASGYEIWCLPSVARSLRSKQGRVIIDEAAFVEDLDALLKAAMALLMWGGCVRILSTHNGDDNPLNELIKEIKECKKDYSLHRTTFDEALAQGLYKRICLVQKKEWSQEAQEAWRKEIIDSYGDGADEELFCIPVRAGTRFFPSALLEAVSDPSAKVLRKSCDD

SEQ ID NO: 87536 - protein, 279 aa, Unknown
  Obtained from environmental sample
  DOMAIN (3)...(263): DNA methylase
  misc_feature (1)..(279): Xaa is any amino acid
MLPNEGFIALFGRGTSFYRWNTRLADLGFIFKEEIVWDKRYTTAPCIALSRVHETVSLHTKKTGKIRRSKVPYVEQKQFDIESIVNDIKRIKSAINTEAGLNKVLAFLQGGELYEFEAVDKHCISQQPGIKKPDRATATINSIANGMTEKSILHLSEISGGTGMTVRTDLPQLPREIKTLNSINGGMREKSVIELKNDHYKLSHPTEKPVRLAERILALISDPGDTIYDPFMGSGSFGVACINTGRKYIGSEMKQEYFDIACKRINEAVKEQGLFSEAV

SEQ ID NO: 87537 - protein, 389 aa, Unknown
  Obtained from environmental sample
  misc_feature (1)..(389): Xaa is any amino acid
MPDYSNIQKEETLKAEVFQDYFGSSKFLYRPNIDNIDFVVMDKTGRHVLWAETKRSATGIVEMFVQLILTIGKARTFDKNMPPQFLAVFDNVKFAFLPYSAVYEIFFQNDFNWNITPSNYETKEFIQIKNLVESTVNNKKLIFSYATESAILKEFIKYNLYKAYDLFPDLIIRTQIDKTNFPHIYRQWAETVKPSIDIDWELAKKQDILDGDFYLADLISEENRTIKDQLFVLLEKDKYKLDRKIDEIGLFSSKTVFFKDNGKAYKEFWDRYIRPPKEEYWGYIVERRDLLVPQDVRERKGAFFTPRQWVAKAHEYLQKTFGENWQEEYFVWDNSAGSGNLLAGLINKDNIWASTLDKQDVDVIYDRIENGANLWKEQVFRFDFLNDDF

SEQ ID NO: 87538 - protein, 387 aa, Unknown
  Obtained from environmental sample
  DOMAIN (286)...(384): Phosphoribosylglycinamide synthetase, C domain
  misc_feature (1)..(387): Xaa is any amino acid
AFGLCKKRGHRPYGCGPEAPLAAGIVDRFRDAGLAIVGPGQKAARLETSKVYSKSFMGKYGIRAAESKNFTNHADALKYAEKHFAKSKETNQPLVVKADGLAAGKGVVVAADLTEAKHTLSAFMKEGSLGEAGKSVILEEYLEGLEVSVLAAVSVSPGRKGSIKPFISARDHKRRFEGGRGPNTGGMGAIAPVPDFTAVARNDFEKAILVPTLKGMEAEKMDYRGFIFFGLMVREEHCYLLEYNARLGDPETQAVLPLMDSDLAELCAAILDGTLQDFPLKWKKGAVCAPVAAAEGYPGPYRKGDPIAVNPEGLEKTGAKLFVAGASRGTGGPYGSGLRTTGGRVLCVSALGSDADDAFTKAYQALQFVSFEGMGYRTDIGREHGQS

SEQ ID NO: 87539 - protein, 164 aa, Unknown
  Obtained from environmental sample
  DOMAIN (62)...(164): Fic protein family
  misc_feature (1)..(164): Xaa is any amino acid
MELDKFTDPYLDENKVLKNLVNAKTDAELLKAEALFIYSRTIEFAEMNTAFNITKFDLLKELQNIHRHLFQDIFNWAGKIRVVDIKKNIPDSDFFLPVSMIEKASNFVTKELIDEKLLRHLKKNVFINKLAYFYDQVNYIHPFREGNGRTQRILFDIIARQAKY

SEQ ID NO: 87540 - protein, 104 aa, Unknown
  Obtained from environmental sample
  misc_feature (1)..(104): Xaa is any amino acid
VDIHPTEHVSALELVMTRLHAGGKFDKKSYKVSGGLHGVGVSVVNALSEWCEVFVHSDGKVHTQLLQNRHTGKAGPRGQRRYPALQPKTGKGHGSPLESRRFGF

SEQ ID NO: 87541 - protein, 325 aa, Unknown
  Obtained from environmental sample
  DOMAIN (97)...(272): DNA gyrase B
  misc_feature (1)..(325): Xaa is any amino acid
LSIQTAKSTHSCYKIGIPEKPAHEANAATLPYSPRLERGTVVRWKADASVFETTTHNYDALANRLRELAFLNKGLKITIRDERLSNPKVHEFKFEGGVKSFVEYLNENKTVLYREPVYLEGSRDDGQDGNIEIECAIQYNDGFNEIMFSFVNDINTREGGTHLVGFKAALTRTLNDFLKKSKHAKKLEETLSGDDVREGLTAVLSVKVPNPQFEGQTKGKLGNSEVKGIVESFIGEQLELFFDKNPDVINNILEKSVLAAKARIAARQARDATRRKNAMDSAGLPGKLADCSEKDPAMCELFIVEGDSAGGSAKQGRDRRTQAIL

SEQ ID NO: 87542 - protein, 193 aa, Unknown
  Obtained from environmental sample
  misc_feature (1)..(193): Xaa is any amino acid
MIPLRKLATLPRHQRLRKAAKIFEGAELKLISFGKIPADEIEYLRCLAKQLADEEGFRPAAVELLANTAERLSLNAEIDVNEIRRMLNNVYHLLLSETGRTKADWDFLDSRGSLDPSKRRPFAGMQVYLEDIRSPFNVGSMFRAAESFGVEKIWLSPFCADPRHKRAERTAMGCVDVLPWERLSHDPFAYQHE

SEQ ID NO: 87543 - protein, 361 aa, Unknown
  Obtained from environmental sample
  misc_feature (1)..(361): Xaa is any amino acid
MIRLNKLFFVYFFFLAVFTVTAQELYWEQAEPFTPRAGKFPVNANSGDFSVIAWQEVSPNRDASVTSGGLINIYLAVKEQGKNWEQRGAVAGPYVFLGTEPSILSMVIDEKGRILIAAASGNAQAEILISDNRGRSFTKQTINLGFENSVAPRLYVRADGGYLLFITRGQAQSVSILYSRSDNGVSWSPFAYFTPEKSLSLNFLPAHTSLDRRDIVFFQSLAIGADSSSTYQLYYKTSDDGGRTWTEMRRFTTFNDPSAQNQNVDSFDNQRPHITRFGDNLLLAWERRQSGRTPHIYAAIINPNMSIAGRVARVNSSEAYCNNPIGFVYNNIPSIVWFDNRSGNNRIILAQRDEFEWENHT

SEQ ID NO: 87544 - protein, 425 aa, Unknown
  Obtained from environmental sample
  misc_feature (1)..(425): Xaa is any amino acid
NQENGNWAFSVSAVDQAGNIGQPSSIIFKTNKFVPYTSVSYVDAQQDQQGILFIRIIGRGFTSNGQIDSIVLEQQGKPDLPAKSFNILSDKEITGLTFENMDEGRYRLKLRHSSRGWYTAESFIPVVRTGTVKFGDYSKEWKPSWKIQQKGLITFNPIMALAVLLIALCGLGLVATIRGIAGVISESAVIKHEALAIITGDFMLVEKKQKTAQMLKRGTGLTFKLASFTIALILLVIIMISTPMYIIMTKTQRETLLKSLWDRSNVLLDGLASSARTYLPMAIQSRGERGALELMYLPSNSEALAEANYITITGYGLNSIHTDHVWASNDPDIDSKTDTTELRPGVTRLTDVLTPLYDGLAEELNNKAQKEAGEISQSISTMTEQFLSLALRTDAAGERMRDDIQATINGLNLKLNDILTQISGN

SEQ ID NO: 87545 - protein, 473 aa, Unknown
  Obtained from environmental sample
  DOMAIN (342)...(423): Helicase conserved C-terminal domain
  misc_feature (1)..(473): Xaa is any amino acid
MRLSAARSMMEREDVIIVATVSCIYGMVTPDVYRKMTATCSKGETIDVDALIRRFVELQYERNDAVLDRGRFRRRGDTLEIFPAYMEEAYRVDLDWDKVERIRRFNPVSGEILEELDHALIYPAKQFVMPAEMVQNALGAIREELKERLEYFKANGKILEAERLKTRVEYDIEMLTEMGYCSGIENYSAILAGRKPGESPDTLVDYLPKEHLTFIDESHVTLPQIGAMYAGDRSRKQSLVDYGFRLPSALDNRPLRYDEFVDRLDKAIFVSATPGKTEIEQSARVVQQLIRPTGLLDPEIEVRPSEGQMEDIYGEVQKRIKAGERSLILTLTKKMAEDLTDYLSGLGLKVRYIHSEVETIERVEILTQLRQGDFDILVGINLLREGIDLPEVSFIAILDADKIGFLRSLTSLVQIIGRAARNAAGKVIMYADRMSEAMEKAIAETNRRREVQIAYNKNTVSLRQQLKRQSPTY

SEQ ID NO: 87546 - protein, 419 aa, Unknown
  Obtained from environmental sample
  misc_feature (1)..(419): Xaa is any amino acid
DDSISYAGGFPFRREVMADIVILLKELGVQTIAFDLSYLDESPYRLDPDYAAEEFERILNENFTMLNEASATVIDSIRPATSRSERELYKQDMKSLYRSVRGELETSLSLLTRDVDEYFAQALAFSDCSWLTLTMLRQDDIFEGGEVSANDEIDQFLADYIALDNVVDLNDRKTPDMAAVMPAIHKLMSRARGAGFVNASPDVDGLRRRINLLIKYKGKYYGHLALVALREKLGYTSIEASNKAVTLVKPDGGKLRIPRAMDGAMLLKWPKKSFYNYRIMSLIQLIQHTIIEPVFARNIDLMNDSGFFIYWDEGKSPWEYYLEAEEIKSSALAENDAANAQWLTARKNFFLSCETFLSGDYEDIILADVDDAETADFVRELFEACRGQFNRMAEIRKTAAVLQDSFCVIGSDATSMTDN

SEQ ID NO: 87547 - protein, 162 aa, Unknown
  Obtained from environmental sample
  DOMAIN (1)...(162): Amino acid kinase family
  misc_feature (1)..(162): Xaa is any amino acid
MVTVISLGGSIVAPEGADARFLKEFAELVRGLLEEDKERRFIFVVGGGGPARAWQNAYRAVCPGAVNNDEADWIGIMATRLNAQLVKAVMAEWCPQDVVTDPTVAGPISGRVLVAAGWKPGFSSDNDAVLLAGRFKAKTVINLSNIEKVYTADPRKDPGAKP

SEQ ID NO: 87548 - protein, 70 aa, Unknown
  Obtained from environmental sample
  misc_feature (1)..(70): Xaa is any amino acid
RDNVSFKASGGNSRIFKGAPIRFFEDLAKTVLSEEEIEILINAGSGSGSASAWGCDLTYDYVKINGDYRS

SEQ ID NO: 87549 - protein, 281 aa, Unknown
  Obtained from environmental sample
  DOMAIN (26)...(264): Amino acid kinase family
  misc_feature (1)..(281): Xaa is any amino acid
MNEISNNDRAAVLIHALPYIQKFRGKTIVVKYGGNAMINSELKTAVIQDVVLMSCVGIRVALVHGGGPEIEAMLKKTGKESRFVNGLRYTDAETMEIVQMVLCGKVNKDIVGLIQGQGGKAIGLCGIDGAMLKARKIQNEELGLVGEIEEVDSSVLHSLLDSGCIPVISSVARGIDDGQPLNINADTAAAKIAASLRAEKLMLMTDVRGILRDIQDPDSLIKTADREELARLKDQGIISKGMIPKVDCCTLALEGGVKNAHIIDGRLPHALLVELFTDEGI

SEQ ID NO: 87550 - protein, 970 aa, Unknown
  Obtained from environmental sample
  DOMAIN (36)...(77): Putative Ig domain
  misc_feature (1)..(970): Xaa is any amino acid
GTQGTPPIIITASLPNGTVGTTYSQTLKATGDTPITWGLESGVLPTGFTLYASGEISGTPTIANVYTFTVKATNAAGSNTKQLSITITTPLSNKTLVSIAVTTLPYKTQYILGEEGLRTEGMIVTASYSDGSTQPVTGYTISGYNKNQKGNQTITVTYQSKTDTFTINVIDPTKQTVATPTADPSGGMVTSDTMVTLSTATSGAEIWYTTNGDTPAKNGVGSIKYTSPFAVTPPLTVNAIAVKDGMNDSGILEAVYDATPIVKAEIEINAPTNGGTPATAISNEANDFTAGTITWLPSDSTFKSSTEYTATVTLTAKSSFTFIDWTEATVNGQTATVSNNTGETVMLTYKFPATSTKIVTNMTIKSQPINLNYTHGDTLDLSELVVTLAYNDTTTEDVTASNLWAYGITANPSAGDNLVRSVHNGKPITITYGSLSKTTANLTVNPKNVSALTIEEIQAQIYTGSEIKPVIIMKDGTATLRLDEDYIAVYTSNINAGTATVIIISTGDYNYIGSRTVNFTINKAYPLVTTWPTAAAITYGAALSASALSGGTNTPAGTFTWTTPSTIPTVANSGYGVTFTPTDTNNYNTVSGTVNITVTPANLSGDINISPSGTVAVNTQLTATYNGSETVSYQWKKDGNNVGTNSNKFTPTTKGNYTVTVSATNYNSKTSATVTVINTWIAVTDSKFGTTTITSIVYGNGKFVAGGSGGNIVGDIGKMAISTDGISWTAITQSILCTEVTSIAYGNNKFVAVSWDKMAYSADGVTWTAVRQNIFGSSDIIETIAYGNGKFVAGGHYGKMATSPDGVTWTAVNSTFGNYNTIFSIAYGNNKFVAVGNNGKMATSSDGTTWTAVGNSTFGTVIICAIAYGNNKFVAVGDNGKMATSPDGTTWTAVSNSTFGTSFIKSIAYGNDYFVAVGAQGKMAISTDGVTWTTVMDNTFGTSNIWAITYGNGKFVAGDENGKIAYLSDN

SEQ ID NO: 87551 - protein, 760 aa, Unknown
  Obtained from environmental sample
  misc_feature (1)..(760): Xaa is any amino acid
ANDPTHTHDWGGWTVTKDATCTAKGEETRVCTLDVTHKETREIAIDPNRHDWEQSAGTTPTCTETGSGKRKCKICNKEETLHVIDALGHDFGNWTVTTAATCTTEGTETGTCSRNATHVTTRTISALGHNYDTWIQTTAPTCKTVGIDTRICTNDATHKETREIAIDPNRHDWEQLAGTAPTCTETGSGKRKCKICNKEETLNVIPALGHDFGNWTVTTAATCTTTGVETGTCSHDATHKETRTIPINPTAHNWGIWTQTTAPTCTTAGIDTRTCTHNTTHKETRTGADAIGHDYGSWTVTTVATCTTTGVETGTCSHNATHITTRTISALGHNYGNWTQTTAPTCTTAGIDTRTCFHDATHKETRTGAAAIGHSYGNWTQTTAPTCTTAGIDTRTCTHDATHKEIRTGAAAIGHNYGNWMLTAAATEFEDTIETATCLHNATHTITRSIPDTRLPFTSIDRMGTWLISQPANTAATPYTVKLNVNESQPLDIYDVGEVLYNNITKYVSLDLSGSTFTSIGNSSFWWCENLTSVIIPDNVTSMGIRAFSDCTSLTSINIPNSVTSIGSGAFYECTSLTSINIPDSVASIGDNAFYNTVWYTVWLNSQPNGVVYMGKVAYIYKGTMPSNTRITLLDGTKGIAGSAFRDCTRLISITIPDSVTNIGAYAFEKCTSLTSITIPSSVTRIGDNAFGCSNITRVTFATGSNITVNNFGSDAFPIYDSSKTYGGNYLRAAYFSTSTSKEGTYTREANGFEWTWSQY

SEQ ID NO: 87552 - protein, 261 aa, Unknown
  Obtained from environmental sample
  misc_feature (1)..(261): Xaa is any amino acid
VVQTVTPSSGINAAQPTISVQPQGGAFFKTGTLSVTAASKDGGTLGYQWYKNTVDSTTGGTVISGATASSYTLSDLGTSYYYVIITNTIADNGDGGSKTAQTTSNTADVTVELVLAEWARTISAGKSYSEFNAVTVDASGNVYAAGYQEGTENIFYGPGVSAQGTYSRRNVVLVKYDASGTAQWARTVSAGSSYSYFNAVAVDASGNVYAAGQQDGSGIYTYGSGVSAQGASTSSNVVLVKYDTSGTVQWVRTVSAGIYSS

SEQ ID NO: 87553 - protein, 198 aa, Unknown
  Obtained from environmental sample
  misc_feature (1)..(198): Xaa is any amino acid
MLKRKFMQTLLEWKNSKGKKPLLVKGARQIGKTFIIREFGKQNYKSIVELNFSLFPQYKVFFEGNLSVDEICRKISINKKFEGVKFITGETLFIFDEVQDCGDARTALKSFAEDGRYDVIASGSMLGVAYKQIRSIPVGYESQVEMFAMDFEEFLWAKGFDDEKINIYKSYFEKKTNVEPFFNDKMFELLREYMIIGG

SEQ ID NO: 87554 - protein, 498 aa, Unknown
  Obtained from environmental sample
  DOMAIN (329)...(451): HD domain
  misc_feature (1)..(498): Xaa is any amino acid
MASATELVVDENKIKKAIKSALPLTITTYTLPKEIEVYLEQVIGVFLKHTNQLKLKDYIVYCVQELVVNAKKANTKRVYFQERGLDINNPDDYKEGMLKFKEDTLSNISHYLQLQKKKGLYIKIILQIKRNTINIEIRNNVQATKTEQIRIQDKLARSRQYKSLEDALNQVLDDAEGAGLGLVILILMLKKIGLADEAFSIKTKEKETVASISIPLDAAMIENLSELSKAIIEDINSLPQFPENVLMVQKLIADPASDMASIGRQISMDPALTGDLLKIVNSAQYMLSKKVENIQDAVKMVGIKGIKNLLYSYGTQKVLGDDTVDKKTLWEHSYKTAFYAFNLVKNFKNEPGLLDDVYVGGILHDMGKIIFSNVHPDLLNKIKSFSAERNLPASTFEDLSAGMNHAELGALIAEKWNFPPRLVSAIRYHHEPDAVPDDLKNMVDAVYLANMFCEYENKNVSFDQFDAGALENYGLSSKKKLNTILGRFQSGFKKEMKI

SEQ ID NO: 87555 - protein, 282 aa, Unknown
  Obtained from environmental sample
  DOMAIN (125)...(205): Sigma-70 region 3
  misc_feature (1)..(282): Xaa is any amino acid
MKKKEEKKAKPEESTIAIFLREISNIPLMTREEEEITARAAAEGDKAAREKLINANLRFVVNIAKKYQGLGLPLEDLIATGNLGLVTAVDRFEVDKNNRFISYAVWWIRQSILSALSEKTRMIRLPVNRVLELVKLEKAKKMVKNQNSAEKEIAELLNMERDHVVELLNISRDIVSLEIPVSRHTDSMLIDLIEDRKYTIPDKVAEQNAMEADIENALNTLDKDEADIIRYHYGLGHRKPMSLKEIGIVFNLSKERIRQIEAKALARLKNPLRSKNLRVYVA

SEQ ID NO: 87556 - protein, 183 aa, Unknown
  Obtained from environmental sample
  misc_feature (1)..(183): Xaa is any amino acid
MKRYLFISLLLITVLACTGAQQKTPQPAAELSFSYTRLSGSASNQFAVWVEDAQGKFIKTLYATKYTATGGWKRRDTSIPIWVKKSNLANLTGAQVDAITGATPKTGTLVYTWDGTDSSGKAVSTGNYVLFLEGTLRWENQVLYRAPISLGKEIMSWEVSAEYKGDATADRAMISDVKERTLR

SEQ ID NO: 87557 - protein, 297 aa, Unknown
  Obtained from environmental sample
  misc_feature (1)..(297): Xaa is any amino acid
MKRKVFLAVTLFAFMAVGVYAQTEADFGVSKSADGKSITIDEYKGKATAVNIPAKIQNLPVTKIGDQAFGTSQITSVTIPNTVTSIERGAFSTCAYLTSVTFQGTIPASSFATNAFGSGRITLGDIRDKYLAAGGGAGTYTRPDDNSTTWTKSASATAAPVSAGTTLLAFTAINSNKEYSVNKGTFSQGDVVIPASYNNLPVTAIDNAGFTGLIIRSLTIPNSIKTIGINAFANCVMLTSVTIPSSVTSIGNNAFINCDSLTSVTIQGTIPANNFFGFDGDLKTQVPCRRRRDLHET

SEQ ID NO: 87558 - protein, 140 aa, Unknown
  Obtained from environmental sample
  misc_feature (1)..(140): Xaa is any amino acid
MSRNWFEDAIFYHVYTFSLAQAPFQNDYAFQGHALSEIERWLPHIKRLGCDAVLFSPVLKSRSHGYDVTDYFNVDNRVGTNDEFRALVQAFHKKGVRVVLDSVFNHCGRDFFAFQELRNGNRGYAGWFSGVDFTCQALWA

SEQ ID NO: 87559 - protein, 678 aa, Unknown
  Obtained from environmental sample
  DOMAIN (585)...(672): Hpt domain
  misc_feature (1)..(678): Xaa is any amino acid
NAIAKQNLQLIEANKKAESASRAKSDFLAKMSHEIRTPMNAITGMAELLLRGELSSEARGYVQDIKQAGNNLVSIINDILDLSKIEAGKLEIVSAKYMLSSLINDTVNIIRTKFKEKPIRFFTNIDGDIPNSLIGDEVRLRQILLNLLSNAVKYTDKGCIGLTITMEKQDDKNVLLRMDVSDTGKGIKPEHQEKLFDEFVRVDTKKNQGIEGTGLGLPITKRLCAAMDGKLIMESEYGKGSVFTVIIPQGVESEERFAAVEEPEKKKILVYEGRTVYAKSVCWSLEKMKVPYTMVSNQNEFASALYSEEWFYVFSGYGLYEKIKPLMEQENSFFRGRKKPNLALMAEWGAEVFISSARFLSIPVQSLSIANTLNGKADRQNYFETSGVIRHSFTGARLLIVDDIPTNLKVAEGLLSPYNAKIDTCLSGAEAIELVKKNKYDLIFMDHMMPDMDGIEATAIIRKLEKENEVSGNNGKQIIIVALTANAVVGMKEMFLEKGFNDFLSKPVDVSKMDEILDRWIEKRTMSNEQLAMNNDKLTINNEQLQNKNTNCSLLIDHCSLPIIPNVDTAKGVAMVRGSLKAYMNILSMFCKDVDERLPKLQIIPKEDSLPAFIIQVHSLKSVTASIGAKEVSAKAAGLEAAGKNADLAFISGYLPEFTEQLAEVVKNIRAAITSPST

SEQ ID NO: 87560 - protein, 304 aa, Unknown
  Obtained from environmental sample
  misc_feature (1)..(304): Xaa is any amino acid
MLISFETASQLIESGRLLHIAGTEALLKKLPKGKWIGGSTEYFMAKEGGKVSGDLLFVTDFSKTKSVYEKFKIQSYDEKDICKVSSDAYENGFRILIVPFDSAVHKEYAQNAAGYKNMFMRHIAGWISGMNLEKQGQTPVAVNGLTGEVFSDKAVALHLQTQEDKTVSVNIINIFEQDTDSPVIEFTEEGFHVKKCLVNGKELVFADYIAENKIDTKMPIVGDYSGSGVNISFKSIENGVVNFYAPVFQGIKYRIAKPVSDYVALFNKHISEHTDDTSAFSLYCILNFLYAHLENNKIEAFAGP

SEQ ID NO: 87561 - protein, 195 aa, Unknown
  Obtained from environmental sample
  DOMAIN (3)...(193): Beta galactosidase small chain
  misc_feature (1)..(195): Xaa is any amino acid
AEFDFVQEQKNIPPIPGKIAYAFDASGKITIAFSIHVDYSIDAIPRAGVELILPDGFEDLEYYGYGPVENYPDRLLAGILAVHRSTVSGEHFPFVPPSETGGHEKTRWLKIARPSGGHIKISSATPFHFDALHSTTEDYFSTAHDHELVRRSETFVHIDAAHGPIGSEMAWSTVMPADYALGGGSYSLEFEIDIN

SEQ ID NO: 87562 - protein, 457 aa, Unknown
  Obtained from environmental sample
  misc_feature (1)..(457): Xaa is any amino acid
MDGNAFKMGVGLTAADDEVIREYRYRQYAFVYDAVNPKVVIDTPVKKPVQTYGKNFTTAFILGGYISDANLEKNATGDYYFDYYLNTDAKKTFVLKPMTGVNLNIPTAVDLAGNPVPTPPADSALVPGQHIYAITRDPNGKITVYFRIAASEVTNNTNGIIPANRFNSLPEGQHTLTLWVTDKSGKDGLDSVDFIKDTQPPKIAFTNLTGDNRPYDTTNKSKVDKLDAGTVRSWWNKNRQDRQTLLFGANALPLTTISYIKGTNVPELRGTITDLVSIIDLSVINSSPNTNTLTGHDGTTVIKAEDVGTGDINTSASKFRYWIDNEYQLTNGNPPDGRFLALIDGAGTKNVRWTINLTSDGTTKGTPLYDGVHTIVLTAADSAGEPIVEADRYMIAFRIDSEEPRSAVTVTGIDITKNDVVYGNVAYQNDPMFTLTVAGDDANLKEIKLRIKIRQQA

SEQ ID NO: 87563 - protein, 542 aa, Unknown
  Obtained from environmental sample
  DOMAIN (86)...(317): Glycosyl hydrolase family 3 N terminal domain
  misc_feature (1)..(542): Xaa is any amino acid
LLSLPVFSFSFDDSGDINELALRLTNEMSDEQALAQTFMLGWVGAEPSPLILDWIRNRNIGGVKIFGWNTEDTRKLAETVGNLQKNALASGLGIPLFVATDQEGGLVRHVKGATSETPGNMAIGASGRPMDAYLSGYYIGRELSLLGINMNFAPSVDLYTNRDSTLIGPRSFGSDPVQAGILGAAFAKGHKEMGVIATAKHYPGHGDTDLDSHGVLPKIYASFDLLWDRELLPYRLLAKEELPAIMSGHLAFPNTQAGATPASLSTWFLKDILRDKISYKGLIITDDLMMNGATEFAGSLSRAAKQALLAGNDIIMLSKTPSLNDSVWTYLISSMENEPEFRERVRDACRRILLLKLEYLRGEKKVPFIPDLKKVDDGLVDPEGTAFFLGLAARSVTLVDSRDVFPLSPERAGRVLLAGNFTDFFTYGKKAFPGAVSYWYDTTQAATEIISYARNVDTVIFCLSSKAGIRIIQQLRGLNKRVIVFSVLSPAYLDDVSWADGAVAVYSYAPESFIAGFSAILGRIKAEGKLPFALNTRSSSGN

SEQ ID NO: 87564 - protein, 249 aa, Unknown
  Obtained from environmental sample
  DOMAIN (1)...(220): Pyridine nucleotide-disulphide oxidoreductase
  misc_feature (1)..(249): Xaa is any amino acid
VRLQAEGFGAKFLIEEVKTLNKEGELFTIALASGKTLKSPAVIIATGAKHRTLGIPGEKEFSGRGVSYCATCDGPFFKSKKIFVVGGGDTACVEAQYLSHLSNQVVLIHRREKFRAQKALADRVLHNPSINVRFNTVMKEIRGVAKVASVLLEGNGTSGEENADAVFIFTGIVPQTSLVSGANGGLKVELDEAGYIVTDQTMASSVPGLFAAGDVRTTPFRQVVTAAADGAVAAHCAAAYIDSLRGESY

SEQ ID NO: 87565 - protein, 61 aa, Unknown
  Obtained from environmental sample
  DOMAIN (1)...(49): DNA gyrase B subunit, carboxyl terminus
  misc_feature (1)..(61): Xaa is any amino acid
MNPDQLANTTMLRETRVLKQCCVEDAIKADQIFSMLMGEEVEPRRRFIEENAYKVLDKLDV

SEQ ID NO: 87566 - protein, 462 aa, Unknown
  Obtained from environmental sample
  DOMAIN (1)...(238): Glucose inhibited division protein A
  misc_feature (1)..(462): Xaa is any amino acid
MFTGLDKVSIGGRVNEPSSDLLPESLGKLGIKTRRLKTGTPSRIDAASVDFSECEIQTGDANPWAFSSKTDAKNLCNSAKCYLTRTTKETHRILEAAFEKSPLFTGKIQGLGPRYCPSIEDKIKRFADKESHQLFLEPETKEANRIYINGFSSSLPEEAQIQAMHTIPGLKNARVLQIGYAVEYDAIHATELHPTLESKQHCGLYFAGQVCGTSGYEEAAAQGIIAGINAALKIKGKEPFILSRAESYIGVLIDDITGMEWNEPYRMFTSRAEYRLFLRADNSEQRLCEKAHKAGMLSGEEWKNYEEEKSRVEEARKFLSENSGEPEQIAPILAESGQAQVAEKTRWLSVLKRPGVKAETFFEIAAPHIPLTRKEKWHLLSEELYSGFFVRAKEEIANLQKMANLKIPENIDYSKISALSIEARQKLSAAKPLTLGAAAKVAGVRAGDIAVLRFLLNTDNRI

SEQ ID NO: 87567 - protein, 249 aa, Unknown
  Obtained from environmental sample
  misc_feature (1)..(249): Xaa is any amino acid
MKAFIAAALLILIIGNIQAVDTDSYRFIDHLRTLSQPGKPEIFEDGVLFTAPSSYRRVGISFAHEGYAKVYWFKQLLIPKDTAELYLNGKRIKGVDPNIDSGILFHIETIPADLRYLDYRLIIDGLWTTDPTNPISVTGPSGIMESRFPLPEKPKPYLDAVQPGTYRFVYRSDPGELITVGGSFNNWDPFMYELKEISPGFYTLTLPLPPGSFQYLFYHRGEQFTDPENSMRLYNREGRAVSIGQVAQP

SEQ ID NO: 87568 - protein, 151 aa, Unknown
  Obtained from environmental sample
  DOMAIN (4)...(151): Peptidase C26
  misc_feature (1)..(151): Xaa is any amino acid
MEQPIIGVIPLWDEKKDSIWMLPGYMQGLEEAGAVSVVLNLTISETVLKQTACFFDGFLFTGGHDVNPKLYGQEKSCYCGEICDIRDQMEAYIFREAVLNQNKPALGICRGIQLFNVLLGGSLYQDIPAEFPGKIDHIKGPPYDVPAHNVR

SEQ ID NO: 87569 - protein, 351 aa, Unknown
  Obtained from environmental sample
  DOMAIN (132)...(240): Miro-like protein
  misc_feature (1)..(351): Xaa is any amino acid
LPEGKSGAKRSFRAKKPTYNRKEKELEMEEKLRQTRKKITYVANPVPKSIEIMEMISVSELARKMNLKASDLIQKLMKLGMMVTINQQIDADTATILAAEFGADVKIISLYDETIIDTGTDEGADMLPRPPVVTVMGHVDHGKTKLLDAIRKADVVSGEFGGITQHIGAYMVETPHGAITFLDTPGHEAFTRMRARGAQITDIVVLVVAADDGVMPQTIEAINHAKDAKVPIIVAVNKIDKPEANPDRVKSQLSELGLMPEDWGGQTMFVELSALQKTGIDKLIEAILLEAEILDLKANFQRTAEGKILESKVDHGSGIVATVMIEKGTACNRRFICRRYLARQSPRHSQR

SEQ ID NO: 87570 - protein, 231 aa, Unknown
  Obtained from environmental sample
  DOMAIN (25)...(154): RDD family
  misc_feature (1)..(231): Xaa is any amino acid
MEKNNRFDPSLETLTPEGVKFVLSPAGPLVRTLAYGIDKITQWIILTTISVAGIFLHYTTGYWLILILNFCVDWFYNIICELAFRGQTLGKKITGIRVIRNDGSPVDPSSSFLRNLLRFADTFFFFYPIALISIITSRGFKRLGDWAGGTLVVYSQRSARSPRNITNFLSNYNPVVLQTPLSHDERQAILDFARRYHLLGKSRANEIAGIYAPYIRKGESDIDDAAYLWEC

SEQ ID NO: 87571 - protein, 102 aa, Unknown
  Obtained from environmental sample
  misc_feature (1)..(102): Xaa is any amino acid
GAIGLSAASFFELGDFPFWIIALIYIPLGVLFFFPAHFAFNFGRKIRNYRFSNSIEDLELAFKNNKSLWKFYGIICIIYLAFIPLFFVIAIIGGVAAAISGF

SEQ ID NO: 87572 - protein, 457 aa, Unknown
  Obtained from environmental sample
  misc_feature (1)..(457): Xaa is any amino acid
FQVSEHYRRYPITVENTEYTSPEGKRLHFKGLKNFQVDNTYRDLYLKEAEGIISGKGGLLADDGRPVTRHAYGATLIAAAVTEDYWFGIQIGDGKLTAFYPDGSYEQVVPWDDKCYLNVTTSICDDDAAERTRVYVKKRNGFAAAVDAIGAIKRLEDNRPMPSAVFLNSDGVDDSFPIEENMDHMAKKFYYSVLRMFIENEADPAKGWEAAVKELADYLPDLSKRGSGDDISVAGIVDMEAVKAEPFREALRKAKIEAEERRERERKEREEAIKMAEEARAKMEEEKKAAEEAAAKKEEKKAEDLKAAQEKKAAEEAAAKKAQEKKDEDLKAAQEKKTQENGGKAITDDYSASNGSANNGAQRISPDSLKQSAADPLVQEKAKQFKKLQKAEEEKVRELYEIQQVKNRTGIELAEAVQSSLQKKTEEDDIDIPSSDANKVQSPKYEPGTNVTSKLNN

SEQ ID NO: 87573 - protein, 675 aa, Unknown
  Obtained from environmental sample
  DOMAIN (51)...(159): TonB-dependent Receptor Plug Domain
  misc_feature (1)..(675): Xaa is any amino acid
MFSILHKTVKFFPVLVLLIFSLCFPNYIKGQSIESEDELSFSNEEGITVTGTIQTSQQMSVIEKNEIEHRNAPDIATLLQETLGLNITRYGTYGSMTLLNLRGLDTKRLAILIDGVPVNSSMDGKFDIEQIDLNSIERIEVIYGGSDSKFNVSGAMGGVINIVTVKKQPAGLRLGASVSNTSVLPGEYRGRNGQTQGPNWEDLADTQNFDISAAYGGSKISISANVFANRAENHFLFIDRYNYTRRKDNNEVWDAGGSVSVTGELPDLLKLIASSHFYYGDKNVPGSGFSDNVGKQQDIFSRNNVMLDMPRAFHDDLAAEASLGYSFNRRNYTSSADIFSRHDQQNFTVINRWSWETNDKLTLKSGFDYRFIYLDSTDIGRRDRQDGGIYLTAEYKPVNQFMLIPSVKTVFTNKGGALFTAVPKLGLLWNVNDSLAFRNNYFRSFKFPDFEELYWSDGGAAFGNVTAFGSVGNPDLKPEDGWGADIGIIWRYKHLINFESAFFTHRLKDSIHWYQRANGIWRPENVGDAMFFGLDNKLRFEIPVNLGKIKKIIPSVSYKYLLSYLLSFGYDFADNKRIPYSPVHTLGGSLEIPWDTGSVIINGHYESERYNDRANIIKLKQYFLLNANISQKIGKNITAFAVLRNILNESYESFIDYPMPGFTVTVGLRANLEIK

SEQ ID NO: 87574 - protein, 833 aa, Unknown
  Obtained from environmental sample
  DOMAIN (528)...(767): Torsin
  misc_feature (1)..(833): Xaa is any amino acid
ASGSASERDGIVAPLVERIGADISRLAADVEALLKQTPKAYGEAVQLHFSSAASKILAKAETEAAALKDEFVSTEHILIAISAGEGKAAELLKKAGVSKKAILDALRQVRGNQRVTDQNPENKYQVLERYCRDLTALARQEKIDPVIGRDEEIRRCMQVLSRRTKNNPILIGEPGVGKTAIVEGLARRIVAGDVPEGLKDKKLLALDLGLLVAGTKFRGEFEERLKALIHEVQAAEGKIILFIDELHTLVGAGAAEGATDASNLLKPALARGELRCIGATTLDEYRKHIEKDAALERRFQQVYTAEPSVEDTIAILRGLKERYEVHHGVRIKDEALVAAATLSSRYITSRFMPDKAIDLVDEAASRLKMELDSRPTELDKLERKLLQFSIEKQALSREEDPASKERLAKLEKEIADITAERNAMKARWEAEKVDIQGIRELKQRIEELKIEETRYEREGNLLKAAEVKHGKIPEAQKQLAALANLMEKKREQAGCSGGAALLREEVSEEDIAAVVSAWTGIPVSKMLSGEMQKYLELEKALERRVVGQDQALAAVADAIRRNKAGLSDAAKPLGSFLFLGPTGVGKTELAKTLADFLFNDEKALARIDMSEYGEKHSVSRLIGAPPGYVGYEQGGQLTEVVRRRPYSVVLFDEIEKAHPEVFNVFLQILDDGRLTDGQGRIVDFKNVIIIMTSNIGSDLILEEENTGAIRDSLLELLKRNFRPEFLNRIDETVIFNRLGKNEIGKIVEIQLARLSQRLAERKITLNTSRAAKEFLAERGYDPMYGARPLKRTIQAELENPLAKFVISGKIHEGDVVTADKKGEGLEFQVTGNR

SEQ ID NO: 87575 - protein, 296 aa, Unknown
  Obtained from environmental sample
  DOMAIN (20)...(259): Putative transposase, YhgA-like
  misc_feature (1)..(296): Xaa is any amino acid
MAATNDENQAQDAGGQNLKHDESYKSVLSNAVNFLHFLKKYIAAPWTADISADDIATVDKSFVTPEYSEIDSDLIYKLKIKGSDVYFYVLVELQSQVDHTMPFRLLRYMVELLNYIFKNTENDIRERKGFRLPAIVPIILYNGEDNWTAVRTFREYTENYEIFGDNIINFQYLLFDVKRTDEATMLSTKRILDAVFLLDKWRLENKTSTKDVEAFLEKYLPDLPEEDALELFRWIKHILYKGNLSPESEETFRNLLKGGKTMKHALEIWRDEMIDVATLEGELKGKREGKREKAWK

SEQ ID NO: 87576 - protein, 144 aa, Unknown
  Obtained from environmental sample
  DOMAIN (16)...(138): Uncharacterised P-loop hydrolase UPF0079
  misc_feature (1)..(144): Xaa is any amino acid
MTAETVKTTTSSADETRRLGAKLAKTARPGDVFSLNGNLGCGKTEFVRGFVEALSTDVPVRSPTFSIVNTYHTPDFPIHHFDFYRIEDVREFASIGLDEYINGDGVCLIEWGDMYPEVLPDTTKRINFTEIDETTREIETLFEF

SEQ ID NO: 87577 - protein, 425 aa, Unknown
  Obtained from environmental sample
  DOMAIN (194)...(259): His Kinase A (phosphoacceptor) domain
  misc_feature (1)..(425): Xaa is any amino acid
VAAKTYDYRVKIVESRQPLLISISVLLVCVVGLMFVLLKRRFDAGRRLEALIEERTAKLHSQNNLLEAVTNNYKGIIWSIDTKGTVTLFNGRSLKKLGIDRSLFMGQNMEYARQIDYRVSKVLTAQKQMFLGDGPHEWINEVDGETYLSNTVPIRDAAGNVVGITGTTDNITEIVRLNKELETALEAAEAASRAKSAFLANMSHEIRTPMNAIIGFSELALDCEISEEAKGYIHKVMENSNGLLQIINDILDVSKIEAGKITLENITFDIHEVFALCRAATMPMAMEKGLKLHFYAEPFIGRMLVGDPIRLRQIFINLISNAVKFTNVGVVKVLSTVIATDVGTISLRFEVKDSGIGMTAQEMERVMEPFTQADHSTTRKYGGTGLGLSIVRNLVDLMGGKLHVESTPGIGSKFSFDLTFDTVDT

SEQ ID NO: 87578 - protein, 540 aa, Unknown
  Obtained from environmental sample
  DOMAIN (110)...(539): Glycosyl hydrolases family 31
  misc_feature (1)..(540): Xaa is any amino acid
LTGNNGKSTGFLVDNEKTFVKEELNLSVGEFVYGLGERFGPLVKNGQTVDIWNADGGSASEQAYKNIPFYMTNKGYGVFINDTGKVSFEIGSEKTSRVQFCVSGEVLEYFFIYGPEPKKILELYTALTGRPAMPPEWSFGLWLSTSFTTSYDEKTVMSFINGMEEHKIPLSVFHFDCFWMKGFNWCDFTWDKEVFPDPAGMLSRIKAKGIKICVWINPYIAQRSCLFEEGKKGGYFLKQKNGSVYQTDQWQAGMAIVDFSNPGAVKWYLSYLEKLLDMGVDCFKTDFGERIPEDAVFFDGGDPERHHNFYTYLYNKSVFELLEKKRGKGEACLFARSAAAGCQKFPLHWGGDCESTFEAMAETLRGGLSLGLSGFGFWSHDIGGFEGVPNAALFKRWLAFGLLSSHSRLHGSYSYRVPWNVDEESAEVCRFFTELKSRLMPHIHEAAREAHEKGIPALRAMFIEYPDDPACAYLDRQYMLGSKLLAAPVFSEDGEVTYYLPEGGWKQYITGEKVKGGRWITEKHGFFSLPLLKRYRAAIN

SEQ ID NO: 87579 - protein, 266 aa, Unknown
  Obtained from environmental sample
  misc_feature (1)..(266): Xaa is any amino acid
GYRDTSQDAMCVVHSNPKKCRERLVQLLKALVSEGYGLHLFEPEWFEEKKETGFRNPTLGAVPDRKSRIHGVENACSDDALWLVSSIVEYIRETGDAAFAHMVLPYADAEAKPESVYEHCKKILNFSRRMTGSHGICQGLRADWNDCLNLGGGESAMVSYLFLWALDNFVRLAEFLGKTEDAAAYKTIHEKTAEVCRKALWDGKWYLRGFTGKGRPIGTDADAEGKVHLESNTWAVISGGDDPERGKQAMDSVEEYLGTPYGLSST

SEQ ID NO: 87580 - protein, 182 aa, Unknown
  Obtained from environmental sample
  misc_feature (1)..(182): Xaa is any amino acid
MNQTQAENEIKVFLASSSELDIERAHVGDLCNDINSLIADTAVRVRLLKWEVFDPLFKGERKQSEYDRQVKKADIFIALFRSKAGKFTLEEVDVAIAAHTQNQRPQELYCFIQDWQGERELDADELKTKLSANYVTDSFADIKDLKLKLIKILIPRLNACGVAVTETDKFIQIGSVNILRKP

SEQ ID NO: 87581 - protein, 458 aa, Unknown
  Obtained from environmental sample
  DOMAIN (1)...(151): NAD binding domain of 6-phosphogluconate dehydrogenase
  misc_feature (1)..(458): Xaa is any amino acid
GISYGGLNRTASKWTILFPDARRAGKSRGCKTLEELAGALSKPRKAMIMVKAGQAVDETIGKLLEVFEKGDIIIDGGNSNYQDTMRRTSYVESKGLLYIGTGVSGGEEGALTGPSIMPGGSPDAWPQVKKIFQAISAKAEGDTPCCDWVGENGAGHFVKMVHNGIEYGDMQLICETYDLMKNVAGLSCEEMGNVFNEWNNGPLGSYLIEITRDILRYKDEDGKPLAEKILDTAGQKGTGKWTGIAALEFGVPLTLIGEAVFGRCLSAAKDERVKAAKVFSTPKITSPSDKAAFIKDLEEALYASKIVSYAQGYLLMREAAKEYKWNLNYGGIALMWRGGCIIRSVFLGKIKEAFDKNPNLENLLLDPYFSKTIKEAGESWRRVVSTAVLNGIPIPALSSALSYFDGYRSERLPANLLQAQRDYFGAHTYERLDKPRGEFFHTNWTGHGGETSASTYTV

SEQ ID NO: 87582 - protein, 344 aa, Unknown
  Obtained from environmental sample
  DOMAIN (55)...(332): Glycosyl hydrolases family 18
  misc_feature (1)..(344): Xaa is any amino acid
MKCFTKILILFLLLSLVSCKSTPPKTEIDNDNEVIADLPISLPEPGKPLPVSAFGEIWGYVMTGREEALTDNLPLSDIGYFSAGIDSYGKLTDVPVRSKLKFPGRVHLVVVCDSRSLTHFVLIPGSSHRKELIADLLSATKDYDGLQIDFENIPSRDSDTFFSFLKDLRQGLPANKKFTIALPARNKKVNNDQYDYEKIKPYVDRILVMAYDEHWSGSKPGSVASMKWCKRVAEYSINVIGKEKLIMGLPFYGRAWGDYTPSRALIYPTTEKIINEHNVEEIRRENGIPIFEYTRNVKITVYYEDAYSLCARMDMYKTMGVASIGFWRIGQETAEVWNYLKLEK

SEQ ID NO: 87583 - protein, 236 aa, Unknown
  Obtained from environmental sample
  DOMAIN (56)...(235): Glycosyl hydrolases family 18
  misc_feature (1)..(236): Xaa is any amino acid
MRCFLKIFTIFLLFSLFSCKSPPPIVVDVENDDEVIEELPVSLPEPGKPLPISSFNEVWGYVVVGRESGLASNLPVSDVGYFSAEVDSYGKLVDIPKRRNLKYTGRVHLVVVCNSRSLTHFVLLPGSSHRRELIDDLLTAAKDFDGLQIDFENIPARDSDAFISFLKDLRSGLPPDKLFTIALPARTKKISEDQYDYEKIKPYVDRIFIMAYDEHWSSSKPGSIASMSWCKKIADY

SEQ ID NO: 87584 - protein, 376 aa, Unknown
  Obtained from environmental sample
  misc_feature (1)..(376): Xaa is any amino acid
MEIKEYKCPNCGGTVNFDSSSQKMKCPYCDTEFEIAALEEYQKEIATAKDNFGWAKEEAGGEWEQGELEDLSSGSCPSCGAELLGDANTVAMVCPCCGNAQIVSKRLSGFLKPDYVIPFKLEKENAVKQLKNFCDGKKLLPDFFIKENHINNVQGVYVPFWLFDAEASGRVCYKATKSKKATDYIKTEYYSVVREGNIIFEKIPVDGSEKMDDKYMDAIEPFDYAQMKDFDTTYLAGYVAEKYDVDAEKSKERAARRIKASVEREFEYSVVGYDSVNLESSCVSVREGKCSYALFPVWILNTKYKEVNYLFIMNGQSGRLVGKLPIESKKIWKYGFIYSGILGPILTAASIGLGYDDPNFALFLAIAWVLALIMGF

SEQ ID NO: 87585 - protein, 392 aa, Unknown
  Obtained from environmental sample
  misc_feature (1)..(392): Xaa is any amino acid
GQKKSSKRSSNTKGEDNIISNGSGIVVNKGQAVLIIDNGRIAELCAEEGRYTFDQSSEPSVFYGGLGKGIVEIFKNVGERFKYGGQPGKEQRVYYFNTKEIMGNKYGTPSPIPYLIVDPNINLRLTISLRANGEYSYHIMNPIAFYGNVTGNVEDVFTRDKIDSQLKSEIITVLGPSLAKLGAGLEYHMISAQTDKLAEILNEALTAKWREGRGIEIVNFGITCTATEEDENRIKQLQTAAVMRDPTMAAASLVNAQSDAMRTAAGNTGGAMAGFMGMGMANMAGGMNSQNLYAMGAQQQQAPQQAAAAPAGGWTCACGHAGNTGKFCAECGKAQPTAAPAGAVWDCACGHKGNTGKFCAECGKPQPTAWDCSCGQKGNTGKFCAGCGNPRP

SEQ ID NO: 87586 - protein, 48 aa, Unknown
  Obtained from environmental sample
  misc_feature (1)..(48): Xaa is any amino acid
MGLLKAAMGSAGGVLSDQWLEFFICESLDANVLATKVRRKTAKEVAIQ

SEQ ID NO: 87587 - protein, 249 aa, Unknown
  Obtained from environmental sample
  misc_feature (1)..(249): Xaa is any amino acid
SGHRLSGISVDGSPVHYSSLNDIFPKEITGVETLDLYTSSLVELTAESLLCLIKDAETFVNLDFNEKETFFTNWKESVHANFINEQIPDLYSAFIKSFGENEINPRVVISMTEERLREIKDPMNEFVKIQPLLEETCERLVNLALDIQTGKDSRAAQTIQLFSGISEKIIRIVKQFGIQGFMSDETNGEKPLIKIMGEFGELINELTDAYERHDTVLVGDIAEYEAAPKLQELYSSIIKKSRQPAQAEK

SEQ ID NO: 87588 - protein, 659 aa, Unknown
  Obtained from environmental sample
  DOMAIN (282)...(349): Elongation factor Tu domain 2
  misc_feature (1)..(659): Xaa is any amino acid
YPKAETVESGKTTSDSSPEEIERKISIYAAMGHVERNGTKINFFDTPGSSDFAGNVILSFRASEFALLMVDGRSGVQIETVKLWRNLDAKKKPRGVFISKLDNDQTDFNKALADVKEKFKMEPVPVTIPMGAGGSFKGVIDVLHDKAYMAGGDGVEKEGPIPDEFKDAVAAAREKLIEAAAEGDDTLMEHYIDKGSLSPEEMKKGLIEALAENKYIPAFAGAALKNSGVVPFIDFIADAGPNPRTAKDTVLDAENKETELPLDPDKPFSALVIKTTYDQFSGKLSWVKVISGKLAADTEAYNVSENKKERIGKIYTCQGKKLEEVRELFAGDVGIITKSATLKTNDTLAATDNSLNFVPLRLPEPVHSVAVNAIAKKDDDKLGEFLVRAAEEDKTFNYHYNTETRETVISGMGELQINIILERIKANQKIEVETRVPKVAYRETITKKAGAEYTHKKQSGGHGQYGKVVLEIAPLPRGEKYQFVNAIFGGAIPKNYIPGVEKGVVEGMAHGTMASYPVVDVEVKVVDGKYHPVDSNELSFKLAARNAFREAMKQANPTLLEPIMNLTVFVEEKYLGDVMSDLSGKRGKILGQDSAGGIAEIRAEVPQVELLRYSIDLRSITSGTGSFSVAFSHYAPISGRIADEVIKARESFKVQEADE

SEQ ID NO: 87589 - protein, 397 aa, Unknown
  Obtained from environmental sample
  DOMAIN (160)...(283): HD domain
  misc_feature (1)..(397): Xaa is any amino acid
VETDGELVVAAQNNKKVPGGDNPKAQESADKMSSDKLSGGKLPIDSLSGGEESVSKMSGDGMSLDDSFVGMQSGGKSSGSRKKSSSMISLPEVQEGNEVYRSYLNLIERLGEVCNNIASSVAMEARSIDNISGRLLQSVREERNSYIGYILGGEIKGHNMAKSLVNSAILSALIAMEMKIPNHKVLQIVTGALLHDVGMLRMPKEIVEKKGGLSESELQRIQAHTLYTYKIVNKELLYPEEVGLIVLQHHERWDGEGYPRRLSGTAIDIGARIVSVADAFEAMVSKKPYRNSMMGYQAMKNLLSDNLRRFDPDVIKAFIQTMGIYPIGSIILLNNGALGRVVDVQASAPLRPTVRILADEFGHFFKNDSGDLLDLLIEKSLFIARAVDPKEVADKDF

SEQ ID NO: 87590 - protein, 331 aa, Unknown
  Obtained from environmental sample
  misc_feature (1)..(331): Xaa is any amino acid
MASQLKASVELSLNDKLSGGIENAGESVQEFKEKAVSAAESVDRGMENAGDAADEFKGKADSAAKSVDRGMKDAGKSTQGFKEKAVSAANAIDQAFSTVGAKIASLGVAVGGMALMKSSIDYEDSIIRIGTNAGMSGEAVNRFRRDLLAIATEAKVPVQELVQFGQVVTDNSISLDAASEGMRFMADAMQGLGISGQEAGDIFSVLVQKGASIDIVKQKLNNLAEIDNRLQGMGLAEFTKRLPELMTASDVTVDNIEDLYISILTLNNGVSSKKAITEYTTAMQTFANKRDAIRQKLKGFDVKNENDELKSFEEIMTALVERSKEIGGLDN

SEQ ID NO: 87591 - protein, 312 aa, Unknown
  Obtained from environmental sample
  DOMAIN (3)...(310): Bacteriophage Mu tail sheath protein (GpL)
  misc_feature (1)..(312): Xaa is any amino acid
MPIPMRQIPANLLVPGQYQEIDNSLAGAQSDIKKALMIGYKLPSAEAESGKPLNVLEGFKAHQLFGYGSPAAIMAETFLALNKVEELYVLPIPEPEAGTAWKKRFAVSASSAEPGAVVITINGQAFEAAVAAGADAQAVAAAIVARINSELTLPVIAEVDTETPESIIVMCNVKGIIGNSNSVSIESTAPGVSVEEGVTTAGTGVTNIKPFLNGLGETRYNFFASDFSDAGSVKYSSDELESRFEAIRQIGGRMYIALTGPLGSKTEAGSMLYKAKDVNSPHIILLPRSDNPDLPCAWAAAWCAVACRILAD

SEQ ID NO: 87592 - protein, 128 aa, Unknown
  Obtained from environmental sample
  misc_feature (1)..(128): Xaa is any amino acid
KYIKTLYVTKWTSNGGYSKRPATIPVWVKKADPSKLTKAQIDAISAATPQTGTVTCAWDGTDSKGAVLSTGDYVLVIEGTLRWENQVYYRAPISLGKGAMTPKVNVEYVGDATAERAMIKDVKVRVLR

SEQ ID NO: 87593 - protein, 358 aa, Unknown
  Obtained from environmental sample
  DOMAIN (153)...(290): HD domain
  misc_feature (1)..(358): Xaa is any amino acid
MKSILIVDDNLVSLRQISALLSKDYDVSLAKSGELALQICAQELPDLILLDVEMPGMDGFQTIARLNQDERLKHIPVIFLTGNHDAETEVKCLESGAMDFITKPANAEILHHRIEVHLQFSLYQLQLEHMVKELEDNIGISFAELLDCKDYNAAIHMIRSGEYVEMLVKELVNEGTFGSALTADDANLIKRAVPFHDIGKLGVSDIILLKRNPLTNMEIQEVRKHTVIGGQVLKAVYDRTPSQQYLKVAMILAEGHHENFDGTGYPQGLAGEDIPLYCRILSVVNTYDALITDRVYRKGISHEEACKQILAGRDTRFDPRVVDVFEKITDKIASLNVTTNLTFKDHSWSVYNETHTGS

SEQ ID NO: 87594 - protein, 302 aa, Unknown
  Obtained from environmental sample
  DOMAIN (72)...(188): PAS fold
  misc_feature (1)..(302): Xaa is any amino acid
MTDDDNSINARLAFLEEENKRLLIEYSGLNRKYQTAKDTIERINWYSRSRDQMYESLLAKNTRQKEFFNLLLKNLQNVILILDQNLRLLYCSDAFLKLVGLSNIGFISNQSFEEFSKWYADADSIKFILDALVQALAEKKVKIVDRVLPIGKDKDPRHYRINIAPMLNAKEVLEGIILLFYDFTEIIEAKEQAEQASKAKSVFLAQTSHEIRTPMNTVIGMSELALRADNLSQAQEYIGSIKQAGLSLLAIINDILDISKIETDTLEIENAPYSLSTLINDVVAMIQVKVSEKPIVFIVDVD

SEQ ID NO: 87595 - protein, 68 aa, Unknown
  Obtained from environmental sample
  DOMAIN (3)...(67): ThiS family
  misc_feature (1)..(68): Xaa is any amino acid
MKLTVSGNQKEYADGLTIAQLVELEKVETPMYVTVSLNEEFVESGAFADTTLHDGDTVEFLYFMGGGW

SEQ ID NO: 87596 - protein, 99 aa, Unknown
  Obtained from environmental sample
  misc_feature (1)..(99): Xaa is any amino acid
LIIGIDIGSTITKAVSIENGKIIKMIKTKAMDAITAATGAFGKIVLENGIKINTVEKIEITGAGASKIKDDIFGITTGRVNEIEAIGTGGIFLSGMNNI

SEQ ID NO: 87597 - protein, 234 aa, Unknown
  Obtained from environmental sample
  misc_feature (1)..(234): Xaa is any amino acid
MEYHVRINGDNRNSGSASEAFKTISKAAQAAQAGDTISVHEGVYREWVNPLRGGTEDKRIVYQAAPGEKVTITGAEIITDWENVGGTVWKTVIPNSFFGSYNPYKEVIYGDWLFTRDKVFHTGEVYLNGKSMYETVLLEGVMNPKECETSMDKPWSTHTWFCAADDRETIIWANFQGEDPRNGNVEINVRPFVFWPEKNLTNYITVKGFSLKQAATNWAPPTALQTGLVGPHWA

SEQ ID NO: 87598 - protein, 647 aa, Unknown
  Obtained from environmental sample
  misc_feature (1)..(647): Xaa is any amino acid
KAAQAAQAGDTIIVHEGIYREWVNPPRGGTEGKRIVYLAAPGEKVTITGAEIIKDWENVSGNVWKTVIPNSLFGSYNPYKDIIYGDWLFTQDKVFHTGEVYLNGKSMYETVLLDGVMNPAECETSMDKAWSTHTWFCATDDKETIIWANFHGEDPRNGNVEINVRPFVFWPEKNLINYITVKGFTLKQAATNWAPPTALQTGLIGPHWAKRWIIEDNVISDSKCCGISLGKEISTGQNEWSRLQFKQGAQREREVIFRAAKGNWNKETIGSHIVRNNTIFDCEQTGVVGHLGAVFSLIENNHIYRINHKRQFHGAEVGGIKLHAAIDTTIRENVIHDCYRGLWLDWQAQGTHVCQNLFWNNSQEDFFVEVSHGPYLVDHNLFLSTVNYREMSQGGAFVHNLFAGKLCAIPEMKRFTPYHFPHETEIMGVMTISGGDTRFYNNLFIGDKDVDLPNESVGIWSDAPVADLPLSPDALANMPTYIRKPLGTGQYDDYPSENEPAPWLPVPGKQLGGRTDAMFLPVYIKHNVYLKGAKPYIKEPDPVVSRQCGVEFEIDHVESKVTVKIADPSKIHCPTSEIITTEVLGKNHHTEMFYEEKDGAPYVLDKDFTGKQRSTKPVAGPFEVSGSDPVKIVYTREKSKFCSFTNY

SEQ ID NO: 87599 - protein, 291 aa, Unknown
  Obtained from environmental sample
  misc_feature (1)..(291): Xaa is any amino acid
TITATKAGDDEYEQTTAEYTLTVIPKAEGPDTKQDGAVVSANPASSFITATSITIAAVTITSPNPGNQTVEYAISTTASSVPTSGWQAGLTFSGLTPNTNYYVFARSKENENYNAGAAKVSAAIKTQAAQIIEVPRTTIVDFEADDLNKTYESTKGGSAPTVKVVTDPLNSGQKSLQITSSDYNQAAIVPVNLPVELHHYKSFSFRFNLLSSANLTNQSIMVYVAKNTADFKQYGFGNPADSSYAQFADKLLGSTPAETIGDAHRNKWTGYTLTISNPGAANQDLKGDIYI

SEQ ID NO: 87600 - protein, 505 aa, Unknown
  Obtained from environmental sample
  DOMAIN (369)...(505): Carbohydrate binding module (family 6)
  misc_feature (1)..(505): Xaa is any amino acid
AEPLKAYGDVNPICLQRFGADPWGIVYEDRVYVYMTGDTFRFSSGTSPTSDFSNLLPNEYNNINTIRVVSSSDLVNWTEHPEIKAAGSQGAARQATNSWAPAAICKNIDGIDYFFLYFADNANGIFVLRAEDPLGPFINPRTNGSALINRSTPNCSNVTWLFDPAVFTDDDGRSYIYFGGGVPSGRDALPGTDRVVQLGDDMISIVGTPQALNAPFIYEDSGINKIGNTYYYSYCSNFQVKTYLQRRREFPAAVTIGKNGAITYMTSDNPLGPYTLQKMILPNPGEMFNTKGGNNHHAIFEFRGKYYIVYHTRLLEMAMGVPETLPREGYRSTHIDEVTVLPDGTIEEIKGSRKGAAQSGRFDPYRLTSAATISNQAGISTVAVPGEQRMKVTDIDSGDWIALYGVDFSGAVYGTDLGDAGARTFSCRVTPTKSAPTPKSGSGHPGGVIQIKLDGLDGKPVGYVNVEPGKAEITVKLLQTVTGVHDLVFVFYGQGYEFEQWQFIK

SEQ ID NO: 87601 - protein, 560 aa, Unknown
  Obtained from environmental sample
  DOMAIN (202)...(318): PAS fold
  misc_feature (1)..(560): Xaa is any amino acid
MKKINDLIISSLTSGKYSSLDYETNMDAILRLIVLNITYTIASVVIITMGVIDMQGGNINDGLLQIILGFMIFLNLFLLRTEMPYNASGLIITAVFGVFCGISVFIKNEMQGLSGLWIFTYPLMSIFTLGLPVGFIPAILVLVTIAIETFGGLSKFDYNFQEAVLLCGVYFFIMLLTAVYEYVRSIKERWLARQDSYMKLVFNNSPDIIMLLDKNSALTHCAKAFLQSAKIKEFDEIRKTNYVDVFGRFTDYEMLNDIKYYFDKSINNKKPVKFERVLDFGDVGNDRHYEIHFTPMYNNNGEFQGAFIFFHDMTEILDAKDRAEQASKAKSNFLANMSHEIRTPMNAIIGMTAIAKSSNDSARKDYCLTKIEGASIHLLGVINDILDMSKIEENKFELSYAEFELNAMIQRVVNIFEFRFGEKKINFTMNLAPDLPQRIITDDQRLAQVVTNLFSNSVKFTPEGGSITLSVRRLEDNEPNFCTLEITVTDTGIGIPQEQQGKLFASFVQVDSSISRKFGGTGLGLAICKRIVELMHGDITMESETGKGASFIITILVEIV

SEQ ID NO: 87602 - protein, 568 aa, Unknown
  Obtained from environmental sample
  DOMAIN (1)...(405): Carbon starvation protein CstA
  misc_feature (1)..(568): Xaa is any amino acid
MNGLLLLLISVITLSLAYLLYGRFLARKWGIDPSRKTPACEMEDGQEYVPTSKAVVFGHEFASIAGAGPINGPIIAAMFGWVPVLLWLLFGSVFFGAMHDFAALYTSVRNKGKSIGYVIECYVGKAGKRLFLIFVWLFSILIAAAFADIVAGTFAGFTGEGARNGINASVASSSCLFVIAAIILGFFIRKRKASGLASGIIAIDLLIICIVMGLFFPVFLNKNIWLYLVFAYIFIASVVPVWALGQPRNYLNSFLLLAMMLAASIGVVFTAPPISIPAFTGFNIDGNFLFPGLFVTIACGAISGFHSLVATGSTSKQISSEKHMLPISYGSMLVETMVAVLALIAVGSLAWNGKLPEGTPPVIFATAVSGFLFQLGLPHQASFTIVSLAVSSFVFTTLDTVARLGRLSLQELFSVDGADGAIGGQKQKKSLWALILQNRVAASVFTLGPAYLLAIMGYQNIWALFGAANQLLAALTLIACTLFFKKTGRRIYMIIVPTVIMLAVTYTSLSLSIKAKITLLLKGTFNAAVDGIQMCIAILLLVLGILVAASCACKLLGKNEKKENVTQP

SEQ ID NO: 87603 - protein, 238 aa, Unknown
  Obtained from environmental sample
  DOMAIN (1)...(236): IMP dehydrogenase / GMP reductase domain
  misc_feature (1)..(238): Xaa is any amino acid
VANGYVQKFSDFIHHLRETLPDSIIFAGNVCTPEMAEELIISGADGVKIGVGPGAFCKTRVTTGVGYPQLDAIISCADAAHGLNGLVIADGGCKTPGDVAKAFCANADMVMLGTMFAGTDECDGSIITKYIHDGEYCQLATDPPKYEPLIKERKFKVFYGMSSDLAQESYFGGIKDYRASEGLVEEVPYKGSVNIQVRNILGGLRSCGTYIGAINIKNFGKCASFVEVNRVHRGPHES

SEQ ID NO: 87604 - protein, 287 aa, Unknown
  Obtained from environmental sample
  DOMAIN (1)...(58): His Kinase A (phosphoacceptor) domain
  misc_feature (1)..(287): Xaa is any amino acid
MSHEIRTPLNAIMGMGELALYTDVMPKIHEYLKGIKQAGQNMLLLIDDILEFSNIETGNLEIAQTPYYLASLLDDIINIIQIRIGGKPILFTANIDPNLPARLLGDEIRVRQILFNLLSNAVKFTNQGTIELKISAGYRAEEKADLPIVITVADTGIGIKEEDMGSLFKSFTRLDMAVNKSIEGSGLGLSITRSVCQAMGGSVAASSEYGKGSVFTAVVPQGPVDIDRLAVVDNPKVKVVLIYDHRPEYLLSLMETLRNLGVIVVTADSADDFLGRLSRRGFSFAFI

SEQ ID NO: 87605 - protein, 282 aa, Unknown
  Obtained from environmental sample
  misc_feature (1)..(282): Xaa is any amino acid
IQHRTEIRNDLKLNVDDFRTRTFDMRHGMKVEYTPIDPLLDLTYSIRLDRDLSNLPTDDWNLMMDSTLINIFGLNTTDGEKWDTYGVLYGERGRTQSATAKLTPQLVAWMTHSGEYTADYTGLTARRDNDSTRYLNANVSTTLKLRTSLLFSELFKNIKVKTKPAKKDSTEAKDSTDAKDSTDTKESMAAKDSTANQDQTAAQEPTDAQDQTAAKESTEAQESTEAKDQAEDQESAEAKEATAAKDSTAVKDSTAQDSTAKTFRKKLWTFIGGNINRINMRS

SEQ ID NO: 87606 - protein, 76 aa, Unknown
  Obtained from environmental sample
  misc_feature (1)..(76): Xaa is any amino acid
MAKPHRGSSLRELFKHGRGECPVCKRKNVKILYEQEKDGQKFKICKTCKAAVKNGTKSLPAVDKPASEEKSAEAAG

SEQ ID NO: 87607 - protein, 283 aa, Unknown
  Obtained from environmental sample
  DOMAIN (62)...(187): RNA polymerase Rpb3/RpoA insert domain
  misc_feature (1)..(283): Xaa is any amino acid
MARKNLMKGIKRPKSNFEQVEHNSSYGKFVAAPFEPGFGTTIGNTLRRLLLSSIQGYAITAVKIVSYDSNGTAHNVSSEFETIPNIVEDTIEVINSLKQIRLKLPDDVEQDILLYEWSGKREITSDDFCRPGQVDVLSTGQHIMTLMDDAKVEFEIQIDLGRGYVPSEVNERYVEVIGTIPLDAIFSPVKKVKFAVEPTRSGQRSDYDKLVLEVWTDGTVKPEDALAEAAKVAKDHFSIFINFDENNMGVEDDIDEGNEHIRKILNTPVEELELSVRSSNCLK

SEQ ID NO: 87608 - protein, 87 aa, Unknown
  Obtained from environmental sample
  misc_feature (1)..(87): Xaa is any amino acid
MKVVAIKDMIRKDVPIYYRKLYTGVAVIDVAKGPADYRIDFVIEYKPTGQKEILVTLIDKVDYPLIPLNRELKEYINNLESGGGLPD

SEQ ID NO: 87609 - protein, 201 aa, Unknown
  Obtained from environmental sample
  DOMAIN (4)...(201): TolA protein
  misc_feature (1)..(201): Xaa is any amino acid
KGQPNKTDKLKRAIIISAVLHVILFAALIWSSFDENIEASAGGGGGSSIDAVMVDSGAVVEQYKRMQSQESSAKRSDEQRKMKEQQPAEELREKQAAEQERLKQLEKERLAAQEQKKQAEEAAKQAELKQKQAEEAAAKAAADAKAKAEADAKAAEEAAKKAAADAKKKAEAEAAKAAAEAQKKAEAAAAALKKKAEAAEA

SEQ ID NO: 87610 - protein, 449 aa, Unknown
  Obtained from environmental sample
  DOMAIN (25)...(420): Melibiase
  misc_feature (1)..(449): Xaa is any amino acid
IVVFHAKGYFNFKDTLKNIYCQKEIFKTNSFLMNFSENPLEKANIAGGYESWYNHYTNINEKIILEDLYALGKTENLIKLWFIDRNKKAVFQIDDGWEKAVGEWEIDVSRFPNGLKAIAEKIEGLGYIPGIWLAPFLVTRRSKIFSEKPEWILKESNGGKLVAAGFNPLWDKQFYCLDISRSDVLEYMEKIIDRAIDEWGFRYLKLDFLYAGMLNGFFAEGGSPYQHYEKACAVLTKRRANANNLPVTYLGCGIPLGSSFRHFPLSRIGADTREEWDWKIVKLLNHVGGPGAYISLMDTIGRAFLDGTVYMNDPDVIFLRSKNCKLSENEKELIALVNFVLGGQIMFSDNPLHLEGPDILLTKRVVGLYEKLANDEYGAVRIDKDVFRLESKSEKISGIINLRNKAYKLNSQKEVKLHASFTQGLFLVDHRIEKTMTFLPRTISIVSLI

SEQ ID NO: 87611 - protein, 406 aa, Unknown
  Obtained from environmental sample
  DOMAIN (1)...(403): Short-chain alcohol dehydrogenase
  misc_feature (1)..(406): Xaa is any amino acid
MIIKPMVRNNICLNSHPEGCAASVKRQIEYARKTLGSQSNNMAPKLALVIGCSNGYGLASRMAAAFGYGAITIGVSREKPASKTHTATPGTYNNLAFDQEAAKAGLIARTLKGNAFLGEMKAETAKAVREAAAAANIPAKIDLIVYSLASPVRTCPRTGIQYKSAIKPVGETFSGKTLNVMNGTFNTVQAEPATEEEIYNTVKVMGGEDWEYWIEALDKEGLLYSKSRTVAYSYLGPEHSWPIYKNGTIGKAKEDLERACDEINETYASKGKIAGAWVSVNKALVTRSSAVIPIIPLYISCLFKVMKEMNLHEGCIQQITRLYRDRLYAAESGDPEMVPVDRKGRIRIDDWEMREDVQKATMEKMKNVTPENVFTQTDVAGFKHDFLEAHGFDVEGVDYNADVDIG

SEQ ID NO: 87612 - protein, 95 aa, Unknown
  Obtained from environmental sample
  DOMAIN (7)...(95): IMP dehydrogenase / GMP reductase domain
  misc_feature (1)..(95): Xaa is any amino acid
MPVNHGKALTFDDILLLPDYSEITPDRTDIETWLTPAIPLRIPLLSAAMDTVTEAAMAISLARMGGIGIIHKNMPIARQRLEVEKVKKSESGMIL

SEQ ID NO: 87613 - protein, 292 aa, Unknown
  Obtained from environmental sample
  DOMAIN (2)...(274): IMP dehydrogenase / GMP reductase domain
  misc_feature (1)..(292): Xaa is any amino acid
MKDIDKVLKYPDACKDDKGRLRVGAAIGVGAECESRASELLAAGADVLVLDSAHGYSANVLRSVEAIKGAFPACQLVAGNVGTYEGAKRLFQAGADAVKVGIGPGSICTTRIVAGVGVPQVTAVIETARAANEKDRCCIADGGIKFSGDIVKAIAVGAHSVMIGSLFAGTEESPGETILYQGRTYKIYRGMGSIDAMKEGSSDRYFQEKSKKLVPEGIVGRVPYRGPVMDSIYQLMGGLRSGMGYVGAKNLRELREKAQIVEITPAGLRESHVHDVIITKEAPNYRMTTASA

SEQ ID NO: 87614 - protein, 451 aa, Unknown
  Obtained from environmental sample
  misc_feature (1)..(451): Xaa is any amino acid
IRPGVYLTFLYSFALLLILFLLFLYPGIKNPGAVLIVKTEPDGAAVRIDGVYRGVAGSKIPVSKGDHTIEAVMPGFNTQSVVQKIPARYFGSLFFPLYKKVEFTLSISDPETHIAYPASVLALYAADYAEWTFAGEPTASWQVPMSLSEGAYRVGNVPQNNEASYLKNTHYEKLQQTLLAASGFAVTRSAIRDLMRAKILLDNRGSAPSPIALIDSISGMLLFLSESQDTAKWLSQVLPREQAAIIESSAWFKKQSEIPPKPKTNKSAGSLEMAGIKFITFYSPYLLISENPVSRSLFETFLNENPQWREHQTDYFPEEISSYPWDIDKNVITGVTWYAAQAFCEWMASSSRLYPGIGVEVRLPTEEELSIASDNINKIKNMGWEWCCDPYVPLQIAADAPQEAKYAIGSPERSLRGRQTPTSPETRASLPPDLSSPIVTFRVVLGPKIIK

SEQ ID NO: 87615 - protein, 310 aa, Unknown
  Obtained from environmental sample
  misc_feature (1)..(310): Xaa is any amino acid
LLGYLNSAVPLEQIDNEDFIRLVKEIRAFAMDELGLKESRNYTRFVKLDRNYLAAVVSASAKDSFRRHEWNYPVVGRMPYKGFFNIEDARKERAKLEKKDLDVWIRGVSAFSTLGWFKDPLYSYMTDYPPANLADLIIHELVHATVFIKEQVKFNEELAEFIGSEGARLFIIARFGEDSGEYRQIFSSDKDSQNYVEFIQELIAELDVLYNSEIGRTEKLMEKARIIDSAKERFNAEYDSRFSGENYRGFAELPVNNAYLELYRLYHTEDNFYEELYDRSGRNLPAFISAAKKITKKDDPRRQLENALFQ

SEQ ID NO: 87616 - protein, 494 aa, Unknown
  Obtained from environmental sample
  misc_feature (1)..(494): Xaa is any amino acid
VSQLQVHVQPSDFYYGLLHDSTAEKIKLFERSLASPNEYVRRAAAEKLAVLMAGGTEISRKTMDIVRNEVRGFWAEAFYIVSAPDKEKALSFFFSHELNSASFAEAMQFIITECAKKQINFSEEEIAAIEGHYSVSCLRYNEALDYFCFFQTEGSWPEQIPDIFIKYPMLINDLGKTFQYTKSGAEGLTLFLQWLTNKELYYDLQFRLNFYAGRIARRIGGKNAQGISLFERALILAPNAEQKDACIWYILDLTITGPTKTFIDKLTKYIPNWYKSSEYNDLLERFLHRLTVERDWNKVIKTYDLIKNTGAVNSKIGYAWVIARSIDNKYLTAADMRLAAQVIGAKSADASAFYRIAYNIGIVNYLPALLYRSQCADILKEPFLELAEEAAEEPEDKEYSQVLQFILDFFNYEVVDFSHPYIKELEKELTADELRLVAQAYDKAGMHWEAMHLVSLYFYKNGYSRDRRDWELLYPRPYLDLVEKYSQEYGIPQS

SEQ ID NO: 87617 - protein, 197 aa, Unknown
  Obtained from environmental sample
  DOMAIN (54)...(197): Domain of unknown function (DUF323)
  misc_feature (1)..(197): Xaa is any amino acid
MYTATINLKAKTGYTLQGVPANFFTVSGASSVSNSANSGVITALFPVTPYVTPTGIEMVWIPGGSFQMGDIRDEYYAKPVHMVTLTGFYMGKCEVTQDQYQNVIGKNPSYLNSNPARGEIQGNRPVEQISWYDAIEFCNALSKKEGLSPYYSIDKANQDPNNLGSYDMFKWTVTCNTSANGYRLPTEAQWEYAAKGG

SEQ ID NO: 87618 - protein, 463 aa, Unknown
  Obtained from environmental sample
  DOMAIN (307)...(372): His Kinase A (phosphoacceptor) domain
  misc_feature (1)..(463): Xaa is any amino acid
MVVLSCIFTTRIVHTNLVHNADSKLDLVESQIYSDLQESRTILDDFAQSVQNLAQHGYNAEKLTTFNEDISSFLISKNNNTFSVNGPFGYIEKSPEGPFFFNGIGWQPPDGWNPRKRPWYKAAVKANGNVAETEPYKDIVTGEVVFSYSRCLFDGDGNRIGVVGIDIRAGYIGEKVANTAFAKDNSYGVLISKDFTIIGHINPDFVGVKMYDPIISSSHLVDELLDTGKISETAYNNWKGEKIIAFFRTLSNGWRLGILVPKNIYFQSVNNMALILSFLGMSLATVLILILVQLDAAKNKSDTESRYKSAYLANMSHEIRTPMNAIIGMTTIGRSAPDSSRKDYCLAKIQDASNHLLGVINDILDMSKIEANKFELSETEFDFEKMLRQTVNVVNFRADEKQQQLTVNIDRLIPRALIGDDQRIAQVVTNLLVNAIKFTPEKGSIAIDANLAGKENGICTLRV

SEQ ID NO: 87619 - protein, 419 aa, Unknown
  Obtained from environmental sample
  DOMAIN (4)...(120): Histidine kinase-, DNA gyrase B-, and HSP90-like ATPase
  misc_feature (1)..(419): Xaa is any amino acid
MLIGDDQRIAQIITNLLGNAIKFTPEKGSITLAVRLAGKGNDICTLQVSVSDTGIGISREQQEKIFNSFEQAESSTTRKYGGTGLGLAISKSIVEMMGGSIWLQSEPGKGSVFTFTIQLQRGTEEKHTLLSADINLRNIRIMTVDDDSDILTYFLEVMQSFDIMCDVAISGEKALQLIDQNGGYHLYFIDWKMPVMDGIQLAREIKSRVTEHTIVIMISAAEWSAVAEEAKAAGVDKFLSKPLFPSTIAEVINECLGVDKQQAEQSQAAEIAGIFAGKRILLVEDVEINREIVQTLLEPTQMEIDCAENGAEAVRMFAEAPLKYDVIFMDVQMPEMDGYEATQRIRVLESSASQNIRRVPIIAMTANVFKDDIEKCLAAGMDSHVGKPVDFEEVINRLNLYLGVKKIKENIGTKYAAAV

SEQ ID NO: 87620 - protein, 144 aa, Unknown
  Obtained from environmental sample
  DOMAIN (49)...(97): LysM domain
  misc_feature (1)..(144): Xaa is any amino acid
MKKVVLLAALIICVMLTVSCKSGPKDLDEQYRNLYDANTGLDFTDASTYIVKSGDTLSNISRHAYNDGFYYPVIMLASRGVVINPDKIQPGMELTIPDLERNKANANSRKSMKNCLNGFANIEKNKSKPNQGLIDGFRKRADEL

SEQ ID NO: 87621 - protein, 190 aa, Unknown
  Obtained from environmental sample
  misc_feature (1)..(190): Xaa is any amino acid
MALKGGAIMPDCKNCKSKTIVKNGTARGKQRYKCKSCGYNFVAGDGRTNDRTAAKKAMCVIMYSLGKASYNMLAHVFDTWPSLVYRWIAEAGAKMPGPEAPSGVREMEFDEMWHFVGSKKTGFGSSRPLTVAHGEPWPGCSAVVILQRSGGSTKRWGILRTASFTQTPGARSPKCGRRSATSSGRRTRSA

SEQ ID NO: 87622 - protein, 302 aa, Unknown
  Obtained from environmental sample
  DOMAIN (36)...(225): Adenylate and Guanylate cyclase catalytic domain
  misc_feature (1)..(302): Xaa is any amino acid
MLITEENFIQGAFSRYLAPEIISEIIKDPNKLNLGGEKREMTAIFTDIQGFSAISEQLDPAHLVRLLNKYLTEMSNIIMEHLGTIDKYWGDAIIAFFGAPLFNADHGALACRSALAIKAAEKELNKTLISEKMIPAPIFTRIGINTGEMVVGNMGAEKKMDYTIMGNAVNLASRIEGVNKYYHTGGILISEYTRAKIGDEFLLRRIDRVRVVGINTPLRLYELLSANNGQAADSERRAMEIWERALDMYEKSKFKEALTLFSSLVENYPNDNVAKVYALRCEAFIKAPPPLDWDAVKNLTEK

SEQ ID NO: 87623 - protein, 74 aa, Unknown
  Obtained from environmental sample
  misc_feature (1)..(74): Xaa is any amino acid
MNGLFLLVISVVVLSLAYLLYGRFLARRWGIDPQKKTPAHEFEDGKEYVPTSPAVVFGYEFASIAGAGPITGRS

SEQ ID NO: 87624 - protein, 325 aa, Unknown
  Obtained from environmental sample
  DOMAIN (13)...(35): MORN repeat
  misc_feature (1)..(325): Xaa is any amino acid
MTEKLTLANGETYEGNFIDGVLQGKGKYTNRMGDIYEGDFVDGKFHGKGKFTMPDDHEYEGDFVANSPHGKGKWTSLRYDEYYEDDFFKGRKSGKGKMTYYDNRVYEGDFAKDRRNGKGKMTYPNGRIEEGEWNNGEFLGEQMKNEQTEQEILNQLNTLIELDPNRDKNYYNRGLLYKDKKLWEKAEADFAKAFSLWKDPLYLSEWRQAAMERQALQTVEERMAGYEKIIKNKTEIIPSAEIIAAIALFEEYELLEALFEKKMFTANMLNETVSPSFSYYQPTPMYLITGKKALKKMKDPVKMIRTLASFGADPNIPAGDGSTML

SEQ ID NO: 87625 - protein, 202 aa, Unknown
  Obtained from environmental sample
  misc_feature (1)..(202): Xaa is any amino acid
MNNLLQQIRLASRKLNLLTAEQINAVLYTLAEETAAQTDVILAANAKDCERMEKTNPLYDRLLLSRERIDGIAADIRSVASLPSPLGHTLSVSTRPNGMRISKVSVPFGVVGVVYEARPNVTFDVFSLCFKSSNACVLKGGSNAQLSNEAIISVIHAALKRHGVDEMAAQLLPSSRENTAELLNAVGLVDLIIPRGSASLIS

SEQ ID NO: 87626 - protein, 134 aa, Unknown
  Obtained from environmental sample
  misc_feature (1)..(134): Xaa is any amino acid
ERQSDYLDGVVGDKGIYSTANDLFLFDQALYDYEFISKSLLDLAFTPAKPFDEKHKRDYGLGFRVKLTDEGYVVAYHNGWWKGFRTYFIHDYENQRTLIWLNNRSDVTVAPFMSEILEQSGFSEEEQASLGGGN

SEQ ID NO: 87627 - protein, 404 aa, Unknown
  Obtained from environmental sample
  DOMAIN (5)...(298): AMP-binding enzyme
  misc_feature (1)..(404): Xaa is any amino acid
MLPVWHVYERLIEYVIFYYSTSIAYSKPMAPILMADFLAIRPNWMVSVPRVWEAIMDGINRNIKAKGAFRKKMFDLASSYSMLYTYFKDLTFGLLPNFHGRFRALDSLLGFFPWLVLLPLEGLLRAVAFNRIKKEFGGRFKAGISGGGSLPARVDLFFNSLGIRLQEGYGLTETAPLISVRQYKHSRRGTIGQLMPNTSARIIDGSGKLLPPGRNGIIFVKGDQVMKGYYQKPAVTAAVLSEDGWFNTGDIGMLTYDRELRITGRAKDTIVLRGGENVEPVPIECRLRESPYIQQCIVVGQDQKSLAALIVPWQQTIMDFAEENSIPVVDYELLLQQPEINEIIASDISERINLKTGFKPYERISKFVLLPKPFEPGKELSGKGELLRHNITALYAKEIYKLFK

SEQ ID NO: 87628 - protein, 206 aa, Unknown
  Obtained from environmental sample
  DOMAIN (39)...(178): Pyridine nucleotide-disulphide oxidoreductase
  misc_feature (1)..(206): Xaa is any amino acid
DSRGRLKPGLLGVPGESEFGGKGVSYCATCDGHFFKNKKMFIVGGGDAACEEARYLSNLTDKIVLVHRRDKFRAQEALAERVMNNPHIEVRFNTVIKEIKGDKKVKSVVLSETTSDKVYEEETDAVFIFVGTVPQTSLVAGDDLKAKLDESGYIVTNQKMFTSISGLFAAGDIRSGAFRQVVTAAADGAVAAHSAAAYIDAIKDKK

SEQ ID NO: 87629 - protein, 200 aa, Unknown
  Obtained from environmental sample
  DOMAIN (40)...(72): Ankyrin repeat
  misc_feature (1)..(200): Xaa is any amino acid
MLTGSRKEGLQLIIASEKSDIETVKLLLKKDVYIHAQDKEGRCALVAAAYKNYLEIVDVLIAAGADVNMKDNTLQSAYLISTSDGYTELLKKTLEAGADVHSTDSYNGTGLIRAADRGHVEVIKELLKTDIRVNHVNKMGWTALLEAIILGDGGKRHTEVVRLLVDAGADVNMADKDGVTPLAHAKNKGFTDIISILENL

SEQ ID NO: 87630 - protein, 190 aa, Unknown
  Obtained from environmental sample
  misc_feature (1)..(190): Xaa is any amino acid
TKFTAIISGVGFYKDGNIRSITLFPGEAITAQTKYGEISVRCGFSLYESGELESLEPLHNTQIQTPIGLISAFDPNAIGVNADVNSLMFDKQGRVISLVTASNRIAVQTEDGRFLTFAPRELVNPLNNETMMTEGLAISFDYDGSAVTFGESDEKSTFSVDKNGFTVIEYKSSVYMCSPEDCASCSLGCK

SEQ ID NO: 87631 - protein, 409 aa, Unknown
  Obtained from environmental sample
  DOMAIN (191)...(214): 4Fe-4S binding domain
  misc_feature (1)..(409): Xaa is any amino acid
MSHIPDPNKNVTLTIDGIPVTVPEGTKILEAARKANVFIPTLCDHPDMCRRAVCRICVVECDKRGKLLAACANDVWEGVSVVTNNSRIANIRKTIIELLLANHPQECLTCARNTDCTLQSLAQTLGIRETSFNCDAMNRQPVSEDNGLVRDMDKCVKCGRCVEACQTIQTVRAINSSHRSVNYRISTAFNQPYGDSPCVFCGYCETVCPVGAICENDQSAEAWAAINNKDRKTAVQFDKTLCTKLDTVSGLPEGTACAGKIVTALKRIGFDKVYDAQFAADIAASELNIELQHRVNNSGSPPQGRQDLPLISACSQSAVKFIENFYPDLTPLLSPCRSPREVFASTVKEEKTTVISIESCVSNKSKSKQPSANEFVPPCPDITLTVKELARMLKLAGIEFSSLPESHFD

SEQ ID NO: 87632 - protein, 314 aa, Unknown
  Obtained from environmental sample
  DOMAIN (21)...(213): RecT family
  misc_feature (1)..(314): Xaa is any amino acid
MSKITQFPATEAGTQSPPASDQKVRKETILEYLKAYGYDKNLSEAEQNQFVQTALANDLNPFKREIHIAAYGEGENRKVSVITGYQIYLKRAERTGRLDGWKAWIEGNGSTMKAVVEIFRKDWPYSFTHEVYWEEAVQKKKDGNPTQFWAKQPRFQLRKVAIAQGFRLAFPDELGSFPYETAELPDNEAAPETQAPANHNPVKTSIQSLAEQAASDDSPDVKASSQQRNPSKAPPKAKANEAQQAQAPSSQDSELDKETRDRLIRKIEDLFDEHPKDFTQKHKEWILNNALKATDRAGIGKMIAYTEKVIKKAA

SEQ ID NO: 87633 - protein, 491 aa, Unknown
  Obtained from environmental sample
  misc_feature (1)..(491): Xaa is any amino acid
AEYDALLLPPQFTRILAENLDHAKSGAHNLLYYKSAKAEIRDAVMELRRLHEEEGVPYEDMAVSVPELEKMEADLLKEFFLRQVPVTRRAGKKLGETGAGRLFVLVSECAASGFSFESLKALILNDHIPWKEREKNKALISFGIKYNCVLSYVQDGITVDIWEEAFKKAYGDGGRELQDYYRQLKKSVDHLAGSPTFSDIRKYYFAFRGSLLDMEKIAAEDDAVLSRCIAELGSLVELEEKFKDPPLVPSSAFGFILSYLNGKEYVRKEQKYGVNIFRWRVAAAAPFACHFVLNASQNAASVLYQPLKFLRQDKRRALGLEDADASGAFFLLCDTGRDTVEGAGFKTHARISASEQTFSGWAIPHSFFAQGKIVDPPESFFDPYAEEHRFWREGVVLGEIFPLQKCSYECWKDNLIQKENNFSFFTTPVSAEKSSAVRELLESATEDDNGCIAVTPTRDLNVYYNCALFWLYARVFKAEEFSLDAALLDDT

SEQ ID NO: 87634 - protein, 252 aa, Unknown
  Obtained from environmental sample
  DOMAIN (172)...(252): Thiamine biosynthesis protein (ThiI)
  misc_feature (1)..(252): Xaa is any amino acid
MTTYLIKPGELTLKGDNRKSFENILRKNLAALLKGSNAKIVTGNGRLFVRCPDGMEGKVEDALDRLMGISGWAKTRIAEKIPEEVIAACVEEGKLLWEKGKKTFKIEARRTDKSFPLDSYQIRCLAGEAVQKEVSGLKVDVHKPEAVIEVEIREKAFVYANANEGRRGLPVGTAGRGLLLLSGGIDSPVAGYLMASRGMALDAVYFHAFPYTSEKAREKTVKLAEILGRFSQGIRLFVISFTPIQVRIKEKA

SEQ ID NO: 87635 - protein, 482 aa, Unknown
  Obtained from environmental sample
  DOMAIN (252)...(417): MatE
  misc_feature (1)..(482): Xaa is any amino acid
LSEEDSTATVNSGRALIRHGSVLSLLTLGSRVLGLAREMTKAALLGTSALSDAFSVAFMIPNLFRRLFAEGSVAVAFVPTFKEYLVRNETGQGTPNSIKEFLSCFLTFLSFFVTLTVMAGIALCPLMIRFFGMEDFSETVFLTRLMFPFLAFISIAAFFQGILNSLRIFAPSGFAPILLNAITILCAYGLSPYTQNPARAMALGILIGGFLEAAIQLPFILTHKSRIRFFFTGLRRAINNPGTKKVLRLVGPTVIGMAAYQLNDLVSTALAGNAGEGIVSSLQYSLRLQELILGIFAVSIGTVLLPDLAEYAKSKQWDIFNRRLSSGMNIIAFITIPVTFFSLSQGPGLIALLFQTRSFDQESARLTLAAFHFHMPGLYFIALNRILAPAFYAQSDAKSPTIAGIFSFIVNMALAAVLAFPFKGSGIAFALSFASAVNTAALLFFLRKNQEISLGRTLKSALGYAAELILFSALALVPILLL

SEQ ID NO: 87636 - protein, 317 aa, Unknown
  Obtained from environmental sample
  misc_feature (1)..(317): Xaa is any amino acid
MRVKQESHVLKFVPEALRTKELCLHALAPKSNELLFTAKEGVNCAIAYVPEALLTKELCLDAVINEAASLKFVPEKFMTAELCLSAVRNCGLALELVPDKFKTYDLCLEAVKKSGCGLQYVPENYKTKEMLDFAIEKDGDALEFVPESYKSEKVCLDAIKKDRQGDTIKHVPASLLTKEFYYKAFELDAGVIEHIPKVFIAAQMCEKAVKKKDYALQYVPNEYRNEKLINEAVNKNGYALDYLYDMEKTEQLCRKAVEESGAALKYVPYKMRTPQLCFTAVKNFGGALEFVPEALKTKELCLASLNRYNSKWIMRLV

SEQ ID NO: 87637 - protein, 187 aa, Unknown
  Obtained from environmental sample
  DOMAIN (31)...(69): WD40-like Beta Propeller Repeat
  misc_feature (1)..(187): Xaa is any amino acid
SDGETILFASKTKNGKWDIYALDTSGKAAPVRLTDGKADHRKPRISPNGEYVAYLSNRTGFGGKMDLWVYDRRATKHRQLTFDTEVQGFTWSDNSEDIYFSAGVNLLEICRVDMRHGAIKNMIPHPQGEVKSWSEISPRFMRYNDEPMIVYTRVYPDGRRRIYWFDINNAVDAKMYSVGEFDEWNEE

SEQ ID NO: 87638 - protein, 212 aa, Unknown
  Obtained from environmental sample
  misc_feature (1)..(212): Xaa is any amino acid
MTRKNLPVILIFTVFSIWAQEHDPGFYPDTMRGEVWIEREPIYGDRPDKEYPLSIETAGRRALQEAALYYSAMIYGWSFHYDIGEKARRIPEDFDIFEPMGEVRWGDARLTVTEVETSDSKLRVWTDYRMSDLQAKRIQMWRTGTVRNAQAIGYCPMTGPTPDSGWMEIRNAVLKDAARAAVRNMLRGSERNRPKAAIGFISLASFPRFYVD

SEQ ID NO: 87639 - protein, 291 aa, Unknown
  Obtained from environmental sample
  misc_feature (1)..(291): Xaa is any amino acid
VRVTAGQLVDIPFRGTNWSYLEDIASRRGIVYNSRRIDSEGMIFTFRAEEEGIYALRFYRRDYIRDNIFYDYVQVIVEESPDKSGKAGTYPPNDRGKVTAEPRWPSALEEAEMLRGGARTSSGNNDGSSASSPASSANRGSTAASTRETAPQASSANRDSSSAQVKTAPPQSAMPQVVMPSAIPADAAPPAEKKEKLPPEEIIKKAQDAFNGGNAAEAIALLDQYTEFYPGGNDELYWLYGQFYEANTPSRNILLSLDFYRRLVNEYPQSTHYSDARRRISYLERFYINIQ

SEQ ID NO: 87640 - protein, 215 aa, Unknown
  Obtained from environmental sample
  DOMAIN (22)...(168): TruB family pseudouridylate synthase (N terminal domain)
  misc_feature (1)..(215): Xaa is any amino acid
MGLLLINKKSGITSFEALREIKRALETGKVGHTGTLDKFASGLLLVLTGKDLKLTQWFSHCDKQYTGRIHFGIETDTLDPEGSVIAQIPPPSLEKVEQAILEFSGVIMQSPPAYSAIHINGKRASELARSGKVPEMKKREVTIHKIELRNWDPPFADIFVHCSSGTYIRSLARDIALAAGSRAHLCSLLRTQIADFKLEDARSGEGAAFPRFPSP

SEQ ID NO: 87641 - protein, 253 aa, Unknown
  Obtained from environmental sample
  DOMAIN (201)...(234): Tetratricopeptide repeat
  misc_feature (1)..(253): Xaa is any amino acid
GHYIAGRGIDLAPTDQYKTASDLSEITADAFAMRYLGKSAYTAYLESTDLKYGYLDAVTKRAEEMEREERETLARLRAIANAPAAAPTPPAQKPSVNPAQALADSAIAAFGRKDYDKAIADYTQAIRLEPNYAGAYLNRGIVYDKKRDFEKAIADYNQAIRLNPNDPDAYKLRGAVYYEKGELDNAIAEYTQVIRLAPQDPAGYKLRGTAYFQKRDLDRTIADYEAALRLAPNNEQVKNFLLLMRSIKQGREN

SEQ ID NO: 87642 - protein, 641 aa, Unknown
  Obtained from environmental sample
  DOMAIN (89)...(232): Thiamine pyrophosphate enzyme, C-terminal TPP binding domain
  misc_feature (1)..(641): Xaa is any amino acid
SVRALSIDAIEKANSGHPGLPLGTAELGAMLYGELLRHDPSDPEWADRDRFVLSAGHGSMFIYSLLHLSGYKDMTLDEIKNFRQLGSRAAGHPEYGIGIEATSGPLGQGLAMAAGMAVAETMLAARFNTPGCKIVDHYTYALCGDGCLMEGVASEASSFAGHNGLGKLIVFYDSNKITIDGNTDIAFTEDVAKRYEAYGWQVLRGSMYNFEEIARLTEQAKTETKKPSIIILTSIIGKGAPNKQNKADIHGAPLGADEVKAARANLGITSDFYIAPEAQAFFSAKQQEWKKAHADWQALFDAWSKENPEKRREWDKFHSGTAAPASLPTYNIGDKIATRTAGNKALVAVAAANANLVGGSADLKGPNAVGLPADAGTWTKDNRAGRYIHFGIREFAMAAICNGISLHGGMRSYCSTFMVFVDYLRPALRLSALMNQPVVYVLTHDSILVGEDGPTHQPIEHLASMRVIPNVLVLRPGDAEESAEAWAMAMDNTKTPTVIALSRQNITVFPKADPDWKNTIRVGAYIAKQVEGSPDIVIIATGSEVGMALEAAAKASDKKIRVVSMISKELFESQPAAIRDAMIPPNTRVIVSEAGVRFGWERWAKPDDIHSIDRFGESGPAPKVAEHLGMTVEGLLKIVNR

SEQ ID NO: 87643 - protein, 335 aa, Unknown
  Obtained from environmental sample
  DOMAIN (245)...(309): Oligopeptide/dipeptide transporter, C-terminal region
  misc_feature (1)..(335): Xaa is any amino acid
MALLEVRNLTIKIRRGKKYYTAVDGIDLKIDAGEIIALAGESGSGKSLTALSIPGILSARAKISNGEILFSHDNETVDLCKSEEKFLRQIRGKEISMIFQEPRQSLNPLMKVGAQITEALELHNGIYTAASSGQNKKTVDVMALEMLEKLQFPQPEKIMGAWPHQLSGGMCQRVMIAIAAICRPRLLIADEPTTALDTVNQNHILELLKQINREFGTAILFISHDISMAQHFCSRFMVMYSGRIIEEGPGEAILSSPLHPYTIALSASIPCKENRGKPLANIPGRAPPLEITLPGCHFASRCPKAQTRCKNSPPPLAEVGNGRYVRCFFPEGTNA

SEQ ID NO: 87644 - protein, 308 aa, Unknown
  Obtained from environmental sample
  misc_feature (1)..(308): Xaa is any amino acid
VPDFTSEILQNSALKLKQFRESGEVPIKLSTAVVLVEDIYMTHGAQKNSPVAIRDYIRYAKNHCPNLKYILLAGNGNYDYRKIKANSLVNLIPPYEAEDTSSDDFFVILEPGEAIRFGNYNLSLSIGRLPVFNEIEFENYIQKVIDYEKKSAMNNGIWRNTIIFNADDQLQGNRVDNIKHTKHMEQIALSMDTLAKKQGFAIEQRKISLLQYEKDGNGKKPDATRELLLRLNQGALFTFYYGHGNSVQWADEDLLNISSLNYINNAGRYTILGSFSCAVARFDDANAVSLSGAFVTAKSKGAIAAIGS

SEQ ID NO: 87645 - protein, 282 aa, Unknown
  Obtained from environmental sample
  DOMAIN (33)...(162): HhH-GPD superfamily base excision DNA repair protein
  misc_feature (1)..(282): Xaa is any amino acid
MEIAEFKKIVFSNYRQAGRKFPWHFADPWGVMVSEFMLQQTRAERVIPYWENWVKLWPRPKALADASMENALRAWSGLGYNRRCRYLKESAAIIANENDGKVPETPQALLSLPGVGPYMSAAIACFAYNYPVVFIETNIRSAVIHCFFPNRNDVRDSEIIPILEAALDNDDPQPSPRGEGSPLDPRMWHYALMDYGAFLKKTTANPSRRSAHYTRQSRFSGSFRQARGKVIKALVSAGRCGAEELKLVSGLEEQKLYEVLEKLIKESFVAEDGGVYRIKDEA

SEQ ID NO: 87646 - protein, 215 aa, Unknown
  Obtained from environmental sample
  DOMAIN (128)...(215): Domain of unknown function (DUF1732)
  misc_feature (1)..(215): Xaa is any amino acid
LNVSVNVNAANAYMQAISGLASGLGLEEKLSLSMLIGMEGVLEIEKNRDDERYWALIEPVLTEAAGVFQAERIREGKHTEEDILNSISLIESALQTVEAHLPALESSIKENIKTRFKEISGGEIDEHRILAETAILLMKYTVSEEISRLSSHLAEFRAETAKNDRPGKKLDFLCQEINREINTIGSKSAIIEVTNEVVRMKETLENIREQLRNIE

SEQ ID NO: 87647 - protein, 146 aa, Unknown
  Obtained from environmental sample
  misc_feature (1)..(146): Xaa is any amino acid
INFERLIRLPGSDGDSECSALTLSNLKKVHALAESGIPPTGGSPADRLPFITTTPMNMARPPFEANEEPRGFIITNPPYGKRLGDIEASLEIYREMAVLAENFPGWKLAVISDHPGFESFFGRKADSCREITGGAVPAYFYQYEKL

SEQ ID NO: 87648 - protein, 442 aa, Unknown
  Obtained from environmental sample
  misc_feature (1)..(442): Xaa is any amino acid
MDLPDLFRTGVVDVEDYGVSQKLLVPLDSYLKDNMPNYYSRLFMNNADKPMYASDGKMYYIGNLTAQNVNHQGNHYINKTWLDKLGLAIPKTVDELTAVLRAFRDKAPNGNPQTVLPFSAGGEPKPITHFTQGLAPHFAMFGVPFYDNNGKGGYAAITAAKKVQLVTDYPGFRDAVEWLALCYREKLLDMEALTQDSNAWAVKMNAGNVGFTAYLRLINTALTAETAANFVSIIPPASKYGVQVPRLYEVPRQDATLTVKNAYIAQTLQWLDAQLETEMMMVGTNGPLREGGPIPPTMRILPDGRYDIISVPPNNGLYSIVPVYHALFFAPGDYYFKVYNMPPHRVERFESSKAYADAGVLESYSYTILESLIKPNNADSIELQRIYNDLNKLMQESLADFIRSGVTQAKWDTFIRTLTSVGAPRYIQLLQKYYDVYAASVK

SEQ ID NO: 87649 - protein, 413 aa, Unknown
  Obtained from environmental sample
  DOMAIN (22)...(274): Pyridoxal-dependent decarboxylase, pyridoxal binding domain
  misc_feature (1)..(413): Xaa is any amino acid
AVFNDEIIAIVNRFETPFHVYDEKGIRENARRLVAAFSWAPSFLEYFAVKAAPNPYLMKIFKQEGIGADCSSMAELSLAKRCGIVGENVMFTSNDTPSGEFKAAKDMGAVINLDDISHIPFLEEHAGLPDLVCIRYNPGTARTGNSIIGNPVEAKYGFTREQVFEGYTILRDKGVKRFGLHTMVASNELHYKYFVDTAVMLFELAAEVFRELGIKIEFVNLGGGIGIPYKPEQKAVDLEAVSAEMKAAYERIVVPAGLHPLKICLESARMMTGPYGFLVSKVLHVKKTYKHYVGLDACMANLMRPALYGAYHHITVIGKENEPANHIYDVTGSLCENNDKFAIDRKLPTIAPGDILVIHDAGAHGHAMGFNYNGKTRSAELLRRENGEVMEIRRAETLEDLFATLDFEKLEMF

SEQ ID NO: 87650 - protein, 338 aa, Unknown
  Obtained from environmental sample
  DOMAIN (34)...(220): tRNA synthetase class II core domain (G, H, P, S and T)
  misc_feature (1)..(338): Xaa is any amino acid
DYPEWYQQVIKAADLAENSPVRGCMVIKPWGYALWENIQRVLDGMFKATGHKNAYFPLFIPKSFLEKEAQHVEGFAKECAVVTHHRLQAGPDGKLVPAGELEEPLIVRPTSETIIGAMFAKWTQSYRDLPLLINQWANVVRWEMRTRLFLRTAEFLWQEGHTAHSTPKEAREETMKMLDVYGKFAEEYMAMPVIKGEKTESERFPGAISTYCIEAMMQDRKALQAGTSHFLGQNFSKASDIKFLDADGKDEYAWTTSWGVSTRLIGGLIMTHGDDDGLIVPPRLAPSHIVILPIVHDDASSSDVFEYCDKLAAELGNVRYDDRRIEAEVDKREGRGGD

SEQ ID NO: 87651 - protein, 284 aa, Unknown
  Obtained from environmental sample
  misc_feature (1)..(284): Xaa is any amino acid
MTRKQASTLSVMILAVIALTFLVSRRLWFRLDLTKGKSYTISAVSRSLHNEIQDRIRITYFLSDKLKAIHPLPGEIEDLLMEYAGFSRGKIQLTVKDPAKAKLTEVVEQLGIIPQQIQTVEQDQASVATVYTGIVIEYLDEIEVLPLVFSLETLEYDLTSRIRAMVRGNSRLLGILHGIDSRRFSESYQYLMSAFVQAGYQIRMISPGEEIPDTVPAVIALDGVESFDETTLYRLDRFIRNGGKVFFTVKGVYINTDGDLSAQPVSDMGLLQMLSSYGVTVLPE

SEQ ID NO: 87652 - protein, 606 aa, Unknown
  Obtained from environmental sample
  DOMAIN (6)...(450): Carbohydrate phosphorylase
  misc_feature (1)..(606): Xaa is any amino acid
SRMQQEVLLGIGGIRALRALGINPAATHMNEGHAAFLGLERVREIMTEKNFTFEEAREAIWPTNIFTTHTPVPAGNERFDISLVEKYFRSWPQILGISWKDFLGLGRINVNDDKETFCLTVLALKMAAYANGVAKLHGVVSRDMWQGLWPGVPINEVPIGHVTNGVHPRTWVSSGMIELLDRYFGPHFENKPTDLHIWDRMSRISDEELWRTHERRRERLVAFARDRIREQYKRTGAVERRVQQAEDALSPYALTLCFARRFATYKRGNLLLRDPERLLRLVRDNDRPIQLIFAGKAHPHDMPGKDLIRDIVHFAERYDVTSRIVFVENYDMTVAKYLTSGGDIWLNTPRRPMEASGTSGMKAAMNGVLNCSILDGWWDEAYNPEVGWAIGHGEQYADERLQDDIESKALYDLLERDIIPLFYQRGRDGLPREWIKRMKDCMRQIGQSMSCHRMLMDYSNNFYFPALKNYRKLIKDEYADAKSLAAYFGKLRDSWDSLKIVKIEANTKPIMQRGDSLNVTAHIDLGKMSPNDLLVELYYGAVSNQSTEITNAHRIEMKWVSNKDGLNQYHVRVECSDTGFQGHTVRILPKHEALIHPYRTGFIKWA

SEQ ID NO: 87653 - protein, 186 aa, Unknown
  Obtained from environmental sample
  misc_feature (1)..(186): Xaa is any amino acid
IWIAFSEAARIPELRKTTRDEPDYNKLMKFRLDILHNHNLKLPDIQKVISTLEPLPGAIEFTATLREKTQLIILSDTFEQFAKPLMKKLSWPVLFCNTLETADDGTITDYRLRQKNGKYEAVKAFKQMNLTVFAAGDSYNDLAMIKEADCGCLFRPPEAIRNEQVEIKCTDTYEDFMTEIDRFLSN

SEQ ID NO: 87654 - protein, 219 aa, Unknown
  Obtained from environmental sample
  DOMAIN (155)...(219): KH domain
  misc_feature (1)..(219): Xaa is any amino acid
MEVSERALEEGDLVLYVMDAVRAPGPEEDEIAALLSPLAEKTIIAVNKMDDPGADFTRAHEYIAQRFPAVKDRCFEVSANTGQGIDALLDALYDLAPEGEALYGDEYYTDQETGFRIAEIIREQAINRLRQELPHSLYVDIADMEFKEEKLWVRAFIIVERESQKGMVVGKGGEMIKTIRLAALKELKKIFDWKIDLDLRVKTGKDWRSRDHILKKLIN

SEQ ID NO: 87655 - protein, 315 aa, Unknown
  Obtained from environmental sample
  DOMAIN (10)...(315): UvrD/REP helicase
  misc_feature (1)..(315): Xaa is any amino acid
MEPNKDKVILNDEQQAAAYCDENAVVAAGAGSGKTMVLASRFAWLITERKCRVREILTLTFTKKAAAQMYRRIHLMLAEKAVNSGIKGKLAREALEEFAQARIQTLDSYSAAIVKQAANRYGISPDFSIDEELCLRLAHDEAMSFFISKRGHPAIQRLYPNKSPVSIANDIFASALFNYTHIDKRPNPMKDFAKQYDTICDEWREQSALIINILQKLTEANAENENYLPDLTPVISQFSTGGEPRFSEATPASASSAGGTGRIIFPNARQLSEYFKQLAEIPHNKIIEWTDSHPLQTTLTNIMEFLLSLISMSLV

SEQ ID NO: 87656 - protein, 390 aa, Unknown
  Obtained from environmental sample
  misc_feature (1)..(390): Xaa is any amino acid
AEKGQPFQLEISSGIASWAETEAIYAVSGGTVGRVFAREGEAVERDQVLFEMDFDIAAVERRYAEIGNNIGKLDADISGLRARLGNIRTALAATESDAGVEEQNAAAPAFTGQAGIIALEISKAKLALNNAQLAFELGSISKNDLINVENNLKALLFKYSAEADELELSLTSKLMDMENLKLSREAVRDLLRDYRNNAVIKAPASGIVLNLPVERGKFFPENALLVSIGVGLEFTVECSVSLDNNFISPGDTCELSNSSHVLSGTVRRIKPAVQGKTVIIAVASDEVAEGETFDITFEKNSAASFILVPNSAINQDNDGYFLYVIKRRKGIMGEEYYLERLNIFLGDSDYQNTAVIRGITFFEPIVMASNKALSAGLTVSLKNQEDFFEN

SEQ ID NO: 87657 - protein, 265 aa, Unknown
  Obtained from environmental sample
  misc_feature (1)..(265): Xaa is any amino acid
MRDLEDALRLAAGDMPFDEFTASFSASDRQEREQRLTALDAEMERQAQEERALVDALGELSARRSSLDAAAEELGGLRRQENALLESLRQLTLEYGRHALARQLIQNAKRNFERESQPAVIRAASSIFAAMTNGAWIGISASLDDSSLSALPPHGEAVLPEHLSRGTQEQLYLALRLAYIRNHAGHASALPVIMDDILVNFDPARASRTAQALTFLVQGLPPQDGQNAAPPHQALFFTCHPHVAEMLQNTVPGSALYRMGEGSIS

SEQ ID NO: 87658 - protein, 305 aa, Unknown
  Obtained from environmental sample
  DOMAIN (49)...(215): Patatin-like phospholipase
  misc_feature (1)..(305): Xaa is any amino acid
FWIILVTTLFSACANHNYSENNLKKITIETDKLLEINRNKNSEIINAALVLEGGALRSIYTSGVLDVFMENDIEFSFVIGVSAGALNAANYIPKHIGRSARINILHSNDPNYYGIKQFLLKGSAFNFNYLFYSPIKEIYPYDEKAFMTSNQRFLIGATDCETGKIVYFEKHNYTELVLALQASSSIPLLTKPVFIDNKICLDGSISEPIGIHKAFSEGFNKQVVILTKQFKNNSKTEWTSFPKFLSKITYKKYPEIIKLINNYSILYNSLIEEINTMENENKIFVIRPSREINIKTLERDVRRLI

SEQ ID NO: 87659 - protein, 292 aa, Unknown
  Obtained from environmental sample
  misc_feature (1)..(292): Xaa is any amino acid
TPEICLVAVQKDGMALQYVPEALRTQEICFTALQKGGWVQYVPEALRSIYFNTPSACLEMISKDYSKIQFVPESILTEEFCIDAIEVDVEVIRYLPVALRTEKVCHAVIEADWIWKLKQPPPQIDSLELCIELVKRNGEAIKFVPGKYLTEELCHIATGQSAKALKYVPWELRTPEMCLAAVRQNGTLFYHVPRGLRTPEICLAAVRYNHSIFEDVTETLRTPEFYLAAVQTLNSWTLEDVPETLQTPEFYLAAVKKYPGALEYAPETLQTPEFYRAAVQQNSQVLKYVPWA

SEQ ID NO: 87660 - protein, 162 aa, Unknown
  Obtained from environmental sample
  DOMAIN (17)...(162): Pyruvate flavodoxin/ferredoxin oxidoreductase, thiamine diP-binding domain
  misc_feature (1)..(162): Xaa is any amino acid
MTDRHLATLDGNEATASVAHRVNEVIAIYPITPSSNMGEYSDEWSAQGKTNIWGTVPAVVEMQSEGGAAGAVHGALQAGALATSFTASQGLLLFIPNMYLIAGELTPFVLHVSARTVATHALSIFGDHADVMACRQTGFAMLSSDSVQCAHDFALIAQSSTL

SEQ ID NO: 87661 - protein, 288 aa, Unknown
  Obtained from environmental sample
  misc_feature (1)..(288): Xaa is any amino acid
ICTWAHIRYIQKNGPKPIISQPCPAIVNYILIHKNELLKHLSPVHSPMLCTAVYMQKYEKVRTKIAALSPCVAKSYEFEATEMVDYNVTFRKLQKYLKTNNVMLPSKSTGFDNYNAGLGSLYPMPGGLKECVEHYIGKSLRVDKSEGPKIVYGALDEYAKQPLSKLPVLFDVLNCAEGCNAGTGCSHEIDIFEINTKMDALRQAAIKEDNIKYMDDLFKKFDETLRLEDFIRTYIPTTVKRISVSPEKIDAAFAAMGKFDDAAKKFDCAACGCETCLEMATKIAKGIN

SEQ ID NO: 87662 - protein, 573 aa, Unknown
  Obtained from environmental sample
  misc_feature (1)..(573): Xaa is any amino acid
LNPYTETNVTEGNSTQTIKDAANPQSIGSNIVRGGLYNAGTNRAMVRSGFIDPRSGSTTLNPRNGVYFKDADPSAPWQLINGLSLSDYPLKVATDAATGTDPNPERDKVSGKIILRGHAWDDQLIDEIRISINGATPFAILKLNNSGKMEAQPNYTDTAFVVEELHWKTGHSVEWAYIWDTEKDPASLNGGPSTAAAPVSIQVTVTDKNGGLSSASYTTTDETADAATSRKYHNTVSVDIVPYITGFERKTPDFTTKRSLQGWYSFYQGETGIKVNGYNFGTTTTTTVTINGVNMTTTGGPAANSEKTNPTQRTFAINETGVTSGAIMVWFGGTSTTGTPAYNNNSTTANKSWNSDFNNTTPGSDLWMNKPYAHIWRTLDGTGTTAEQAAGTYFGANNDSAGLDRPGMSLQYTASSNAVGGGNGIGRLHGVWTAYGRESFLYAQNTATRPPYFDNSITNPNIGNATSGQGNGNWVRSGSVLLVKSGEPYSAGDIDYYNNPNSADFRNNISAVAAYQRDGGPWLILKPRLTAIVFNNNNSSDGGGTDGGYSITRESNPVSTYRWENTRIKKTAV

SEQ ID NO: 87663 - protein, 699 aa, Unknown
  Obtained from environmental sample
  DOMAIN (415)...(480): His Kinase A (phosphoacceptor) domain
  misc_feature (1)..(699): Xaa is any amino acid
MKKRGVAALYNADMLETYVQRYKDEICDPITEAARAGDYEKAIEILSSTGELVNEIRSHVIALRNLATAVAERSSNGAQVTAGQSIIMLGIASVIAIVVSIILAMLIASFITAALRDKESALRDKESALLTVSTMFKSSPQMNILFDDRLNVIDCNPGAVKFLGFNTREELFDGFHSRVNKSIPEILSNGQRSLTLDEQLKKTIKEGEAKIETELHFEDGIRRLSVDFRKIPYKGRFAVVGSIFDMTEIFQREMMLAHAREVNELQLTKLNLVVKASKIGLWDMEVVRDDPVNPSNTFMWSNEFRHMLGYTDENDFPNLLSSWSNLLHPQDKEATLNAFEKHILDKTGKSPYDVEYRLLRKTGEYAYYRASGETIRDKDGNAIRVAGALMDITDTKNMLLIKDRQKAEAEAASRAKSTFLANMSHEIRTPMNAIIGMIKIGKSALDIERKDYCFMKIEDAANHLLGVINDILDMSKIEANKFELSETEFEFERMLRRVVNVATFRIDEKRQKFSVNIDHSIPHTFIGDDQRIAQVITNLLGNAVKFTPEQGEISLTVRLKEKADDLCTLQISVSDTGIGISPEQQAKLFQSFEQAESSTTRKYGGTGLGLAISKSIIELMGGKIWIESELNKGSTFFFTIQLRRGTNEKHRLLSSDINSKNVRIMAVDDDPDVLVYFNEISHGFSMMCDTAISGEEALN

SEQ ID NO: 87664 - protein, 919 aa, Unknown
  Obtained from environmental sample
  DOMAIN (758)...(833): Hpt domain
  misc_feature (1)..(919): Xaa is any amino acid
TDVKLDSARFSGAYSEVVESINTFTDVLLEAQKSALLTVSTMFESNPQINLLFNDKLKLIDCNPEASRFLHFKTKEEMLEGFHDRMSKIIPKVRSDGQPSMSLEEQLKVAADEGRANLETEIHFEDGIRRLVVNLRKIPYKGSFAIVAYVFNITEIFQREMQLSHAMELNELQLAKLNLVVQGTKIGLWDMEVVMEDPVNPNNVFVWSKEFRNMLGYTDEKDFPNILSSWSDLLHPEDKERTLNAFANHMLDTTGKTPYDVEYRLKRKTGEYAYYRASGESIRDRRGNAIRVAGALMDITETKNMLIEKDRQRAEAEAANRSKSTFLANMSHELRTPLNVIIGLTGLVIEDKRLDKHVTDNLIKVSNAGSTLLSIVNDILDFSKIESGKLELTPDEYYTASMINDTVTLTLARIGEKNIKFHLNIDDNLPHKLYGDDLRVKQIFTNLLTNAVKYTDEGSINLNVRCEHESDTVWVNAAISDTGIGISEDAMKDLFQDYHRIDSKSNHHVEGTGLGLSITKNLVEMMGGKIKVESEIGKGSTFSFRIKQGFVSEAVLGADISDKLRNFCYTDDKRVVSQKQVRIDLSYAKVLVVDDITMNLDVASGILSSYKMQVDCLTSGQAALDRIQSGTPVYNAIFMDHMMPGMDGIETVDRIRALGTEYAKKIPVIALTANAIKGTEKLFLEHDFQAFISKPIDISEMDAALKKWVRDETVAEVVIEDKLSETELQFEKQVIEIPGVDTKKGLSLYGGEKKIYLPMLHSYTQNTPKVLEKLRSVSAENLHEYVITVHGLKGTSAAIGAEHIQAAALELENLSRSGDLQGVLAKNDKLIADTQVVVANVTEWLDKNDIHEKKPRMKAPDPELLAKLRQCCESYDMSGIDDIMLELDKNDYEEGADLVAWLKEKIDISEIGEAAERLL

SEQ ID NO: 87665 - protein, 395 aa, Unknown
  Obtained from environmental sample
  misc_feature (1)..(395): Xaa is any amino acid
MPSLSDLEKFKASFKPLGLELQTLRDLDLPFDDLPLPDREPESGPALAAESEGTGDASAEAAGEPYSPPDGEPTGGMDLFGDLGDLLGGGAADLPVDETPTETDLGNSIDTIPDDITPDIDISNGEESTPPDLLNGFADEIEAERASSGEEGAENEISDSDFSNEDFSDLGDLGLPEQGQEDQDSGLPDFNLDDFGLPADETAADGSGETVTPDETNRGMDDFPDFSSDESMEMFGEEAPVSENTPDDSGSTETDESAPDLSDLDLGNFDDFGGGEGQEASGEEQPVSEDALGDILSEPQAEETGGMDFSGLDLDMPDFGASEGPAPAGESDSFDAAGTESDDDSFDFGGEIPDVGAEATLEEISEDSFDKFSPETGSLGDGFDVDAGDEFGSLE

SEQ ID NO: 87666 - protein, 460 aa, Unknown
  Obtained from environmental sample
  misc_feature (1)..(460): Xaa is any amino acid
VVENELKSWARVQLSGGGFPYWPSGTEADFYVSLRIAHIIAIARSKKMSVPTSLNIADLNSYLTREYQRLQGWRSNSSTYYYQSYLQSYMLYVQSLLGEKVDPSRLAEILSRDNVDPSVLAFAGMTYRALGRNADAANTAQRLRNLVRMSTRGADITDPLERYRYSYYGGMVEQLALTLQFFVDQYPGDDINTRLLFSLLENKRSNRGYWESTAVTVRVLAAVDALIRAENLINLDVNGTVTLAGTELLKGAFKGLGAKPVTQTLDFTGPVLSGLPRDSLQSLNFTRRGRGNIYYTVSLRYAIPFELQTFRDEGIGVFMSLYDINTNEEIKGTALQNGKTYRARVRVSSNRDRTYVALRVPVPSGAEILDATFVTTASYGDRGGTSGNEQIRSSSWLSNQFILDNEIQYFWDHFNKGESTVSFLFRTARRGVYPTPPVQAECMYEAEIFGRGSGVLYTIE

SEQ ID NO: 87667 - protein, 463 aa, Unknown
  Obtained from environmental sample
  misc_feature (1)..(463): Xaa is any amino acid
AHVNQLEFEGVTAPIDSVESDGSGEKTYTISADDSTNNVITIIAVFNHTDLTADPIAFTTNDKGHITTTYGEASFINAVKAGHQGTGAITYHSNTPTVATVNSSGQVTILKAGSAVISAEKAADGTYASAQTTYTLTVNRKPVTITGVTANSKTYDGTTVATPSGTAVVNGKVGSDVVTVTAGSALFVDKNVGTGKTVTFSGYSLGGGDASNYTLSAQPASVTANITAKSVTITGLSAANKTYDGNATATVSGTAAVSGKVGSEDVTVTAGTASFANKNVGTGKTVSFSGYSLGGADVGNYTLSGQPASVTANITAKSVTITGLSASNKVYDGNSTATATGTAAISGLVGSDNVTVIAGTASFANKNVGTGKTVTFINYSLGSTDAGNYTPAQPASVTANITRKPVTITGLGAANKNYDGNTTATITGTATLNGVISGDNVNVVLGSASFANATVGNNKTVTF

SEQ ID NO: 87668 - protein, 309 aa, Unknown
  Obtained from environmental sample
  misc_feature (1)..(309): Xaa is any amino acid
DEVNLINGTVSFANKNAGTDKPVTFSGFSLSGTDASNYTLSQLVSLTANITPKPVTITDITAINRDYNGTTTIELRGGVLNGVVNGDKVGIGTGTVASPDVGNNKAVTNITLTGTDASNYTLESQPASLTANITPKPLTITGITAAHRIYDNGTSAIVLNGGTLNGVLSGDTVGFILGTGTVAATGVGTNKPVTTNITLTGTDSPNYTLTQPTDVIVPIITPILSNRENPLIGRIGVQTKGNTIILSNLHPNEKVELYNLQGKLIFSSGKSSNRVNDHPADVRQRVSSVWAWGSDKSRHTPSAERQTPL

SEQ ID NO: 87669 - protein, 125 aa, Unknown
  Obtained from environmental sample
  misc_feature (1)..(125): Xaa is any amino acid
EECEKRLAGYQSGLILQTTGNTEDSFDFESMTRIGEDHNGHLYNFQEKLNSFFSGEKSWLLLGSGPCKICEQCSYPESLCNYPEKMIVPVEAMGIVVSDLCSGSDIRYYYGPGTLTYTGCVLWNL

SEQ ID NO: 87670 - protein, 539 aa, Unknown
  Obtained from environmental sample
  DOMAIN (275)...(495): Methyl-accepting chemotaxis protein (MCP) signaling domain
  misc_feature (1)..(539): Xaa is any amino acid
GLNEVVGAIGCQLDISMIQPRVEQTIKDFDEVTSMVVYSDNGFVLGNYLPEFIGKQIDTETQYGPYLNEVKDVIKNAKEWEGKAYDPELKTNMVMAVANIPIGVSPTTWSVMVGSTEAYILKDVNAMKNFVIVLASIALTVAVALIYLVLSRTTTPIVKVADTLKDISEGEGDLTRTITVNSNDEIGDLALYFNKTLEKIKNMIIHIKDEANGLTEIGNDLAGNMTETAAAVNEITANIQSIKGRVISQSASVTQTNATMEQVITNINKLNDHVEDQSNNISQASSAIEQMVANVNSVTQTLVKNADNVNMLKEASEAGRGGLQGVAADIQEIARKSEDLLKINSVMKDIASQTNLLSMNAAIEAAHAGDAGRGFAVVADEIRKLAESSSEQSKTIGGVLKNIKESIDKITLSTKDVLNGFEEIDSSVKTVVEQEDNIRNAMEEQGEGSRQILDGISNVNEVTRQVKGGSEQMLEGSKEVINESHNLETVTQEITGGMNEMASGAEQVNVAVHHVNEICVKNRERIGALIQEVSRFKVA

SEQ ID NO: 87671 - protein, 180 aa, Unknown
  Obtained from environmental sample
  DOMAIN (11)...(45): Putative Fe-S cluster
  misc_feature (1)..(180): Xaa is any amino acid
MALTGLDIFKLLPKTNCKKCEFPTCLAFAMAMANGKASLDNCPDVSAEAKETLGAASAPPVRTIKVGVGEQERVMGDETVLFRHDKTFYHPTLVAIQLCDSMSDADIDAKIAKINDLKMERVGQHISVDLVAVGNCSGDVAKFKALVEKVAAKVPYALLLDSEKVDALAAALDVVGAKKP

SEQ ID NO: 87672 - protein, 116 aa, Unknown
  Obtained from environmental sample
  misc_feature (1)..(116): Xaa is any amino acid
MPWRLILFIVIFAIFLAFITVNLDNRCNINIGFAQFEGVPIFLTVFISFFLGLVCATPLFLHLSKKRKGFLRKDKNKTDDTPSAPLTDAEFDEKIKKDAASARERLFAKKEARDDK

SEQ ID NO: 87673 - protein, 324 aa, Unknown
  Obtained from environmental sample
  DOMAIN (278)...(324): Phosphoribosyl-AMP cyclohydrolase
  misc_feature (1)..(324): Xaa is any amino acid
MVIASIDIQGGKVVQLRQGSELVLQRDNPLELATEFDRYGEIAVIDLDAAMGKGSNLEMIKPILRKAECRVGGGIKTPQQAQELVSLGARKIIIGSCAFRDMSKKGAGVAGGEFAVNIPFLETMSKKIGRQRLIVAVDARAGEIVVDGWKTPTGLNLIEAAKLVEPFAGELLFTCVEREGTMTGIDLAPVRKLREAVSCQITVAGGVSTLAEVEEIAAIGCDVQLGMALYTGKINLSDAFTVSLNWKKGEIPTSDSLLPTPHSLLPIIVQATDGQVLMTGFTDKEALAETFKRGNVCFHSRTRNKLWMKGENSGNVLKLIRLRT

SEQ ID NO: 87674 - protein, 86 aa, Unknown
  Obtained from environmental sample
  misc_feature (1)..(86): Xaa is any amino acid
MKKRKLASAIGYKSGDFAPALLAAGRDREAEQIIAVAQKAGVAVVEDEALAVLLDTSAKTGDFIPPWCWEAAAKILAFVIKTDNRA

SEQ ID NO: 87675 - protein, 141 aa, Unknown
  Obtained from environmental sample
  DOMAIN (18)...(117): PilZ domain
  misc_feature (1)..(141): Xaa is any amino acid
MPEYSSYATLDFFIALNSPRERGRYRVVAEGLALYLEDMAEKFDIHDCSSAGCSLHAPAKLFTVGKIFDGDLHVGNSGYLAGLKSKVVRHIADNSVACAFQSLTRRQEIMLDKLLLEMQKRSIATQATQRKGKHRWRHMLL

SEQ ID NO: 87676 - protein, 234 aa, Unknown
  Obtained from environmental sample
  misc_feature (1)..(234): Xaa is any amino acid
MSGKRISILIGIAIPMILFSCGGSGEKKVNVEELKEKVLQSVQSFITSDKSYMMYMMKVESITLNAPDSDSKASSLRGSVAILQGNKTYLVPFAVSANLEGLDWKAAFKDVFPPVPMVFVEGGTFTMGCADDKECQKNEKPTHSVTLGSFYIGKYEITQRQWNTVMADQNASNTSRLDYIFGDIHNSDELRKLLNADRKWTNFRGDDLPVENVSWDDIQKFLAKLNEKTGKQFR

SEQ ID NO: 87677 - protein, 329 aa, Unknown
  Obtained from environmental sample
  misc_feature (1)..(329): Xaa is any amino acid
ENIKIIYYSPSGLLHKIAFGALPTGEDDDSDEDIKRLADKYDLNLVSSTREVVHLDRSNEEKTQVGSAVLYGGLDYDANEETMRLAAQLYKKENVTIAASAPPEGLTRGGAWVSLPATRIEAQNIQGYLNEKQVPNTLYQDSYGNEESFKQLDGKKTGLIHLATHGFFLADVERRNDEREQQQRGSVLKALENPLLRSGLLLAGGNHAWTNKPVEGVESGILTADKIAGMNLLGAKLVVMSACQTGLGDVNNSEGVFGLQRAFKLAGVETLIMSLWEVDDAATSLLMSTFYQEWLISGKSRQEAFKEAQKKVRAKYPAPFYWAAFVMMD

SEQ ID NO: 87678 - protein, 346 aa, Unknown
  Obtained from environmental sample
  DOMAIN (14)...(64): Clp amino terminal domain
  misc_feature (1)..(346): Xaa is any amino acid
MKVSGHVQAIIDAAYNEAKVRKHEYLTPEHILYAALAFDEVQGVLFSCGADLAQIKHGMENFFEQKMTTSFGEPTKTVGFHNVIERALIHCKSAQKDMIDVADILVSLYDEERCYSGYYLRKAGIRRLELLQVLSHSYGNDPFLNSQRGEKFAGVDDDADAQKKAGKKTMLERYAIDLTALAKEQKLEPVIGREDELDRTVQVLCRRMKNNPIHVGDSGVGKTAITEGLAQRIVAGNVPPLLKNFSIYALDMGTLLAGTKYRGDFEERVKRVVEELLKKEKTILFIDEIHTLVGAGAVSGGAMDASNLLKPALTSGKLRCIGSTTHEEYHKFFEKRPRTFKAFPKN

SEQ ID NO: 87679 - protein, 83 aa, Unknown
  Obtained from environmental sample
  DOMAIN (1)...(78): GIY-YIG catalytic domain
  misc_feature (1)..(83): Xaa is any amino acid
MYYVYVIQNEAKKFYLGYTENLEKRLTDHNEGGTESTKNHKWELVYYEAYSNKRYAYEREQTLKKNRRMKTLLLKRIKESLSY

SEQ ID NO: 87680 - protein, 377 aa, Unknown
  Obtained from environmental sample
  DOMAIN (57)...(329): Endonuclease/Exonuclease/phosphatase family
  misc_feature (1)..(377): Xaa is any amino acid
MKRRIAIIIIIITVLTVTAVAMYYYGNGDNRGLADPTRSVMVNKKTKIPPRPLPDTITTAFYNVENLFDFNLDGSEYDEFKPGWHGWSAEMQKKRLNSAAQVVAAVGADVMGLCEIENKNALRELGSALDNMGMPYPYAAAADAGGGATTTALLSKFPIVEKRDLPVSGSRSILEAAVARGGDTLRFFVNHWPSKRHPESARAAAAQTLRRRLDSLQAGADYVVIGDFNSNYDEYASFRSSGHDDTRGETGINHTMKTVVAGRSPRVSREIRLRPRTAVLRRLPLQPVARRGGELTYELRLQGRQEYHRQYATAGGALRHRRILVLARFFPRLHLGGTADEGRRAVPLANVLQGKGEVPQGRGLLRPSPDNRPLGEI

SEQ ID NO: 87681 - protein, 244 aa, Unknown
  Obtained from environmental sample
  misc_feature (1)..(244): Xaa is any amino acid
MSYVYRGAKNTIDNMLLPAALFDTAGYSYLPGSFRAFTWEGRLMRDGAPYRWQMYYKGKEKYHKGEGYSDHLPIIARLARSKLLSDSINCADVNPTLAIGDFAASTDGWLSGDSRFSVERDGKHAKTGSHSLRISGLHESENRTAARATLTSTPSQKFLTLNIRGEGKLSIRLRRPNEKWSYHNAPDFGAKKTAKYNAWKSERWTALKLPLPPLNNANSDDVEVEIRAGKGEKFLVWIDRVRLE

SEQ ID NO: 87682 - protein, 399 aa, Unknown
  Obtained from environmental sample
  misc_feature (1)..(399): Xaa is any amino acid
ETGYNPEKQKDIFDGIYTGTETRNPKYDQQHLQRYMSYSIVRYLENVSPGRNGGGWIDSYGLSDDISGWIEQAEFTLFAKAREMMLFNFFDMINSAFLPPLTPRFNRLNSVIKQCGKPKGVRLYEPYNADGEDQLVTYLGMIGIPFEPSPDFAASDSSDSTESVVFLPASAAKDEKIMQKLEKYVRSGNTAIITAGFFNECLERGIKDMTSVRPTGRTVSGSEYWVQPYGEKRLVFAGAEKIQIEALDYKTNASWCEIAMMTPYNSFPLLTLDFYGKGNLYILNVPNDFGDLFSLPKEVAGYINKIFAHGNLYMQCRPRMCMFMYDNDVIGIYSQKPYADDVEIILPAKYSTVRDIETGAEITLVPDSAKKRFIGEPEAPSKIARVYIPGGTYRFFKLT

SEQ ID NO: 87683 - protein, 70 aa, Unknown
  Obtained from environmental sample
  misc_feature (1)..(70): Xaa is any amino acid
IPALYRAGTFGLDERGTFVNPANGVKVQGWMAQDIDGTQFLDTSRALEDLIIPDRGKRRGQGNHTGEFRL

SEQ ID NO: 87684 - protein, 292 aa, Unknown
  Obtained from environmental sample
  DOMAIN (21)...(172): Flagellar basal body protein FlaE
  misc_feature (1)..(292): Xaa is any amino acid
VNFACNLDKRTPEVPEGATALQAREGTWSTHEKIYDSFSDMHVLHVEFTRVPGVNNTWTAWVSVDPQNEAPTNASAALGDAPPAAGGPDVFTINFINQGTILNAIDGAGNESNAGQVIMNVAYDVQSATVGDDGAMIRQNFRLNLGTVGGLVNSMTQYAERSSSKIVQQDGYSMGYMESFKIDNSGIITGVFTNGTNRTLGQVAMASFPNQGGLEKAGDNNFKKTSNSGNANISPSGIAGKGTIKSGVLEMSNVDLADQFTDMIVTQRGFQASSRTIQTADQLLQEILTLKR

SEQ ID NO: 87685 - protein, 65 aa, Unknown
  Obtained from environmental sample
  DOMAIN (1)...(60): Flagellar protein (FlbD)
  misc_feature (1)..(65): Xaa is any amino acid
MIKVTRLNGLEYYINPHHIESIELHPDTTLLMLSGKHVVVRETVEDIIDRIVEYRSRIGGFKNEE

SEQ ID NO: 87686 - protein, 158 aa, Unknown
  Obtained from environmental sample
  misc_feature (1)..(158): Xaa is any amino acid
VAKKKKKELGGASQEWLTTYSDMVTLMLCFFVALFNPDDVDPTQLQALISNFINAGLGAQSGGNTLSVGKSADLGNTVNSLPAMDRGKSLGTSLRKAVSLFQPEVKSNQVKVTSEERGLVITLASDAFFNPASARVNMKKQGKSCFVWLRFLIQTKSV

SEQ ID NO: 87687 - protein, 386 aa, Unknown
  Obtained from environmental sample
  misc_feature (1)..(386): Xaa is any amino acid
EHTAGFWNAPTAAAMPGTVSLFTLDLLGDRRDCVILTGMDAQGKHTLTAFHKVENENLNRPFIKIAEIQVDGSINIQETERPMAYRQGIAKGQPFAIIAYGRDNSSDNVLDRIEIEYTYNPARGFYEQGRITRIPGSQVEQRRVREILSGKSKVFEEFINDLWYHVSPAGTVDKSQYLYFDPANREIIFYGEETQQIFRWQSSNSTPYGIYITSQNNAVTTLRRFLDIELESLDSIRMKVFEDVRLKIGISASWDGSYRRAGKVYEDNSPRAPYTEASYDSSMGRLRFYANGDYELNSSGQSEKGRYAFFRINDKDMLELRPDRGANLLPAQNSEDRMIYRIAVPANAGNRAGTQNPENFSLIRVRLSPSGIQDLQEGQIFLTKVR

SEQ ID NO: 87688 - protein, 289 aa, Unknown
  Obtained from environmental sample
  DOMAIN (2)...(285): RecF/RecN/SMC N terminal domain
  misc_feature (1)..(289): Xaa is any amino acid
MRLLSLELHGFKSFADPQKLVFPGGMTAVVGPNGCGKSNISDALAWVLGEQRASLLRGTEMADVVFAGTSERKAMNMAEVKLTLEMPDVVRPEAMLEMTISRRLFRESGSEYRINGKECRLRDVQDLLMDTGMGTRAYSFIQQGQIDLILSTKPKDRRQLLEEAAGIMRYKVRRQEAERRLDEVRTNLQRLDDILFEKVKTQDSLKRQAAKTRRALELDKAITATKRILLYGEVVAHEEAREAVSLDLHNSETQIAQLTAQAAESASEVERQRLALDKLHDQKKQQTEQ

SEQ ID NO: 87689 - protein, 125 aa, Unknown
  Obtained from environmental sample
  misc_feature (1)..(125): Xaa is any amino acid
MYVAVTRAEDLLYIMLPLGLIDRWSGALSAPSRFLADLPPGSGLAGLSENRRPPAPRRPWPDQLPVNTPAARKDFLTDLTAGQRVSHPVYGAGRVTEILGPRAVIDFDLFGKKNVIIQYAKLVKT

SEQ ID NO: 87690 - protein, 299 aa, Unknown
  Obtained from environmental sample
  DOMAIN (42)...(267): Mur ligase middle domain
  misc_feature (1)..(299): Xaa is any amino acid
MTYQKEIQRLFDLQKFGMKFGLEGMRTLLARLGDPQRGLKLIHLAGTNGKGSVGVMLKCGLDEAGYRTGFYTSPHLVTFRERIVIGQDLISESEVLRLLSRIWPQVDPKSPPTFFEFVTAMAFLYFQEQGVEAAVIEAGLGGRLDSTNVIEPLASAITNVTLEHTEHLGDTISAIAAEKAGVIKPGRPLVTGRLNSEAEAVIARTAAEKNSPWLALGRDFETAAAGRDEAGRPLFRFTFNGETWDGLPLVLAGAHQLDNAAVALALGRLLQTRGFELRAEHFRAGLARAVWPGRAESWP

SEQ ID NO: 87691 - protein, 435 aa, Unknown
  Obtained from environmental sample
  DOMAIN (346)...(435): ATP synthase alpha/beta chain, C terminal domain
  misc_feature (1)..(435): Xaa is any amino acid
VVAVYDREGGRRLGRVVDLSGNWTAVQIFGSTTGLSSADSRVEFLGEPMTLRVGPGLLGRVFNGLGEQVDGCGNIFSSTCLDVNGLPINPYARTYPKDFIQTGISAIDGMNTLIRGQKLPIFSGNGLPHNRLAAQIVRQAKIIEAGNADSSKAAEQFVIVFCAMGVKYDVARFFLDDFESSGVLANVVVFLSLADAPSMERLVAPRCALTAAEYLAYEKDMHVLVVMTDMTNYCEALREVSSIRGEVPSRKGYPGYLYSDLASLYERAGKIKNSSGSITQLPILTMPNDDISHPIPDLSGYITEGQIVLDRELFQRGIYPPVAGLPSLSRLMKDGIGPGMTREDHKDVASQLFAAYSKVKQVRNLVSIIGEEELSETDKCYLKYGEDFERMFLIQGDNENRTIAQTLDLGWEVLRTLPRDELLRINQEFLKKYLP

SEQ ID NO: 87692 - protein, 279 aa, Unknown
  Obtained from environmental sample
  misc_feature (1)..(279): Xaa is any amino acid
MPTPTRAGYRFDGWFTAATGGAEIMADHVFTANTTVYARWTAVTYNITFDPNGGTRTAATSATTGTGGRLASLPATSNEGYVFEGWYTEPSGGVKVTTSTAFDGDATIYAQWTPIYVITFDPNGGAVTPTTAKTGSGGKLASLPTPSLKDYTFVGWYTEEEGGIRITTATAFDEDAVVFAHWSLLSNAAVTFTAGANGTLRAAVDGNPITAGASVGIGKDIVFTATPNEGYKVARWTINGIDMADTVYTYVHAGLSNTTTVSVTFERRAISIAESNREI

SEQ ID NO: 87693 - protein, 213 aa, Unknown
  Obtained from environmental sample
  DOMAIN (45)...(172): Acyltransferase
  misc_feature (1)..(213): Xaa is any amino acid
MIFLTPFGLAGFLISLLGLRKPMSVYMYWIGIIWARSLILVSRCEVTVKGRENIPSGGGICFVSNHGSLFDIALLLAYARRPFGFVAKKELVFVPFLNIWIYMLGGLFINRKNPRKAMKTINSGIEKIKEGGAMIIFPEGHRSRGRGLLPFHPGSFKLATQSKAIIVPVALKGTWEVFEKNYRVNPGPVSVTFCKPVNTADLPAEDRKQVWRK

SEQ ID NO: 87694 - protein, 564 aa, Unknown
  Obtained from environmental sample
  misc_feature (1)..(564): Xaa is any amino acid
MSFQFQAATIFSGTDQMSHAVKKMQTNTEKAAGKMGKNFDAAGNRADALKNKIGSIGDIAKGVAIGSLIAKGVTMAAGAMKNLIASVGQYADRVDGMRISAQKIGVGIQDFQRLQWAAESNGVSVEKLSAGYNALNKNLGQFQLSKGSLYEHMEKAGLKTLHDQIKTAKTNSEAFNMLADAIANETDIAKRAALGNAAFGKSWAELYPMLAKGAEGIQKAGESIPVLLDDRQIAAAKLWNSTLGEVKKNVQGFGDVLRNAVINVAGKYLLQLKEWLIKNREWLNQKIAEYVQKIAKGIKDAVTFVQKIVKFFKEWGHTILVIGGAVAVLWGIVSAIIAIQNAIVAVKAAMAVLNIIMAANPIGLIITAVALLILGFIVLTKKVGGLVPALEVVGQTMIANLLIPLNYIIDAVQGLTYALSHVPGMDWAKLTSEKIGAFQDKMNIFLTGGTATTLESAVKGAKAGYGEGGIPEAVKGAAKGLASPLTQSYTQHREKYLNENPEDDADYKKWEAMIGKFDEMIKAQGETTGAVVDLRRSEQAEASAIRWRGMGKEDYWETLRMGMY

SEQ ID NO: 87695 - protein, 455 aa, Unknown
  Obtained from environmental sample
  DOMAIN (271)...(413): Phosphoribosyl transferase domain
  misc_feature (1)..(455): Xaa is any amino acid
VFDFYIPLVLINDKLSEECAVFGVNLTTDEAVGVTYNGLLSLQHRGQEGAGIAVVEDGRIFCHKNIGLVSEVFSAKNLETLPKGNVAVGHNRYSTTGGNIKENVGPFVTEYLTGRLATAHNGNITNAKEIRKMLKSYGVRFDATSDSEVVSALIAYCITKTQSAILGVVKATDSLQGAFSLVIASGKHKLIAVRDPNGFRPLCIGENEIGCAVASESCALDTCGFKFVRDVQPGEVVVIENGKIAYQGKLAEKEKTGGLCIFEYVYFARPDSIIDSLSVYEARYNMGYILAEEYPVDADVVCGVPDSGLDAASGYSAKSGIPLAAGFVKSRYIGRSFIYPTQTQRDSAVMLKLNPLTVNIRGKRVVLVDDSIVRGTTIEKIVQRLKNVGAREIHIRISSPPFRYTCHYGTDIDNEENLIANKMSLDEICKKIGADSLGYISLDGLKKALRKMCFA

SEQ ID NO: 87696 - protein, 298 aa, Unknown
  Obtained from environmental sample
  DOMAIN (104)...(290): Peptidase M16 inactive domain
  misc_feature (1)..(298): Xaa is any amino acid
NAITFPDKTVYPASSTNEHDYFNLMSVYGEAVFRPLLPEWTFMQEGHRMEYQNGKLAITGVVYNEMKGAYSSLDTYAGLWSVKAVMPDTPYGFESGGDPQAIPQLTLEGLKKFHRSRYSPANCRIFLAGNIPTEKQLAFLNDEFFSKLEGGKACDPIVKTQRWKEPKKIHVQCPSGSERTSTIFLSWLCSDVTDINENIALVALAEILLGHDGSPLTRTLIESGLGEDITPVSGFESEIRETLFIAGLRGVKGNVKKKSEAIEKLIMGEFRRLVNEGIPPEEIEAALLSLEFSQREIR

SEQ ID NO: 87697 - protein, 318 aa, Unknown
  Obtained from environmental sample
  misc_feature (1)..(318): Xaa is any amino acid
MGNIVRHGIEMYKQTMSLPSENKAANVPAQRLPNNAPAVFFKEAKKQKPPVFVPENEISQESKYRRVAKFLILIGSEQAAGILAELDPDQVSEISKEIALVNIIKPDEKDQILAEFYSLSSKPFNYYGSSRGGMETARRILYAAKGPEEGEEILNRAIPKSKENLFGFLEEYSAEQLVTLLKDETDQTAALLLSRMTAKLSAETLSKLPPHRKALILKRIAHQSEVAPEVLEQVSAAIKEKIRNISVVSNDIKIDGMQTLAAILKQGDYSFGDKLINEIEKKDPLIGQNLKEKLYTLDDVLLAVDCPIQDKLSTMTDH

SEQ ID NO: 87698 - protein, 277 aa, Unknown
  Obtained from environmental sample
  DOMAIN (50)...(217): Glycosyl transferase family 2
  misc_feature (1)..(277): Xaa is any amino acid
MLLRIFEAMFWGSLVVVAYSYLLYPAMLTLFAWLFKRPVRCSDDYLPTVGILVPAYNEEKVIARKISNVLSMDYPPDKISVWVGSDCSDDGTDGIVKSIIGSDPRVHFWRSPERGGKTGIINGLVPQMEGEVVLLTDANTMHRRDCLRAMVKHFFDPTVGGVAGHIEHKLSAGSENAETVYRSFESYQKVMEGCLHSTISAFGGSYAIRRSLFKPIPKNAYSNDDVLIPMNIIRQGYRVIYEIDAVSEEDMTDKVSSEFQRRVRIGAGNFQSFLWLL

SEQ ID NO: 87699 - protein, 142 aa, Unknown
  Obtained from environmental sample
  misc_feature (1)..(142): Xaa is any amino acid
MKKRVLIFLLLNVSCIIYAQQLTRFAVVDMPKVYTAFFRDSRVVRQFEEKSAKVQSDIDKMTKEIQDLRSRHADALLRDDQSEVLRLENLIYRRSEYLREFYQTKTAELENEKKKLMQSGSFLEQVYDEIRYIAESESYSMV

SEQ ID NO: 87700 - protein, 502 aa, Unknown
  Obtained from environmental sample
  DOMAIN (1)...(134): MutS domain II
  misc_feature (1)..(502): Xaa is any amino acid
YICCLADAGNAFSFSYIDLSTGEFFTSGIPADSPEILRQELERLQIKEILIQESLLEENKQVAAAFYDRSGILLNRWADWLFDPVQAKSRLEKQFGLANLKSFGLDAGSAQIISAGTLLEYLDTTSKSLLPHIRTLKVYSDSEYLGIDESSQRNLELLCNQRDGETRFSLLEVMDETRCAMGRRLLKRRILHPLRDLNAIQARLDMVERLYRDQGKLGSLRELLGKTPDLERLCSRLAMDRAHGRDMLAVKNAIFSFNSVMELGFSKNINFESAGTQEEDNFDSLLQIHELLEKGICEDPAVVLNEGNLIKDGFNAELDQFRSLRDKGRQFIEDYLNEEREATGIQSLKIRYNRLIGYFFEVTKAHLAKVPKHFIRRQGITGGERYSTERLAELESEINGASDRVVELEKKLFLEIRDQVKKYLAHLSAAARRLAELDCAQSLAKAAGIRGWTRPVLNETGNLEIIEGRHPVVEAHLGRGEYIPNDIILNTCEGGISFAMIT

SEQ ID NO: 87701 - protein, 189 aa, Unknown
  Obtained from environmental sample
  DOMAIN (1)...(179): ABC transporter
  misc_feature (1)..(189): Xaa is any amino acid
VGKSGAGKSTLLSLLSGLDVASSGRINYGGENLAEINRNRYRAQKAGIVFQGLNLLTNVTAIDNIVLSMNISGVTGVDKKARAHELLKKVGISPEKANRKILKLSGGEQQRIGIARALAHDPVLIVADEPTGNLDKDIEAKVLKIFESLAHSEGKCVIIVTHSKKVTTIADEIWGLDKGVFRKLPVNKK

SEQ ID NO: 87702 - protein, 551 aa, Unknown
  Obtained from environmental sample
  DOMAIN (56)...(79): 4Fe-4S binding domain
  misc_feature (1)..(551): Xaa is any amino acid
MKKPFATAKDSWIRDVLGTMSIQEGDSLAVSKIPEDGTFPTATTQYEKRSVAEQVPVWNKDVCIQCGNCTVVCPHACMRFKNLTDDQVAKAPKGFQAAEIKPKAVPGQKAALVIACEDCYSCGVCLNICPMSNKGQEKPALAWKHYSDDHEFHAEQVAVWDYFLSLPETPAGELKNAKALAYKQPLFEFSGACGGCGETPYVKLMSQLVGDRALIGNATGCTSIYGGNLPTTPYCKRADGRGPVWSNSLFEDAAEFAMGFRLTSDKLAVHAREVAEKAKSEGIAAGIIDKILSNDQSDDEKIDEMRKSKDELKAAIKNDSKPTAKLLYSLADFFVKRSVWGFGGDGWAYDIGFGGLDHVLASGKNVNLLCLDTEVYSNTGGQMSKATPVGAIAKFANAGKEITKKDLGAIAMSYGYVYVAKVSLGADMNQTIKAFREAESYNGPSLIIAYSHCINHGIDMSKGLEHGKAVVTSGLWPLFRYDPRLKDQGKNPFQLDSKEPTTSIEDFMYSEVRFKSLKQADPNRADRLLKIAKDKAERTWKEYKYLADRPF

SEQ ID NO: 87703 - protein, 331 aa, Unknown
  Obtained from environmental sample
  DOMAIN (1)...(214): Nicotinate phosphoribosyltransferase (NAPRTase) family
  misc_feature (1)..(331): Xaa is any amino acid
MEFGLRRAQGPDGAMAASRAAFIGGAIGTSNTLAGKAYGIPVMGTMGHSWIMAFSDEEEAFNAYAELYPDRSVFLIDTYDTLKSGIVNAIKAGKKLKEQGKKFGVRLDSGDIEYLSTEVRKALDEAGFNDASITVSNELDETIVETMVRMGAPVDTWGVGTNMVTGGNDAALTGVYKMAACEDKNGNMTPVMKFSDNPEKTTNPGIKQVWRLKDEQGAPLADILALDGPDEVETFELGSRCCFWHTSGDYRHFFHEIGAEPKPLLKMRLNKGQRQGPRLSLAEICSFSGQELETFDSTYKRLLNPHVYKVSMTDKLRNLKLKLIDSFVNNM

SEQ ID NO: 87704 - protein, 468 aa, Unknown
  Obtained from environmental sample
  DOMAIN (29)...(109): Cache domain
  misc_feature (1)..(468): Xaa is any amino acid
MGFSLAADYVPQKQPWYQTAIRSGRNIAYTAPYEDALTGEIIISAVRNIDIQNGEIFGILSVDINIKWLREYVGSLKLAKGGYSMLLNRGMSVVTHPDISLVGSQIEDLGKSYEEIAKILRAHGKVSARKITDINGDSAIIFIRHIFNGWYVCIITPYIEFYKDLYISAGILLVLGIILSLLLSFILLRFSAAKARADEDNKSKSSFLASMSHEIRTPMNAITGMAELLLRIDLSDEARSYARDIKHAGNNLVSIINDILDFSKIESGKMEIIPINYLLSSLINDTVNIIRMRLMEKPIRFFTNIDGNIPNSLIGDEVRLRQILLNILSNAVKYSEKGYIGLTITVDKRNNKQVWLKIAVTDTGKGIKPEDQAKLFDEFVQVDMKKNQGIEGTGLGLAITKRLCVAMGGDISMESEYGKGSVFTILIPQGIESEAPFAMVEEAKKKKVLVYEGRAVYAKTGVLVAGKH

SEQ ID NO: 87705 - protein, 483 aa, Unknown
  Obtained from environmental sample
  DOMAIN (309)...(396): Hpt domain
  misc_feature (1)..(483): Xaa is any amino acid
MLVFENMRVPYTMVTNQEDFAAALYREEWFYVFSSYGLYEKIKPVMEGGVFSYGKKPPLALMVEWGTEAYIPDVRFLSVPAQSLSIANVLNGWAENKDYIKTSGVIRFTFPRARILVVDDIATNLKVVEGLLAPYMADVDTCLNGLQAIELVRQNEYDIVFMDHMMPEMDGIETTAVIRLWEKQKQENNGIGFTFGDARKNINKQIPIIALTANAVSGMREMFIENGFNDFISKPIDISKLDEMLNRWIPKEKRTRITKPVRPVQQVQKTNDTAAAEALPEGSELFSIPGVDSVKGISLTGGTTANYKQVLSLYCKDVEDRLPLLEKMLKEDNLNMFITHVHAMKSASASIGAAEMSAQAANLEAVGKAGDKDFIHNNLGAFIQQFRELIDGIKEVLAADKANKGIPQITYIPEAQVSMLYSLKSALESKKTTEIDIILEELDRSLDGHLQPLLEQISDNILIAEYGKAGEVIDGLLRERSGS

SEQ ID NO: 87706 - protein, 286 aa, Unknown
  Obtained from environmental sample
  DOMAIN (1)...(285): Protein of unknown function (DUF1015)
  misc_feature (1)..(286): Xaa is any amino acid
ADRIRHVDILDANTGPIFLAHRPDKTLSEITSSWMKNHEPIFSFVNGNVKHEGWIVDSCETIEKIASCFKNIPALYIADGHHRCASAVKVAQKRREANPGFTGREEFNYFLAVIFPSDELTIFDYNRLVKDLNGLNEDTFLEKIRLSFDVEKTSGSAPGAVKPQAKHEFGLFLKNAWYRLKVKNGIWEDNDPVERLDVSILQNYLLKPILGIDDPRTDKRIDFVGGIRGLGELEKRVNDGMAAAFSMYPTTLDDLMAIADAGKIMPPKSTWFEPKLLSGLFIHDLI

SEQ ID NO: 87707 - protein, 215 aa, Unknown
  Obtained from environmental sample
  misc_feature (1)..(215): Xaa is any amino acid
METKMIYRPVGNTGMSASVIGLGAEHLDNKPYEVVDKVINAAIEHGINIMDLFMPGEQVRLNIGKAFAGRRDKMLIQGHICSTDVKEQYDISRDLKTIKKYFEYLLRCLNTDYIDFGMLFFVDSEKNFSDVFEGDALPYALELKKKGHIRALGASSHNPVIARKIVETGLVDILLFSLNPAFDMAPADTDVLDYLDKDKMMNYEKRLDPDRAALY

SEQ ID NO: 87708 - protein, 344 aa, Unknown
  Obtained from environmental sample
  DOMAIN (8)...(344): tRNA synthetases class I (K)
  misc_feature (1)..(344): Xaa is any amino acid
MKDDKKTVHWADECAAKIVREKGEKELYTCASGITPSGTVHIGNFREIISVELVVRALRDMGKKVRFIYSWDDYDVFRKVPKNMPKQQELENCLRIPITMVPDPWERDSSYARHHEVDVESKLPEVGIFPEYIYQAERYRSSRYAQGIRKALEKRDALKEILDKFRDEDHKIQGEWWPVSVFCEKCNKDETEIEGWDGDWGLSYKCNKCGNKETLDIRNAKGVKLSWRIDWPMRWEYEKVDFEPAGKDHHCQGGSFDTARHVCKDVYGWDAPVTFRYDFIGSKGHPGKMSSSSGNVITLDNVLNVYTPEVTRYLFAGTRPNTEFTISFDLDVIKNLRRLRQDRT

SEQ ID NO: 87709 - protein, 554 aa, Unknown
  Obtained from environmental sample
  DOMAIN (10)...(550): tRNA synthetases class I (K)
  misc_feature (1)..(554): Xaa is any amino acid
MPHMDSRTTAHWADETAEKIIREKSLSDGAKEQYTCASGITPSGTVHIGNFREIISVDLVVRALRDLGKKVRFIYSWDDYDVFRKVPKNMPKQDELEKYLRFPITMVPDPWERDASYARHHEVDVESKLPIVGIYPEFLYQAERYRSSRYAQGIRRALEHRDALKNILDKFRDEEHKIQGEWWPVSVFCGACNKDETEIDGWDGEWGLSYHCVCCGHKETVDIRNARDVKLVWRVDWPMRWEYEKVDFEPAGKEHHSSGGSFDTARLVCKEAYNWDAPVSFRYDFISIKGKGGKISSSSGDVVDLEDMLKVYTPQLVRYLFAGTRPNTEFAVSFDLDVIKIYEDYDKTERIAWKMEPAKDDAIYMWERRIYELSQPQTDPDGKTLPLEKMTKPFQIPFRHLCSLIQIADGDTEKALSSIASAPGAPSTGPSEEQLTPLRARAECAKYWVANYAPEEFRFKLKSPGDAPAALSPQEQAAIKLLCEDVVSRIETFTDDKPCAEAIYKVAEKVGIEGKALFRAAYQALIGKDQGPRLASFLRAIDKQRLLDILTMSK

SEQ ID NO: 87710 - protein, 405 aa, Unknown
  Obtained from environmental sample
  DOMAIN (246)...(273): NHL repeat
  misc_feature (1)..(405): Xaa is any amino acid
MKKLPEKALFIIFFALAFSQFPKNALLHAQGIDGTDLDTVRAREEFRIGVQAYYRFSYNEAILSFERALSYRPGEPLILDWLGKAYYRSGIENTAFRAWQAAAAAYGFSSGQGMLISSRMETLRNRRILFPVADDDVRYVESGRYPGKSNELTYFRQPSSILALNDGSAWVVAYGSNEILRIDPNGIIRERKRGSVNGFDRPYDLVKGLEGNLYLSEFRGNRVSVLSPSGDWQYYIGSKGQGPGQFVGPQNLTVDEEGYLYVVDYGNSRICKFDPSGVFILSFGTKREGFQGFISPTGIAARNGKIYAADSLLKQIFVFDRNGAYLGSLLQESLNSPESLRFLSDGKLLVADSNRVLLIDPDTAIIRELGVFRNAASVRITGAEMDINGNVLLADFKTGGSSRHD

SEQ ID NO: 87711 - protein, 102 aa, Unknown
  Obtained from environmental sample
  DOMAIN (55)...(88): Tetratricopeptide repeat
  misc_feature (1)..(102): Xaa is any amino acid
DYKQAVDYYEKALDIDGNNATALNGLGFILVETDMDLLRGLRCCKKAVDLKPQNPAYLDSLGWAYFKNGELLEARTWLRRAIDAAPDKKEIKEHFETVSGEK

SEQ ID NO: 87712 - protein, 386 aa, Unknown
  Obtained from environmental sample
  DOMAIN (95)...(260): ATPase family associated with various cellular activities (AAA)
  misc_feature (1)..(386): Xaa is any amino acid
VRRQRQKLEALRKAWELSIQNERPLVEEGDVRKVVAEITGIPLNHLEEQESRRLLNIEKELSLGVIGQDEAVKRISGAIRRSRVGISSPRRPLGSFIFLGPTGVGKTLLAKRLSEYLFESLDSLVRIDMSDYMEKHNVSRLVGAPPGYIGYEEGGALTEKIRKNPYRVILFDEIEKAHRDVYNLLLQVLEEGELKDNLGHTVNFRNTVIIMTSNAGVREISRDSRLGFGSGSGIMSFQEIEASSLGELKRVFSPEFLNRIDDVIVFNSLDLPQIEAILDLQLAELVERMAGQGFCLRIESDVRQLLLKKGWDSKYGARPLRRIIQKELEDPLSMLILEQDPLRQGLTGSSTELQETIFIARAEGEKIVFEIQVPEPAACYEVTSNG

SEQ ID NO: 87713 - protein, 236 aa, Unknown
  Obtained from environmental sample
  misc_feature (1)..(236): Xaa is any amino acid
MFPFASREWAAVSTVENYLLKMRAAYWSTRNDAEAAEEVIEWAKEAMEDLEKFDDYGLSKNARALTEKLKESVSNCLSAMEPMIAEYSKTGTLLEEFFPARDDAVETSGDFFSASVDASQKNTENVSATLRTSILALIIGLLLSVAIMIIVVKIIVLDSTLKHIDEVVDGISLGAEHVAAASGEIASAALGLAGGTNKQVSGLGNISSLLNNITNMAKRTVENARSADNLVSDSVN

SEQ ID NO: 87714 - protein, 154 aa, Unknown
  Obtained from environmental sample
  misc_feature (1)..(154): Xaa is any amino acid
MDIKRLGVVVFKKDSGIEEVIFRLFQWGQKHGISVALHPDSPHDFERAKSVEKFVEDSDAVVSVGGDGTFISAAHIVKYCKKPLIGINFGKIGFLADIETDAFEEKLENIIGGNYRVVRRAVLDVKHYRNGKILGGYNAVNDVYFNRLSVPKLS

SEQ ID NO: 87715 - protein, 481 aa, Unknown
  Obtained from environmental sample
  DOMAIN (99)...(214): Transglycosylase SLT domain
  misc_feature (1)..(481): Xaa is any amino acid
MPNRIVMDLESLYPKLLNQTQSQAFSLLNDYEKDIDDFEETPLDSAEKEILENFLDTTDLSKFSLPLPINARVMQEIHFLTVNARTFTEGSLSRKTALDSMIYAKLKQRNMPEDLIYLAFIESGFKLHAYSRAKAAGVWQFIPATGKRYGLPVDFWLDMRRNPEAATDAALSYLSDLYNEFGDWHLAMAAYNCGEGRIRRLVRESSTDSSKKVSYWNLKLPRETMLYVPRILAAAIIGHFPENYSFTVEKQSRVPFDTVTIKDCIPLDKAGSAVGASINTMRELNPELTRWCTPPNLKTYTMKVPKGSRERFLAAYEKMDKTQLVRWQQYKVQRGDNLGQISRLFGLRVADIQAANNLRNSRLSVGQVLIIPMPTGANPPERQRQIEKQESAAALAKKQLFDAPSEKSGLSIRSYVVRRGDNLSSISRRFGISSQNLMTWNNLQSNRVMIGQRIYLQDPSKQDSKKNEGLAPITQKEVKGT

SEQ ID NO: 87716 - protein, 382 aa, Unknown
  Obtained from environmental sample
  misc_feature (1)..(382): Xaa is any amino acid
VCAFFQDIAERGLFAALNGYETQVFLDIQEKEDVPGAQPGSWKTRWATLNYELNGRGVRSPDETLLDIFLKEIYSPIREILSPDRMEKLSHFFSSQKKSIVPSPHDFIESFREPVKNFEAAAKKYLGGADGKFEPWGKSGLKSGGLKSGGKTKRKVNSSKDVYSEWPLFFESLLALTKSRTGKENKFARGLKKKITGQPSLLLMALGYKTLSLLRLIVGDNSGKAAASLALHWQLDRILAECWEGAGVPSAEAHRAAEIAVALLARTGSSIPESYRTAKPPSAVAAALILENYDEGDFRKILAVNRFDNVTWFNKEAFEEALFLVSFFLYLETPETYGKESESSAARQERAEAIAEAVEALSKAKESSAYKLEELLGALAGK

SEQ ID NO: 87717 - protein, 108 aa, Unknown
  Obtained from environmental sample
  misc_feature (1)..(108): Xaa is any amino acid
VIVFLTVLTFTASRAESQDLNTVNALEEFRIGVHAYNRFSFNEAIFSLERALYYLPGEPVILDWLGRSYYRSGFEETALRQWQAAAAGYGYTSGQGLLIANRMETLMN

SEQ ID NO: 87718 - protein, 396 aa, Unknown
  Obtained from environmental sample
  misc_feature (1)..(396): Xaa is any amino acid
MPPQMPVPQAYDNAAAGEAHPSGDDVAGQLDSLFGGDEAASVPDVSAPLDDLSASADAADVSDGSQLSGDDVAGQLDAMFGGEEAADVSVPDDQLGLAGESALSTADESLSIDQPELTEESILAGLGGEDALSMAEGAVPDGHPGGDDVVGQLDAMFGESEPAVSADESASTDQPELTEESILAGLGGESALSMAEGAVPEGHPGGDDVVGQLDAMFGGSEPAVSADGSVSTDQPELTEESLLAGLTDEAALSMADGAVPDGHPGGDDVVGQLDAMFGGSEPAVSAEESASTDQPELTEESLSAGLTDEAALSMADGAVPDGHPGGDDVVGQLDAMFGGSEPAVSADGAASDEHPGGDDVVGQLDAMFGGSEPAVSAPAGESVSAAGESVPTAPPD

SEQ ID NO: 87719 - protein, 79 aa, Unknown
  Obtained from environmental sample
  misc_feature (1)..(79): Xaa is any amino acid
MHEYITKGTCSTKIHFNIEDGKLHSVKFENGCDGNLKSIGILLEGMDAAEAVKKLKGVRCGKKSTSCGDQLAIAVEQYL

SEQ ID NO: 87720 - protein, 303 aa, Unknown
  Obtained from environmental sample
  DOMAIN (1)...(302): Glycosyl hydrolase family 1
  misc_feature (1)..(303): Xaa is any amino acid
GQVCFKELGDVVDRWITINEPLCIAYMGYLFGGHAPGYRDLQKALNAVHHINMAHGVAVKSYRKTGLAAPIGITWNPVTPRPATNSPADKKAAKIARALQTEVFVFPCLGKGYPELAAKDFKASFPIKSGDLETIAQPIDFIGINYYFENPVSADKKAPFKCGSRPFWQDTTNIGWPIVPGGLERQLKWFAEISKGVFGKPDLPLFITENGCARKDEIGPDGRVHDKERIEYLQQHLAVCADLIKDGVNLKGYYVWSLLDNFEWGHGYTQRFGIVHVDYRTLKRTPKDSAYFFRDVIAGYGEW

SEQ ID NO: 87721 - protein, 89 aa, Unknown
  Obtained from environmental sample
  DOMAIN (3)...(73): ACT domain
  misc_feature (1)..(89): Xaa is any amino acid
MNAIITVVGTDKVGIIAKVSAFLAERNINIEDISQTILQGNFVMVMMADLSSSSKALEEVKRELTDLGESMNVSISLMHEKVFSAMHRI

SEQ ID NO: 87722 - protein, 648 aa, Unknown
  Obtained from environmental sample
  DOMAIN (485)...(560): Hpt domain
  misc_feature (1)..(648): Xaa is any amino acid
YYRACGESIRYQDGNAVHVAGTLVDITETKKMLLEKERQTEEAQAANRAKSTFLANMSHELRTPLNVVIGLTGLIMEDENLEKHITDNLVKISNAGSTLLNIVNDILDLSKIESGKLELTPDEYYTASMLNDTVTLILARIGEKEIKFHLNIDDNLPYKLIGDDLRVKQIFTNLLTNAVKYTNEGNVKLSIHCEREGDTVWMNAAVSDTGMGMSADDMKNLFLDYHRIDTKSNHHVEGTGLGLSITKKFVEMMGGEIKVESEIGKGSTFSFRIKQGFISDEVIGADVSNKLRNFCFSDDKRIVSQRLVKIDLSYATVLVVDDITTNLDVAAGILGSYKLHVDCLTNGPAAIERIRSGTPVYNAIFMDHMMPGMDGIETVDKIRALGTEYAKKVPIIALTANAIKGTEKIFFEHDFQAFISKPIDVTEMDAALKKWVRDNTRAEVVIEDKISETDLQIENLVIEIPGVDTKKGLSLYAGVKKIYLPMLRSYAHNTPKVLEKLKNVSAENLRDYVITVHGLKGTSAAIGAEQIRIAALELENLSRAGDLQGVLAKNDKLVADAETIVANVQEWLDKNDVLDSKPRQKAPDRELLAKLRQCCESYDMTGIDEVMSELDKYEYDEDADLMEWIREKIIVSEVFEIAERIAQL

SEQ ID NO: 87723 - protein, 280 aa, Unknown
  Obtained from environmental sample
  misc_feature (1)..(280): Xaa is any amino acid
FWKGREDGYIRTLHTLAGVMRDYDAIPDRERRDRYDRMLKSVLESEPNMVSLYMVWTPNAIDGMDARYIGMVGSNPSGQYVIAYTRETGRITACTSDDIESIMAHISGPNARRDRVDNPIPQKVNGKDTFTLRMSVPIISAGANKVVGCVGCVLDIEIIQRVIENTIKTNDIIDMAVVYSGNGTILAHFIPERIGKKIFDVDVELGDSIAAVFAAIQDGTSFRDTKYIPTLHENIGFVVKPFQIGNSDQRLAILLGAGESNIYKKLRAITGYIIILAVLA

SEQ ID NO: 87724 - protein, 155 aa, Unknown
  Obtained from environmental sample
  misc_feature (1)..(155): Xaa is any amino acid
MGRGILAEQLREFEEIGDRLEKEESFKRREGYNLQYGYGDAIKSAFGIFLFQHMSMLNYQESLKQGKQRKNAENILGVPAIPCGNQITRLIDGIEPEVFAPSFSNRLAQAEEKGVLKEYEVLDGGVLIALDGTWYFSSGKIHCKHCLHITEKEKT

SEQ ID NO: 87725 - protein, 200 aa, Unknown
  Obtained from environmental sample
  DOMAIN (1)...(192): ABC transporter
  misc_feature (1)..(200): Xaa is any amino acid
CKCILGLIDYEGEIFINGRKREARPSFAERRRSAFEVQAVFQNPSSSLNPVKTIGWILEEPLKAHRLGSEMAQTTEPAGIRPKVCGSPLEREKRVDEILDLVGLDSSYKKRRPAELSSGQKQRVAIGFALMLKPGLIVADEPVSALDVSVAAQVLNLFRDLNKKLGLALLFISHNMEVVHYLCDRVAVMRNGGITDVYLP

SEQ ID NO: 87726 - protein, 474 aa, Unknown
  Obtained from environmental sample
  misc_feature (1)..(474): Xaa is any amino acid
VFSPIGVKNRLVIIQEGTNEFSWTGEIRRDGDRSGTPVRTFRFSGTPTRRIEWDGINNAGALAPDGLYTYELYSTDLAGNSGRSNIVTFEIDTRDTPVFIATDLRSFSPNGDGIKDTINLIPTIQETSGILTWKIEILNLGTTGAPGAVAVRSFEGRDQAPSSTTWNGRTNAGTIAPDGNYVARLDLEYRSGNRPTSLSMAFNLRTVPPQGDISVPYYIFAPNGNGNRDTLPFRVTTEGNDEWNLVISSGNNTAVRSWNWTGRAPAVSIVWDGKDEAGNVVNDGTYNITLSSTDDAGNSTRKNINNIIVDASVPKIFLTASAQAIAPKPDQTEAMHFNIMATPAEGVTFWKLELRDENSELIKSFPSQAGGSGPLPAVLPWNGANERNVIIEGRITPSLTVNYAKGDVVNISAPSIMVDISGPVLGFHSQPEFFSPDNDGVDDELFITLSRRDFSPIAEWSLEIRETEGTNQVF

SEQ ID NO: 87727 - protein, 286 aa, Unknown
  Obtained from environmental sample
  DOMAIN (93)...(242): Thiamine pyrophosphate enzyme, central domain
  misc_feature (1)..(286): Xaa is any amino acid
ITGQAVCAQLGKDAFQCVDIVKICEPVAKKTYCVTDPKKIVETFNEAFYLAREGKPGAIVVDLPLDVQNADIEFDPASYKSRSVTAPEPSAADIARAVKMIGEAKNPALILGGGVILADAAKEAVELAEILKTPVICTYMAKGAIPEDHPLNAGHAGIQVGQPIGNRVFMDSDLILGIGCRFTDRHTGAINVYRGNRKFIHINIEPKEIGKIFPADLGIVADAKKAILALIAEVKKTGISASHVDTAGLPALRKELARKTDYDKNRLFPTAFSRSLTTTLGTGSSL

SEQ ID NO: 87728 - protein, 407 aa, Unknown
  Obtained from environmental sample
  DOMAIN (6)...(357): AMP-binding enzyme
  misc_feature (1)..(407): Xaa is any amino acid
MIFNPEYECMDAQARKKLQLAALKNLVETLYSRVPFYRNKMQDMKVTPKDIHSLTDIEKLPFTTKDDLRENYPFGLRASAHERIVEVHMSSGTTGKPVVNEYTLKDVDIWRQAMARTMAAAGCTSNDIVQNCYGYGLFTGGPGAHYGALNIGAEVLPMSSGNTERQIMVMQDFGSTMLTCTPSYALYLAEVARDQGVDLHALPLKKGCFGAEPWSENMRRQIEACYSMKAYDIYGLTEIIGPGVSFECEAQDGLHINEDMFYPEVINPDTGEPVPDGEKGELVFTTITREGTPLLRYRTRDITYLIRETCTCGRSTVRMHRLFGRTDDMLIIRGVNVFPSQIEHALFEIEGVEPQYLIVVSRGEDHLDELELQVEVKMEFFTDEVKNLEKLRSRIEHVMKSKLQISV

SEQ ID NO: 87729 - protein, 582 aa, Unknown
  Obtained from environmental sample
  DOMAIN (20)...(135): Histidine kinase-, DNA gyrase B-, and HSP90-like ATPase
  misc_feature (1)..(582): Xaa is any amino acid
ANPIKFILNVDENIPAKLFGDDIRIKQILNNLLSNAFKYTDSGQVSLSVSVEIAPINIITLVFRVSDTGRGMSKDQVAKLFDDYARFNLETNRQIEGTGLGMSITKNFIDIMKGELKVESEQGKGTTFILRLPQGYVNSAVLGKEGVENLQQHNLDKKTKQKRAQQIQREYMPYGKILVVDDMEPNLYVAKGLMSPYGLSIDTALSGEKAIEKIKSGLVFDIIFMDHYMPEMDGMETTKAIRALGYKEPIIALTANALVGQEKFFLENGFDDYIAKPIDIRQLDTALNKFVRDKYPIETVEAARKLKNPNDEEEDLPDLSGVKALVVDDFKPNLNGEAAMLKEYKMYVDCLLNGQEAVDRIKSGEPKYDIVFMDLLMPVMDGEEATKTIRSLGTDYANTVPIIALTAMPADDAAGKEKSLLDSGFQAVMYKPFTLETVDTFIKDWMSDKIKNCIIPPGKKEKIMEIDIPGVENEKVKKIYGTKFNIYLDVLRSYLDVVPKSLEEMSQVTKETLSSYVTSVHGVKSVSDFIGAEEARKMALELEMLGRAGDLSGVQAKNGAFIQYAKDLIVNVEKYLAKTDAK

SEQ ID NO: 87730 - protein, 205 aa, Unknown
  Obtained from environmental sample
  DOMAIN (15)...(203): Ribosomal protein L4/L1 family
  misc_feature (1)..(205): Xaa is any amino acid
MNGKVYSKEGKELRTIELADAVFGLPVNDDLIWYAINNELANRRQGNACTKDRGEVHGSNAKPYRQKGTGHARRGDKKSPLIVGGGVIFGPKPRDFSWAMPKKAKRQAIKTILSLKAQSDTLKIIEDFSIESGKTKDLAGLLDNFNPGTRTVLILKDDDPMIKRAAANIPWLTYLSYNRLCAHELFYGRQVLMLEPARKISMIFT

SEQ ID NO: 87731 - protein, 101 aa, Unknown
  Obtained from environmental sample
  misc_feature (1)..(101): Xaa is any amino acid
AIKKYKIVIFIDGDFWHGNDWKKKRFSSQEELLSSYSDFWQKKIRRNIARDKDVNKYYKKIGWTILRFWTSETEKNLNKCIIKTIKKINKIRTSASFIPAL

SEQ ID NO: 87732 - protein, 188 aa, Unknown
  Obtained from environmental sample
  DOMAIN (6)...(119): Response regulator receiver domain
  misc_feature (1)..(188): Xaa is any amino acid
MARAKNIIMLIDDDQMCLDMGMEILKNKYTVYPIPSGEQALQILKKVIPDLILLDIEMPVMDGYAVINKLKQEKETKDIPVMFLTSHTDPGNELDGLSMGAIDYITKPFSPLLLVQRIDNHLSIISQRKELLQYNKTLQETIEQKNKEIEELQNAIQNTISEINSLRTELSSSQIESIMKHLQSVETP

SEQ ID NO: 87733 - protein, 545 aa, Unknown
  Obtained from environmental sample
  DOMAIN (354)...(545): Glycosyl hydrolase family 3 C terminal domain
  misc_feature (1)..(545): Xaa is any amino acid
MTLAEKIGQMTQAERGNLHKGDIEKYFLGSVLSGGGSTPGDNTPQGWLKMVNGYVEESLKTRLKIPLIYGIDAVHGHNNALGATILPHNIALGAIAASNPVKGAQAAYTAGRITAQEMIATGIRWTFAPVLGVAQDPHWGRTYESYSENADIVSAMGEYFIKGVQENGGAACMKHFLGEGQTVDGRNQGNALLDSSGIEKILPPYRAAINAGALSLMPSFSSVNGIKMHQNKELLTDLLKDEMGYKGFVVSDWSAVKQLTGGSYRMQIANAINAGVDMCMATDGRENWVNFISNLTKLVEDGIVPMSRIDDAVIRILRFKQKLKLFETPLITRAGEIGTAENRAAARELVSDSLVLLRNEKDTLRKLSESKKILVTGQGANNIGMQCGGWTITWQGGNGNITKGTTILEGIREVVKDKASVSYAENGDVGGTFDAVIAVIGEDPYAETQGDRSGNISIRPKDMEMLKKAYTYHCPVTVIMLSGRPMNIGDELRKWDAFIAAWLPGTEGAGVADVLFGGKSFAGRTPYTWRRTYNGAVLFPFGAGL

SEQ ID NO: 87734 - protein, 372 aa, Unknown
  Obtained from environmental sample
  DOMAIN (4)...(321): tRNA synthetases class I (R)
  misc_feature (1)..(372): Xaa is any amino acid
MPFTFFNTLGRKTEVFQPLQAGKVGFYGCGPTVYNYAHIGNLRAYVAHDILVRSLRRAGYKVTHVMNITDVGHLSGDNDEGDDKMVRSAAERGKSVLEIAEMYTAAFFNDTDRLNIVRPSVVCKATEHIADMIALIQRIADNGYTYSAGGNLYFDITKFPAYGELALLRLDDLKAGARTAVDEYKKNPHDFVLWFTKSKFENQALVWDSPWGRGYPGWHIECSAMSIKYLGEQFDIHAGGIDHIPIHHTNEIAQSEAATGKKPWVRYWLHNEFLVLDKGKMSKSAGGFITLQKLVDEGYDPLDYRYFLLSGHYRSQLQFSWDSLEGAKNARASLMDKIRALAEKAGRAGALCGAPCGAPCGKGAAEYVPHYV

SEQ ID NO: 87735 - protein, 193 aa, Unknown
  Obtained from environmental sample
  misc_feature (1)..(193): Xaa is any amino acid
MPSPWKEKMESHIAGCPECARQLEVYRRIFSAAAEDVFAGEAMEAAKERVWQKLEQRISHAADMAADSPIRSPAMRGRAVWRRRISVPLPAVAAAIVLFIALAFLVVLRITESAEVSGMTLASEAEFDAPDIIPVSDMENVLQYLGSRDNGEIIILRLPESRNFVNYGEPAIIKAADYSRQTPGRQMPGWRKP

SEQ ID NO: 87736 - protein, 258 aa, Unknown
  Obtained from environmental sample
  misc_feature (1)..(258): Xaa is any amino acid
MNSEQLKKINIRGFKSIKESSVELDMLNVLIGSNGAGKSNFISVFTLLNNVIKKELQTYIAACGGANTFLFNGSKETTSIHLIFEFGRNSYCFNLSKTDNDTFYFDSEWFGYSGDVDYSEKISSGHSESKLEKGIGDNITWRVYHFHDTSKNARIKTSCDLADNMYLQFDAGNLAAFLLRLRNEYKNNYDDIIKTIQLIAPYFSDFILVPSNGFGKILLRWRQIGSDDIFNANQFSDGTLRFICLAVLLLQPKECNQK

SEQ ID NO: 87737 - protein, 98 aa, Unknown
  Obtained from environmental sample
  DOMAIN (7)...(96): Bacterial DNA-binding protein
  misc_feature (1)..(98): Xaa is any amino acid
MKGVGNVTKRDLVNDISSRTGLPQIETKKIIECFLDSVARSLIEGNNIEIRGFGRFKIRNRNGYKARNPRTGEPIEIEAGKKPVFEPSKELKKVLNKD

SEQ ID NO: 87738 - protein, 357 aa, Unknown
  Obtained from environmental sample
  misc_feature (1)..(357): Xaa is any amino acid
MSMRRFSICLCLIAVLFLSCNGNKVAQIWTDHPEFALYGDYFNTSQNQYKVIVKYIENPSAQLGRENRGKSNNNPDIVVGSWLKNTSTGVNFKSLDYLFGANKLSRSIFYPRLLSVGRIDRNQYLLPVSFNVSALIFSKEKELEISSPFTIGFEEIKKLSVAYNILNKGSYTRMGFSPLWNDDFLMITAVLFDSSFKEASPLAWDNAALNRSMDFVNDWTILINTDNQAEEDFTFKYFIEPQEKLIQSGRILFSYMESSELFILSEESKNILDFRWIMEDEKIPIAEDAVFLGIPNRGKAPGAAKAFVQWFFKIENQRLLLEFSKANRISESVFGICGGFSSISAVTEQIFPRYYPS

SEQ ID NO: 87739 - protein, 706 aa, Unknown
  Obtained from environmental sample
  DOMAIN (494)...(706): PEP-utilising enzyme, TIM barrel domain
  misc_feature (1)..(706): Xaa is any amino acid
ANLGIPVPPGFTISTDVCAAYYENKGKYSANVKMEVENTLKRLETVMKKKLGDPNDPLLVSVRSGAAVSMPGMMDTILNLGISDKSVKGLAAKTGNPRFAWDAYRRFIQMYGDVVMGVEHDHFEEAITSVKKAKKIELDTDLTAKDLEQLVEEYKKIVKKYTGKEFPQAPLDQLWGAINAVFGSWNSERAIRYRKLEDIRDLKGTAVNVQSMVFGNFGDDSGTGVCFSRDPSTGINEFYGEYLMNAQGEDVVAGIRTPERIATLAKKNPAIYKQLVGIKNKLEKHFKDMQDMEFTVQQGILYILQTRNGKRAGTAAVKCAVDMVAEGLIDKETAIMRVTPAHLDQLLHPMVETQARKQAKFLTKGLNASPGAGTGRIVFNAKDAEAWHQRGEKVLLVRKDTSPEDIGGMVVSQGILTSTGGMTSHAAVVARGMGTPCVAGAKGVVVQNNIVTIGNDTYHEGDWITIDGSTGEVYDGKLPLVAATISKDMNTFLKWCDDVRSKAVRGPIKGFNVRTNADQPEDAKRAVAFGAQGIGLCRTEHMFFDKEKLIHFRAMIVADSEEDRKIQLKKILPLQQKDFYGIFKAMEGRPVTIRLLDPPLHEFVPHTTEEINELADHLGMDHSKLLAKVMSLVESNPMLGHRGCRLAVTYPEIYDMQVEAIVLAAVECVKEKIPVHPEIMIPIVVTARELRLLRPNAEKVIEKVLK

SEQ ID NO: 87740 - protein, 73 aa, Unknown
  Obtained from environmental sample
  misc_feature (1)..(73): Xaa is any amino acid
LNSDAGGIFIPRAVHGSHVNTGDSVGIVIDPLTGAIVEETLAPCSGLLFTLREYPVVFGGSLLARIMEDVKNG

SEQ ID NO: 87741 - protein, 97 aa, Unknown
  Obtained from environmental sample
  misc_feature (1)..(97): Xaa is any amino acid
MAKKNQTPGSILLGLLDKYGLNCNRLSKEIKCSQTALRLISLDKSRITTSIALRLAKYFGTKPEFWLLAQMNYDLAKAANDKSLARSLKNIPKAGRK

SEQ ID NO: 87742 - protein, 699 aa, Unknown
  Obtained from environmental sample
  DOMAIN (632)...(670): Topoisomerase DNA binding C4 zinc finger
  misc_feature (1)..(699): Xaa is any amino acid
VRAKGSSAKKDAPVQKDGPVQKDEPVRKDKSVRKAGSTSKGKSTPKSKRAAPAKRTLIIVESPTKAASFEKYLGADYTVKASMGHLIDLPKSRTGVDTEHNFEPEYITVRGRAKILKELLSEAKKAEKVLLASDPDREGEAIAWHLKNAILSKLETMSVQRISFNEVTPMAIKEAVANPRPIDEALVESQKARRVLDRLVGYSLSPLLWKKVKNGLSAGRVQSVALRLICEREKEVESFIPEEYWSLEADFKIGRSTFTAQLVKWNGVKPELPNEAAAKKIISSLEGADCVVSDIKEADKTIKPKPPFITSELQKSAANRLGYTSRKTMQVAQQLYEGVNMGSTRIGLISYMRTDSVRVSETALTELREWLGEHYPNELPEKPLEYTSGKKAQDAHEAIRPTYVSYTPESVAEYLNRDQLRLYTIIWERFVSSQMISAKTRTISVEIKAVSGKGEEGLFRVSGTKLVEKGFYKVIKLLSSKEDKGNPYPPLKAGDKVTIEKFHPEQHFTQGPPRYTEASIIDILREKEIGRPSTYAPIISVLLDRYYVTRSNKQLVPTLLGKKICEMLVEYFPGYVDVDFTASMESKLDKVEESQLKWPDMLKEFWGPFKAQVDEVGKSLESFKGSLDEPTDYVCEKCGKPIVKKLGRNGFFLACTGFPECRNTRSVPLAVCPKCGGDVVARKTKGRGKGILRLRQLSG

SEQ ID NO: 87743 - protein, 290 aa, Unknown
  Obtained from environmental sample
  DOMAIN (14)...(196): ABC transporter
  misc_feature (1)..(290): Xaa is any amino acid
CYAVDNISFNVKEGGICGVLGPNGAGKSTAIKMLCGALYPTSGEIDVMGYSPSRDRKRYVREIGAVFGQRSQLIWDIPPIDSFNMNRAIYGIPQADYKSRLDELAEMFDVTEVMHKPTRVLSLGERMKCEFIMAMLHKPKIVFLDEPTIGLDVIAKAVIRRFIMDMNKTGTTFILTTHDLEDVKQLADNVIVINHGRKVFDNSLQNLQLNLGEKKIVELTLEQPFDAGAALPDSVRVLEQKSPLEIILEVDASKTAIGDFIKFLSSKFSLTDIAVKELPMEEIITQIYKN

SEQ ID NO: 87744 - protein, 279 aa, Unknown
  Obtained from environmental sample
  misc_feature (1)..(279): Xaa is any amino acid
YWLDIEVSDRTGNITSINNVVFTVDNGEPVVNITTPKRTAPENTPFTLEGTVDEFNFNRLTVKINNNPVEVELMRPSAVASTHSWSWALGTTIGVVPNAFDFDYLSEGPNTIILTAYDHAGQTGTAQYTFTVDRLPPEVNFNSINGNKKIDKATWQNGDKVALLKGISLIEDTNAIIRGSFFDEYSRIGNGTDDLPYIDEDTQVSSTRDQYYFEYRLYTSTQLESGPAEASWNDDNANTIPWTRIALGINPDKSVNWAIPLTGSSLYWTPTTGIPDGTY

SEQ ID NO: 87745 - protein, 509 aa, Unknown
  Obtained from environmental sample
  DOMAIN (201)...(314): Response regulator receiver domain
  misc_feature (1)..(509): Xaa is any amino acid
MELNIAKYETASLINDIAHINMMRSSKFVEFELDVDENIPSKFLGDELRIKQILNNLLSNAYKYTEEGVIKLSVHTEAATEDGHDTLVFCVSDTGQGMTEEQISTIFTTEYSRFNQEVNRSVEGTGLGMNITWRLVRMMNGMISVESQPGKGTKFTVRLPQQRASSNVLGKELTEKLRNFRISSSAQMKRAKITREYMPYGKVLIVDDVYSNLYVAKGLMSPYGLSIDTATSGAEAIEKVKAGELYDIIFMDHMMPKMDGVEATKIIRELGYTKPIVALTANALTGQAEMFIKNGFDEFISKPIDIRQLNMVLNKLIRDKYPQEVVDAARKQKDLAAGRKKTQEIDSQLLAFFISDAKKAIGVLEAIYLNKCRRSDDVSMFIINVHAMKSALANVGEKELSNEALVLEQMGRDNDIKLLLEKLPFFLESLYKVIANFEEKEHKIKKEGFGDYSQLKEKLNEIRIACGEYNKKAAKDLLAELKTKEWSDTVNEHLDVLAEFLLHSELTKL

SEQ ID NO: 87746 - protein, 275 aa, Unknown
  Obtained from environmental sample
  DOMAIN (146)...(275): Domain of Unknown Function (DUF748)
  misc_feature (1)..(275): Xaa is any amino acid
MGTQKISVSRRRIRLIAWISGLAAFCLMFASLVLPHVLRPALETLLSRTLHSAGRVESLSFNPFTLTLSASNITVPYPGDVGIFLRLDRLEVVFSFFSLFRLTPRISELTLDNPTIDLTLFENGKFSLQLFFDGRDAELSGTTSVFPCVIENFSLNNGTVVFRDLGAGTTHIAEKIQLAVPFASSLPADRELAVMPRFNAVVNGQPLGLAGETRPFSETLLTEFTLQIEELELDRFREYIAPYTTLTLKNGALSTALKLLISREEDESIRFHLAS

SEQ ID NO: 87747 - protein, 528 aa, Unknown
  Obtained from environmental sample
  DOMAIN (87)...(243): Domain of Unknown Function (DUF748)
  misc_feature (1)..(528): Xaa is any amino acid
DFSVEHGARTIVRLGGISLHDLSVTLPEGRTPQLAARHLAASDILANVSAQSITVGNLSGTGVSAGPVRGKDGNFVLNLPATQDASSAWQTTISNVQLSSTNITLTDHSLRETVALPFSDIRISASNISTRPGAQWTADVSAKPGRQGLVRLEAKGAINPMDISFRIRADRADIVFLSPYLKTAVPLSLSEGVLNADVSGQVKSGRGERIRIDAAGDAGLHGVSLTEGGKEVLGWGRLRAEKFRYRNVPRGSGTFSAGTLILNGPRLSVTIGEDGTSNMHRLLFPPGASAASKPAAMSKPAAAPDIALSVGGVRITSGEIRLRDESLQPPYLLKMENIGMDMDKVSSDPAERGALGGSLRLNGSPVVFDGSINPLITPFAGELAIETWDLDLTEFSRYAARFIGHPIRRGELSMRLELALNGLDVTGRSDLVLGRLEVGDRDPLSDAPVIPLRAGIRLLRDLSGNISLSLPLSGRLDDPQFHIGGIVGQAVVNAMLRAVATPVRLVGGFFSFFLPATRQERINFMPGE

SEQ ID NO: 87748 - protein, 197 aa, Unknown
  Obtained from environmental sample
  misc_feature (1)..(197): Xaa is any amino acid
MTKKAYYIGMDVHKTSVQMAVFEETGEDPIYERRLDNDTALLVKEVVRFNRAGKTEVAYEAGCLGYVIQRAMEKVGITCHVLPANKVAKKRTERIKTDKRDARLIGRELRSRTIRPIAVPDEADEAARDLQRCREDVSEDLRRMKQRLLKFLVRHGHIYGSETGHWTLKHWQWMDKIEFGNGHEKEVYEEYRSQIRA

SEQ ID NO: 87749 - protein, 152 aa, Unknown
  Obtained from environmental sample
  misc_feature (1)..(152): Xaa is any amino acid
MNNEQLAMNNEQHSSLLIAHSSLLIHLQWFSDDAEAEGRTEQPTEHKLRRLREEGQVPKSQELVGAVTLFLPALMLLFIAPSMLRTCVEMLRFFFSRATELDPTKDAIIVGVFFKYLIRLTLPILIVAVFAALFSNIVQVGLLFTTKPITPD

SEQ ID NO: 87750 - protein, 89 aa, Unknown
  Obtained from environmental sample
  DOMAIN (4)...(79): Bacterial export proteins, family 3
  misc_feature (1)..(89): Xaa is any amino acid
MSIGEVTDLLQRGILEVLIVAGPLLLSALTVGLIVAILQATTSIQEQTLTFVPKIIAILLVLALLGGFMFGSLRQYTTDLFRKIPDMAR

SEQ ID NO: 87751 - protein, 260 aa, Unknown
  Obtained from environmental sample
  misc_feature (1)..(260): Xaa is any amino acid
MTSAELKKTPSEFLHSLPACEVLMQLDNMLEGGLENVVIDLASAFEEWGYSVTILVLNETGEGALKALRRGLRVCVIPYHEQVLYRELERVRPAIVFAHYSFQGAHLYESLNIPFIQVIHNVYAWFDDAGKGIFAKAAAHTTLFAAVSETVKEYSVEHLDVPPEKCLVIPNGIDLSKFTPEVKQEAENLRRHLGFSEEDYIFVAVSSIRRITRIMALVKSFRCICDLAPHARLLLLGYQYDKEYLTEILAYVEKNNLQPR

SEQ ID NO: 87752 - protein, 71 aa, Unknown
  Obtained from environmental sample
  misc_feature (1)..(71): Xaa is any amino acid
MEDVLAVYERPYDENKPVVCMDEKPYQLLDDVREPLAMERGVVRREDSEYQRNGTCSIFIFTEPLSQQFKV

SEQ ID NO: 87753 - protein, 437 aa, Unknown
  Obtained from environmental sample
  misc_feature (1)..(437): Xaa is any amino acid
ALGLVHSDEEVPTESTYYLLRHKIVEYEEKSGKNLLEEAFEQITKGQCYEYGVSGKRIRMDSKLLGSNIRWYSRYGIVHETIRKYCEGNGIKGFEREGKESEALAGVLKEKGDAVAYRNTKEEVERLIEGLGGVIYRLLSAEGAEKNKEYGLLKRVFEEQYEVVDGAGGGKKKRVKVREKSEIKGKSVQNPHDKDSEYRDKGGNKVKGYSVNVTETCDEGKLNLIAGIKTEGSGTADVEYLEEGIKKSQEAVMEKIEEVYTDGAYHSPGNQEYCKEQGIQWVMRGIQGKPSKYDLSYDEEGNLVVVNKESGERLEAKRSKGNTAEAPERWVIRDGEKRPKYFEKKDVETCEVRKRLEEIPKERRDIRNNVEATIFQIGYHYRGDKSQYRGRVKHQMWAASRSIWVNFRRIQLWSIRKVKEMVESVIKNVNEPVLTIV

SEQ ID NO: 87754 - protein, 169 aa, Unknown
  Obtained from environmental sample
  misc_feature (1)..(169): Xaa is any amino acid
MNIQLQGSDREWAETIFEKLNAKLKAECIRLGDTIPYIAKDGHYRDFDTGESIYWWTNGFWPGMLWQMYHATNDAVYRESAEAVEKRLDEALEGFDGLHHDVGFMWLHTAVANYRLSGSADSRRRALHAANILAGRYNPACKFIRAWNGESRAGWIIIDTLMNIPLLYW

SEQ ID NO: 87755 - protein, 836 aa, Unknown
  Obtained from environmental sample
  DOMAIN (289)...(388): PEP-utilising enzyme, mobile domain
  misc_feature (1)..(836): Xaa is any amino acid
DRSVKGLAAKTGNPRFAWDAYRRFIQMYGDVVMGVPSKHFEEAIGAIKKERDLKLDTELNAADLEKLVTEYKKIVKNSAKKDFPQNPLEQLWGAINAVFGSWMNERAIKYRQLNEIKNIKGTAVNVQAMVFGNFGDDSGTGVCFSRDPSTGVKEFYGEYLMNAQGEDVVAGIRTPEKITTLAKENKLIYDQLVGIKNKLEKHFRDMQDMEFTVQQGKLFLLQTRNGKRTGAAAVKCAVDMVAEKLITKEEAVFRVTPALLDQLLHPMIPAEALKSAVPITKGLNASPGAACGRIVFNASDAEALNEKGEKVLLVRDETSPEDIGGMVASQGILTSTGGMTSHAAVVARGMGTPCVAGAKEIIIQGNTMTIGSNTFNEGDWITIDGSTGQVFGGKLPLITPEEVSKEMDTFLKWCDEICAASKRGRLSGFQVWANADQPADAKRAFQFGAQGIGLCRTEHMFFDKEKLIHFRAMIVSDTAEERKEALKKILPLQKEDFLGIFKAMEGKPVTIRLLDPPLHEFVPHTPEETKELADYLNVPIETLQVKIDKLREQNPMLGHRGCRLAVTYPEIYDIQVEAIALAAVECLKQTIPVNPEIMIPIVISARELKLLRPNAEKILKKVFDAEGVQIKVKIGTMIEVPRAALRSEHIARYADFFSFGTNDLTQMTFAFSRDDAASFLPFYLKKNVLEVDPFNSVDEDGVGTLVKIAIKEGRAVKPDMKMGVCGEHGGDPASIDFFYRAGLSYVSCSPFRVPLARLAGAQAVIKNSGVNIKGGLSAKSGKPTTAKVKGSKKSLKGDKKMAAAAGKKPAKKAAKKPAAKKAVKKTAKKPAKKAKK

SEQ ID NO: 87756 - protein, 51 aa, Unknown
  Obtained from environmental sample
  misc_feature (1)..(51): Xaa is any amino acid
MQYVDFGKTGIKVSRLGMGCMRLPSNMEDGKTVFDEDKSVALIHRAIELGV

SEQ ID NO: 87757 - protein, 304 aa, Unknown
  Obtained from environmental sample
  DOMAIN (15)...(276): Orotidine 5'-phosphate decarboxylase / HUMPS family
  misc_feature (1)..(304): Xaa is any amino acid
MYNMDKLFEAVAERGHVCVGLDTAPEYVPEKERRSSPAETVLDYNKAIIDATFDIAACYKLQIAYYEEMGLAGLNAYARTLKYLRERGILVIADIKRSDIADTASRYARAHFEGDFEADFVTLNPYLGMDSIEPWLQWADKKGKGAFVLMRTSNKGRRDFECLIINDESHSSRRLFDAVGDKLSELAASRLGTHCYGAFGAVMGADPQTEEERKEAAAIRAGRPNLFFLIPGYGAQGGAASDAALLLREGNGGVVNASRSILKAWQSSHEASGREADNVIAAQAARAAAIEMRDSIRKAAVSNK

SEQ ID NO: 87758 - protein, 494 aa, Unknown
  Obtained from environmental sample
  misc_feature (1)..(494): Xaa is any amino acid
MGGMALGSWIAAVWANRTRDLLLWYAIVEIALGALALVFHDFFIRYINTSFSTILPFLSKPALISLYKWGSSALIILPQSMLLGATFPLMAGGILRRFPGLSGYKTSFIYFVNTLGASIGVLISGFYLVRDWGLKGAIIFGGMIDLFVGISILALCLNDRTESAAGDVVANSGNNSDNNGDNSVINTDNEPLDDEINDISAISAKSSVIFAVPDKREDYYPLLFVACGTAVASFMYEIGWIRMLSLVLGSSTHSFELMLSAFILGLALGSFFVRNKLDTVKNAPRFLGLAQVVMGAAAIATLFTYSSLFKIMVFTIDALDRNASGYVLFNIISHLICMITMLPSTICAGMVVPLIIHMLYRRGYGEAAIGKVYAVNTAGGILGVIVAVWGLMELTGLKYLITIGGAIDMALGLYVLYKFAETRQSLTRTIAQPACLIVLVAAVAFSKLDPVLASSGVFRYGTISNAKRVVEHIDGKTASITLFKSGDNLVLSTN

SEQ ID NO: 87759 - protein, 824 aa, Unknown
  Obtained from environmental sample
  DOMAIN (470)...(613): Homoserine dehydrogenase, NAD binding domain
  misc_feature (1)..(824): Xaa is any amino acid
GGTSVGSQEAISRIIEILKDPEYAGKTPVVVVSAFSRVTDTLIGVARKAAGNDSAYRGLFEELAVRHRDTASHFLKGEERKHALAEIDGLFDELNRILEGISLLGELSARTLDLVMSFGERLSASLLAHVFTANGINSAFLDTRPLIKASDHFGNAQYLPAPTFTNIRSFFKGLPKKKAPIQVATGFIASTADGQTATLGRGGSDLTAAIFGAALKADEVEIWTDVDGILTADPRMVKNAFRIDEIMYAEAMEISHFGAKVLFPPTIKPALEKGIPISIRNTFNPEGEGTRIVNEAAESEYPIRGISSINKIALLQLQGPGMVGVAGFSARVFGALARRGISVILISQSSSEYSICFAVMPDEARNAEIALEEEFKQEILSGGIEKPHTETELSIIAVVGSKMKSTSGVSGKFFHALGRNGINIVAIAQGSSEINISAVISRQDESKALNAVHEAFFQATTRSVNLFLIGTGNIGGTLLDQIASHRKILADRDKIHINLVGVANIDRMVFSQNGLDPKKTKALLNDESKNETSRETAPFNLVNYIDTMISFNLPNACFCDCTANEDIASSYGKILGASIPVVTPNKKANSSTLKYYHFLKGYSRERGIPYLYETTVCAGLPVISTLRDLTLSGDKIRRIEAVLSGTLSFIFNNFDGRKTFSALVRDAKAKGYTEPDPRDDLNAMDAARKALILAREIGMQLEFASVEIEPILPKDCFSVKNVDAFFAELEKSDDAFEKRRAQAAAKGMALRYVAVIEEGNVKLALRSEPANSPFRALTDSDNMVVITTDRYSKLPMVIKGPGAGAQVTAGGVFADIVRVSRTLV

SEQ ID NO: 87760 - protein, 355 aa, Unknown
  Obtained from environmental sample
  DOMAIN (24)...(325): Cellulase (glycosyl hydrolase family 5)
  misc_feature (1)..(355): Xaa is any amino acid
MQRMRGLNIGGWLSQIDAIQEKNPDKFPGTDKHMETFIGPNDFANVKKWGFDHVRVPIDSYLFFTEDDAPIENRLAYIDRAVEYALPAGLRLILDLHECPGHDFSEAAKTPVQKLFSDDDTYIKKTEKIWACLAERYSQKDYVLFETLNEPVAPNAEIWNNVKDRLCREIRLHAPWSTIITGSNMWNWPSTFDSLTPFDDDNMIYSVHYYEPLLFTHQNAPWIGNPEIKTARPYPGDYGPGFIRKYGMTLSAGVWNKERLAKEFAPVNAFRKKYNTKVICNEFGVYTPVELISQLRWYDDLLSILNEMGIGFSYWNYKNLDFGIISIGEKLHEPLPQYDNADRINHPVLEVLRKY

SEQ ID NO: 87761 - protein, 403 aa, Unknown
  Obtained from environmental sample
  DOMAIN (69)...(163): Transposase
  misc_feature (1)..(403): Xaa is any amino acid
MVNVGIDLHKTQFTICVRDGKESWFAKYPTTPEGYRDFLAQAAGWQKRGGAVRVGVESTGNTRYFKNRMEEAGIGVTVINTLKFKVVNESVNKTDKHDAATIAEFLEKDILPKSQLCSRESEQLRRLLRARASLVTTEVVIKNQIHGLLTSEGMEDAKGSLQSKKGRQEVLDALKANENGLVAQPLFETIDRLEENIKGIEKELRLLAKGDRMVELLMTVPGCGEICSWTIRAYTDDIKRFASAKKYASFAGLAPWVQNSNETIHHGSITKRGPKELRTAMVQVVMGLRRMKEKTFSWRFMQRYEAMKKSKGSGRAIIATARKIAVVIWNMLTEDVEFDIGLMVDRKLANKSESMSGMAGIVEQALNKVQEKPVIIEEVKKSAGVKKIVKISGVAREKRKKVG

SEQ ID NO: 87762 - protein, 269 aa, Unknown
  Obtained from environmental sample
  DOMAIN (34)...(268): Aminotransferase class I and II
  misc_feature (1)..(269): Xaa is any amino acid
MPIATGIRNALGSSSMIRKMFEEGSLLKKQHGADKVFDFSLGNPDLDPPPEFHRVLLKFAEEDKKGSHGYMPNAGFTDVREALARKASREHKVSIDGSHIVMAVGAAGGLNAVFKTICDPGDEVIVMRPYFMEYRSYTGNHGAKLVEVDSLPDFNLNIDAIGAALSPKTAAVLINSPNNPTGKIYPVRSIAALADLLRKHGEKTGRLPYLVSDEPYREIAYNVDVPPVLNAYSESIVVNSYSKSLSLPGERIRYIAVSPDITDKADVMN

SEQ ID NO: 87763 - protein, 421 aa, Unknown
  Obtained from environmental sample
  DOMAIN (1)...(407): Protein of unknown function (DUF342)
  misc_feature (1)..(421): Xaa is any amino acid
VDKPSYREKVEVAEGIKPINGKDAYIQYFFRTDQTQIKLKEGANGRVNFKELDIIQNVVQNQPLAKKIPPEDGIDGKTVTGKLLPARAGSDIPMPVGTNVHVNDDGDTILSDINGQVIVANGKINVEPILTIEGDVNLKTGNIIFLGTVIITGNVEDTFSVKAAGNIEVKGTVAKAELDAEGDIIIHQGINGKSGEKRIRAGHSLWSRFIENANVEAGNMVVVTDGIINSNVDAIKSIVCMGKRASIMGGRLRAGEEINAKVLGNSTSGTETICEVGFDPHSKLELERLLEMKTSSETELDAIRLDLQTLINTKKQRKTLPEDKEAYMQELMERRQILTDELKDTNESIEKVQEFMNQIEVRGRVSASTKVWPGVKIWIRDVKEDVKTDYRAVTFILDNGLIRATKYEEPDELAKKALDGY

SEQ ID NO: 87764 - protein, 332 aa, Unknown
  Obtained from environmental sample
  DOMAIN (2)...(330): Cation transport protein
  misc_feature (1)..(332): Xaa is any amino acid
WLGGMGILLLVTGSFRVQKKDIIRILLSIYAALTALQFVLLVIFGMNWFDALTHSMSTMSTGGFSIRNSGIAYYNNAAAEWVCVFFMFISGINFFLIWRLLFRKSDDIIRSTETKVYAGIVLIAAAIVTVSIFLQSSSDTASYVKAVSFEKSTSFPTAARHAFFHVTSTISTCGFFIVDFNHWPSAAQGVIFFLLLIGGCSGSAAGGIKVIRHVVLSKQTANEMKRFIYPRGIFDIPLDGKSGNKKAVQKAAGFIFLYFLIIFLTAMLVSISGTDIFDSFKTALVCLGNTGLGLPAADFPVYVKWGLCFVMIMGRLELWALLVIISGVFNRR

SEQ ID NO: 87765 - protein, 86 aa, Unknown
  Obtained from environmental sample
  misc_feature (1)..(86): Xaa is any amino acid
LKKRKLASAIGYDTGDFAPLLLASGRGREAEQIIAVAQDAGVAIVEDAALAALLDTSVKPGDFIPPWCWEAAAKILAFVIKTDNRP

SEQ ID NO: 87766 - protein, 307 aa, Unknown
  Obtained from environmental sample
  misc_feature (1)..(307): Xaa is any amino acid
NYDITLGNIILFANGIEMFCLKKMRQRESINKYEIDIIIQNIKDDISKGVQNPAHSWIKRITFDNVNPDIDLSYFEGKKPTPQDIIHKLPVKRVKLENEIIESIKENRITVIKASSGQGKTTLALQVAYDIQNEYKIYQLSWCNDSRELGNIVSFFNSRVKMGEKPLIIIDNLDSQLAEWNKLAQQLQEEITYHYKIILTTREDDWYYYSGDLSTIRALRVIKLILNEEEAQSIYENLSKAEKLHPSILDWRKSWLKIVDKGLLIEYIYMLTHGEMLSERINHQITQISNTNNGKIKCEILRYICFA

SEQ ID NO: 87767 - protein, 325 aa, Unknown
  Obtained from environmental sample
  misc_feature (1)..(325): Xaa is any amino acid
MGTTVLFRPTAIQRKALALLKGGAKHILLFGGSRSGKTTVLVMAIIYRALRFAGSRHLICRYRAKDARSSVLRETLMPWLNYTVRKNGYNYLAHESVITLFNGSEIWIGGLGDREQADKILGHEYNTIYFNEISQLSYAAVTTAYSRLAMRIKGCRNLFYYDCNPGSPLHWAYKIFVLKRQFLSGEPLEKPELYQSMLLNPEDNSENLPEDYISDILDGLPEKQKARFRDGLWVKAEGVIYERFDESMIVNASELPEQFDRYAAGQDFGLNITFVKIGWLGDMIYVLCDYGAFNMTTHSFNKELTARGWFDCPDGMGLPVYCDPA

SEQ ID NO: 87768 - protein, 351 aa, Unknown
  Obtained from environmental sample
  misc_feature (1)..(351): Xaa is any amino acid
MANTAYIGRKIDNDLLLWMRENNRKPLLLRGARQVGKSSAVRHLAEQFEYFLEINFELNNEARDLFAKGDLSPFKLCQELAAIYQTPIIPGKTLLFFDEIQSSIPAISSLRFFYEEYNELHVIAAGSLLEFAFQEIPSFGVGRIRSMFMYPMSFSEFLIACNHQLLLQAIQKADCKNPLSEPVHNKALELLKKHLIIGGMPEVVSVFVNDNDLLSCQRILDDLVISLRSDFAKYKKRVSTSQLSVVFDSVTAQMGNKFVYTNVSNDYTGRQLKEGMELLIMSGLVIPVVHSSSNGLPLGAEIDNKKKKLLLLDTGVFQRLLGLPLSDLLISSDFSLINKGNIAELFAGLEI

SEQ ID NO: 87769 - protein, 63 aa, Unknown
  Obtained from environmental sample
  misc_feature (1)..(63): Xaa is any amino acid
MSSPDIRAGMAMLIAAMTAQGRSVINRIEQIDRGYQRIDERLNALGASIVRNDSRRANDVKNL

SEQ ID NO: 87770 - protein, 47 aa, Unknown
  Obtained from environmental sample
  misc_feature (1)..(47): Xaa is any amino acid
MITGPAMKITNLGAVKIILGMKDFILYLTFSILFALLTGFLIDFVLI

SEQ ID NO: 87771 - protein, 423 aa, Unknown
  Obtained from environmental sample
  DOMAIN (287)...(367): Mur ligase family, glutamate ligase domain
  misc_feature (1)..(423): Xaa is any amino acid
MEALAELSGHPERCAPSIHIAGSKGKGSVTGMAAAILEASGLRAARYMSPHINDIRERICFGSSYFDEEIYCAVGNELREITEVRLPAFANPLFDETTADGCEPTYFELLTLYFFLCARRGKCDVMVVETGMGGRLDSTNVLDPLVSVITIIELEHTAFLGNTISEVAGEKAGIIKHGKPLILAKQKDEALEIFRKKTKEKESLLLYFPEIAGISNLKIHHSGTDFILSFSSIQQDLPLFTSPLSLYVPIPGKVQAENAALAVTAVKTAFPETSKDAVIQGLKSFYIPGRFEKIIEIPPFIIDGAHTPESLALCIETFCLLYGEGGVLIFGCAADKDAAAMAKTAYAHFSRIFITTPGTFKISNPALVYEAFAAQSNKTVLIEDTQKAVKEAVDFARIKNIPVLGTGSFYLVSEIRKLIGIYR

SEQ ID NO: 87772 - protein, 396 aa, Unknown
  Obtained from environmental sample
  misc_feature (1)..(396): Xaa is any amino acid
LKFPDDIRNIIKRKYQNKHRDWLKEIVLKNNSPVLWPLEINLDIPAEQDAFCQQDAVKAWISAWKSWRGKGDIVWTERHWRSLGVQTVPLKLILNKPEDAVSWIDETETWFRVVERYKTLVQQWSKLTDVLFRHYRILADFDDTNFHRLTGILSWICANPNSGLYPRQIPVVGIDSKWLESHKGLVCELVSAIHGNKERDFFKVCGLKPQPQLIRMRILDPVIRNHLGGLGDICAPSEEIANLIIKPTLVFIVENLQTGLAFEDLIGSVVIMALGYGVDVLGRIPWLQNTRCIYWGDIDTHGFAILNRARTHLPYMETVLMDEQTLLSHRDLWVQEKEQSTASELPLLTKNEYALFLSLKNNSFGQQVRLEQERIYWNTAWKTIQNIQMEILVTSR

SEQ ID NO: 87773 - protein, 214 aa, Unknown
  Obtained from environmental sample
  DOMAIN (1)...(187): ABC transporter
  misc_feature (1)..(214): Xaa is any amino acid
MGPSGSGKSTLMNILGCLDKPDAGTYTLDGIETSSSNSDTFAYIRNRKIGFVFQSFNLLARTTAIENVELPLFYRRREKNEAKRNSSDRKERAITALGEVGLSGRMDHFPSQLSGGQQQRVAIARAMVNDPAFILADEPTGNLDTGMSLEIMGLFQQLNDKGKTIIMVTHEPELAVFTKRIITLRDGELVSDKHVKERRNAYEDLAKWNKDLHK

SEQ ID NO: 87774 - protein, 248 aa, Unknown
  Obtained from environmental sample
  DOMAIN (1)...(183): E1-E2 ATPase
  misc_feature (1)..(248): Xaa is any amino acid
VVGDMVYLAAGDMVPADMRIITAKDLFISQASLTGESEPVEKFASPAISASRNPLEYKNLAFMGTNVISGSATAVAVTVGDDTILGSIAKQLQTKAPPTSFEKGVSSVSWVLIRFMLVMVPIVLLVNGFTKGNWLEAFLFALSVAVGLTPEMLPMIVSANLAKGAVSMSKKRVIVKNLNSIQNFGAMDVLCTDKTGTITQDKVILELHLDVHGNDNLDVLRYGFLNSYYQTGLKNKDGYFHYQLRARS

SEQ ID NO: 87775 - protein, 384 aa, Unknown
  Obtained from environmental sample
  misc_feature (1)..(384): Xaa is any amino acid
VKRKYQGKHRDWLKAAVSNNSSQAPWPLEISLGIPTEQDAIRQQDAVRAWISAWKSWRGNGSLVWTERHWHSLGVQTLPQKLILNEPSDALSWIGEAKTWSRVVERFKTLVQRWPALLDVLPRYYSVLANFDDANFIRIIGMLSWICANPNSGLYPRQIPVAGIDSKWLESHKGLISELVSTIQGTKEQGINGRDFFKVCGLKPQPQLIRMRILDPEIRSLFGGLGDICTSWEEAAYLGIKPAYVFIVENLQTGLAFEDLPGSVVIMALGYGVNVLGNISWLHHAQCIYWGDIDTHGFAILNRARTYLPSLKSILMDESTLFSHRDLWVREKEQSAAIELPLLTKSEYELFLSLKNNSFGQQVRLEQERICWDVAWEVITHFSN

SEQ ID NO: 87776 - protein, 292 aa, Unknown
  Obtained from environmental sample
  misc_feature (1)..(292): Xaa is any amino acid
LGIINAAGKTYNQLKTEVETIVTNNYPLSGVQFVLSQPAVFKIYIRGEVRRTVEVTAWALNRLSGVLGGHLTPFSSTRNVSIRSSNGQVRVYDLFKADRMGDLSQNPFVRPDDVITVNRIERQVTIGGAVERPGTYQLLAGENFKELVEIYASGYTITADKTRIQLVRRVGSNEISGDIMYLTEQDITDNFTLLHFDTITIPSITDLRPAVPVNRLERRITIEGAVRRPGTYDLMPHENLRELIEVYGDGYTPIADSSRIELVRHVDSAEASGDKIFLTEKDVTNNFILQHF

SEQ ID NO: 87777 - protein, 238 aa, Unknown
  Obtained from environmental sample
  DOMAIN (1)...(101): N-acetylmuramoyl-L-alanine amidase
  misc_feature (1)..(238): Xaa is any amino acid
LFVSFHRNSSINPAANGVETWVYLNPSRSAVNAAQAIYNGLVGVAAQSRRGVQSGDFSVLRNTRAPAVLIENGFISNAQDNILFDQYFTQYANATANAIMNTLGYTCVTPSPITPPAPITPTPPPGDYTANVRAIQTRLNTQWGQSVPTDGVWNNTYYRSLLRAYQTQLNRQYNAGLVVDGIWGPRTRAATRTLRSGATGDLVWLLQAALYVNGYSTRPDGIFGPNTDTQVRNFQRAN

SEQ ID NO: 87778 - protein, 276 aa, Unknown
  Obtained from environmental sample
  DOMAIN (151)...(217): Putative peptidoglycan binding domain
  misc_feature (1)..(276): Xaa is any amino acid
VVSSEIYPTWPNNAIIANIHAIVSFALNRIYTEWYRSRGYNFDITNNTAYDQYYVHGRQIYSNISQLVDGVFNVYARRQGFRNPYFTQYCNGTTVTCKGLSQWGTVTLSNRGLTPLQILHSYYPSDLQLAPAPGGGVVESYPGSALSLGSTGANVTRIQNMLNRIRVNYPAIPQIPNPNGTFDAATQAAVRAFQQTFNLTADGIVGRSTWNRISSIFTGVTGLAELGGEGERIGLSPTAPTSTIRQGSRGADVIHAQFLINYISRFYPEIPTSSKT

SEQ ID NO: 87779 - protein, 337 aa, Unknown
  Obtained from environmental sample
  misc_feature (1)..(337): Xaa is any amino acid
AAGLGRLLAGNAGVAYIAYNVPAWLAQYPNSIAAFFGKADARFILASFLEAMKPGNDLVERVYAKSPKVKQRVINVAEEYRQYLADRPEKLDKARAKMIEIGMMGQKHADKTMVAAGWWALYQTALKNGMSEEDAVVHADEITAETQPDLHPLETSPLYKDKGLGGLFLRFSQPLNVVWQNLTYDSFVSREKTFGSTVARITAYGIAALLVAAMRGALAKQDGEDADPEELTRKVFYYLLFSQFTESVPLVGNMASGTVENLVTGEGKAYPNRYFELAERVLDIPVALSQENKERAVTDAIHALGLGAGLPASQAKRIYKAVREKNPWIIFGYNPQK

SEQ ID NO: 87780 - protein, 542 aa, Unknown
  Obtained from environmental sample
  DOMAIN (16)...(222): Pyruvate flavodoxin/ferredoxin oxidoreductase, thiamine diP-binding domain
  misc_feature (1)..(542): Xaa is any amino acid
MSNDKLALLGDEAVALGAIHAGVSVSYGYPGTPSTEILQYLINEYKKGGPIARWCANEKSALEAAMGASFAGRRALVTMKHVGLNVASDPFINAALLKINGGLVVAVADDPGMHSSQNEQDSRFYADFAMIPCLEPRSQQEAYDMVREAFDVSERFNVPVLLRLVTRLAHARAGVVIEKKKPQNKFSKTNEKAGWLLLPAYARSNFTKLLDKQIEFEEWAFKHPVNKLTGKKSDLGIITAGLGCNYYEENLDDFNAMRKKQGKKPHLHLHIGAYPLPSKKIKQLCDNVDEIIIIEEGYNLIARKIFGVTGGSFTNIKTLIQCGELDPDNVRTALGLAPRKSGLRAPANLPQRPPQLCQGCPHADSYETINKVVDALDSRPGKPDIGINSDIGCYSLGATPPYSAIESVICMGACIGMAKGASDAGLKHSIAVIGDSTFIHSGITALIDAVASDTPMTIIILDNSSVAMTGCQPTIVPSEKLENLILGCGVNREHLLVLEAKKQLLEENAAKLKAEIEHRGLSVVIFRRECLEAFRKNKKANF

SEQ ID NO: 87781 - protein, 541 aa, Unknown
  Obtained from environmental sample
  DOMAIN (16)...(224): Pyruvate flavodoxin/ferredoxin oxidoreductase, thiamine diP-binding domain
  misc_feature (1)..(541): Xaa is any amino acid
LNNGKLALLGDEAVALGAIHAGLSAAYGYPGTPSTEILQYLIDEHEKNPESPLAAWCANEKTAMEAALGVSFAGKRAIVTMKHVGLNIASDPFINAALLKIKGGLVVAVADDPGMHSSQNEQDSRFYADFAMVPCLEPRSQQEAYDMVREAFDVSERFNVPVLLRLVTRLAHARAGVVIQNKKPQNKFSKTNEKSGWLLLPAFARKNFSKLLDKQPLFEEWTFKHPVNKLTGKKSDLGIITAGLGCNYYEENLDDFNAMRKKQGKKPHLHLHIGAYPLPSKKIKQLCDNVDEIIIIEEGYNLIARKIFGVTGGAFTNIKTLIQCGELDPDNVRAALGLPPRKSALKIPANLPQRPPQLCQGCPHADSYETINKAVNDINPNPQKPDIGINSDIGCYSLGATPPYSAIESVICMGACIGMAKGASDAGLKHSLAVIGDSTFIHSGITPLIDAAAADTPMTVIILDNSTVAMTGCQPTIVPSGNLVNLILGCGVKREHLLELEAKKQLLEENTAKLKAEIEHRGLSVVIFKRECLEAFRKNKK

SEQ ID NO: 87782 - protein, 87 aa, Unknown
  Obtained from environmental sample
  misc_feature (1)..(87): Xaa is any amino acid
MRGFTTENYTKDTIRAVDAKFEALKIAFAPLTFQAVKALVELGLLKIISDSGEKGIGCEKAAEQAQISLYGAKVLLEIALGMNIVKI

SEQ ID NO: 87783 - protein, 509 aa, Unknown
  Obtained from environmental sample
  DOMAIN (1)...(159): Type III restriction enzyme, res subunit
  misc_feature (1)..(509): Xaa is any amino acid
TRDQLEAAEAIKSDLESNRVMDRLVCGDVGFGKTEVAMRAAAKVALDGKQVAVLCPTTVLCFQHFRTFTDRFAGFPVRIEMLNRFVDPAKAKQIQRDLADGKVEIVIGTHQLLGQRVSFADLGLVVIDEEQRFGVGHKEKLKKLRANVDALAMSATPIPRTLHMSLTGLREISLIETPPKNRLAIETVVAPWSDELVASAIQFELRRSGQVYVVHNRVESILSVAERIRGLVPDARVGVGHAQLSDEALERVMVSFMEGRLDVLVATTIVENGLDVPNANTLIVNRADAFGLSQLYQLRGRVGRSDVPAYAYLLIPGRGQITDDARKRLQALEDFSDLGSGFRIAALDLELRGAGNLLGGEQSGHIQEIGFELYVRLLEETLQDLKGEPSGSFDVRMDFGPARLSKRWLDQSSERVVAYKRVSRIREPRELELYRQELEDRFGPVPQGDEETERFFQAMQVKLLAQRLAISEVSFAQGQLRFRPSPQTPIDPAKLMAWVQGRSGASLSP

SEQ ID NO: 87784 - protein, 515 aa, Unknown
  Obtained from environmental sample
  DOMAIN (180)...(245): His Kinase A (phosphoacceptor) domain
  misc_feature (1)..(515): Xaa is any amino acid
VATLPYRDVSDNERKMTFSRFITDKKGKQIAVIGLDMRLNSLKNYISDMRYSNNGCYGILVDSSFNIIIGTVDETFGQPLSVLKSPDIYRMMAELNKGVNLAGYKTVNTRNNNEEIMVYSRRIENGWHIGVVTPVKTYYKDIYDKGGSIIVFGILLQFILCFVILRIAAGKLKADERSDRKSNFLANMSHEIRTPMNAIIGFAELALREDIPPSAYEHVFTIKQAGANLLSIINDILDFSKIESGKFEIVPGDYLFSSLLNDVVSLIKMRATYAKLRFVVNVDSKIPNALYGDEVRVRQVLLNLLSNAVKYTDKGFVSLSINALYPKKDDDDEDDEEKTETKTDSIILNIEVKDSGKGIKSEDVDKLFKDFVQVDKEKNKGVEGTGLGLAIINSILKAMGGKVSVASEYGKGSAFTVTLPQRFRDAAAHAVVDDNEGKNVLIYERRDLYANSIVSTIKRLGVSCTPVDGEASLDEKVASGSYNFIFTASALYDRTKNILKKHNSDAKVGCLRSSA

SEQ ID NO: 87785 - protein, 328 aa, Unknown
  Obtained from environmental sample
  DOMAIN (194)...(257): ACT domain
  misc_feature (1)..(328): Xaa is any amino acid
VRIAAAYFNSQGIKAQAFDAWDLGFLSNSNFTSAELDKKSWELIPKKIIPLIKAGVLPVVTGFIAKDGNGDITTLGRGGSDLTATMIAAACKAEEAQVWKDVDGILTADPRIVKQARPVEAVTYEEASELAYFGAQVLHPRAMQPCIVTGTPVRVKNSYNIAAVGTRIAPALEKKSVPVRAITSRRSVTLVDIVSTRMLGQYGFLAEVFSTFERHRVSVDMVATSEVSVSLTLDAAHDLTAIKKELSRIASVDIKTGKAIVTIIGNVKRSSEILARAFRTCQLIGVTVQMVSQGASKVNISFIVNDTEASEVVKALHMDFFHSQHDDE

SEQ ID NO: 87786 - protein, 548 aa, Unknown
  Obtained from environmental sample
  DOMAIN (87)...(452): Bacterial extracellular solute-binding proteins, family 5 Middle
  misc_feature (1)..(548): Xaa is any amino acid
PQEISPQETPPQEAQPSKETQSPNVPKHEEPDFAETRPRVTNRDELTVTFSKGELELDFRKSYLASEAQLFTAIYEGLFSYHPITLEPVPAVAEKWELSNDKKQWTFTLRGNARYWNGDPVTAEDFRVAWLSILSPERDAPYSSLYDIIEGAKEYRNGEIRDENKVGIIASGPRTLIVKLNAPASFFPSMLSHHSFSPIHPSMLNVDDWTVSPPVSNGPFRITKMDDDKIVFEKADNYWDAKTISLNKITARFTETGEDASRLWNSGEARWISGDVDIDALTDRSGIQVNAIFATHYYFIRSGEKPWNDHRLRRALILVLPWDEIRAGHYHPAKTLIYPLPGYPKIAGLSETSADEAVSLLAKAGFPGGAGIPELVLRITPSLEAARITSLMANAWKEQLGIPVRVEVVPYSRYFQALKAGGYNVGYTTWIGDFADPYTFLQMWRRDSNLNDSGYNDDDYEALMEKSMFEEGEARWAILAEAEQLLLDRGSVLPISFSQAINIVDTGELEGWFPNALDIHPFKYLSFKAFRPLPGVVMHTKEQIARSK

SEQ ID NO: 87787 - protein, 60 aa, Unknown
  Obtained from environmental sample
  misc_feature (1)..(60): Xaa is any amino acid
MPAVAVTDHGNMFGVMRLFDECEKTGGAVKPIFGCEVYVAPRSRHDRRLDSAASQEGMDD

SEQ ID NO: 87788 - protein, 186 aa, Unknown
  Obtained from environmental sample
  misc_feature (1)..(186): Xaa is any amino acid
IRRRQFFTPGSGGNLPAGETFISPENLTAKGRICYDGSISVNEGELIINTPIDCLVEDGYVNKILGAGEAACLLNTIEAAERNAFEFESAGKLPPSFGEIYARNARNIGELGIGLNPAARITGKMLEDEKAFRTCHFAIGANYDEDAPSLIHLDGLVKNPTITAIFEDGTKQIIEKDGELDSIILS

SEQ ID NO: 87789 - protein, 289 aa, Unknown
  Obtained from environmental sample
  misc_feature (1)..(289): Xaa is any amino acid
MLKAVFRPNELVTLQEKVVIESPTSYSEMTHLSAIEDNAEAAEAIEEYTGPTADELRREAEMFKSRWEEEKERMISSAKEEADNIVQDAQKAAFAEVKRQTDEAQVLKQQAQEEAERIIADAKVKANDLEDEVRKSLENERREAKEQGKTEGKEDGYAEGKAEVDRLIERTQTVLERAQDKRADILSDTEKEIIYLVLLITRKVIKVISENQRDIIISNVVEALRKVRAKGNITIKVNLADLKLATEHKQDFIALMEGVKTINIVEDSSVDQGGCVIETDFGEIDARIA

SEQ ID NO: 87790 - protein, 416 aa, Unknown
  Obtained from environmental sample
  DOMAIN (95)...(296): Flagellar assembly protein FliH
  misc_feature (1)..(416): Xaa is any amino acid
MLKAVFRPNELVTLQEKIVIDSPTSYPEITHLSAKEDNADDIEAIEEYSGPTADELRREAEMFKTRWEEEKERMISSAKEEADNIVQDAQKAAFAEVKRQTDEAQVLKQQAEEEAQRIIAEAKEKANDIEAEVRKSLENERREAKEQGKTEGKEDGYAEGKAEVDRLIERTQVVLERAQDKRADILSDTEKEIIYLVLLITRKVIKVISENQRDVIISNVVEALRKVKAKGNITIKVNLADLKLATEHKQDFIALMEGVKTINIVEDSSVDKGGCVIETDFGEIDARIASQLAEIENRILEISPIKETNADHLPSPVIRSARLNTELAASSAIMDALNKSEKENTAVDLNYNSNSDTDSDSEEPELSAGASAALTASAALAALATMATKGKREVDKRITSGLDQITRRKTDTLIPS

SEQ ID NO: 87791 - protein, 474 aa, Unknown
  Obtained from environmental sample
  DOMAIN (30)...(95): ATP synthase alpha/beta family, beta-barrel domain
  misc_feature (1)..(474): Xaa is any amino acid
MRIETVEQNIFEKYLECADRTDPIKCVGKVIKIEGLLIESKGPQAIIGEICRIIAPKGKGAIKAEVVGLRYEIVQLMAYEETDGIEVGDRVIALGSRLEVPVSDKLLGRVIDALGNPLDDKGEISSICSYPALASAPDPLKRRRITERITTGVRAIDGLLAVGKGQRLGIFSGSGVGKSTLLGMIARNTSADVNVVALIGERGREVNDFIEYDLGPEGLKRSVLIVTPSNSPPLARLRGAYVATAVAEYFRDQGNDVMLMFDSVTRFARAMREIGLAAGEPPAQRGFPPSMFDSMPKLLERSGTSDKGSITGFYTVLVDGDDMDEPVADTVRGILDGHIVLSRDLAQAYHYPAIDVLTSISRLAPKVSGQMSRKAAGVIRRNMAAYASAEDLINVGAYHQGSNPEIDEAIAKHGIIEEFLMQEVDEPSSLEETLTAMSEIADVVIPPEEMTDVNQKLENAASQKIKSDVPKRRK

SEQ ID NO: 87792 - protein, 66 aa, Unknown
  Obtained from environmental sample
  misc_feature (1)..(66): Xaa is any amino acid
LRITEGGLFPVSCLADEPNQCERKEFCKTLWVWQGLEKMINQYLDGITIQDILQTYQNAGANEYYI

SEQ ID NO: 87793 - protein, 780 aa, Unknown
  Obtained from environmental sample
  DOMAIN (5)...(69): Heavy-metal-associated domain
  misc_feature (1)..(780): Xaa is any amino acid
MHSETLSIGGMTCAACSARVERALKKLEGVESAVVNLATEKATVVFDPRALRLSAIKEAVVKAGYQVLEVSSDTADEDKRRKEKEIKTLWIKFIVAASLGLPLLYIAMAPMIKWISLPFPKFLAPMHSPMLYAIVQLALVIPIIIAGNRFYTVGFKNLLRRSPNMDSLIAVGTTAAVVYSVYNLIQIASGNHHAVESLYFETAGVIITLILLGKSLEAVSKGRTSEAIKKLMGLAPKTAIVIDNGNEKEIPIEDVTPGDIIVVKPGAKIPVDGVVTEGQSAVDESMLTGESMPVDKKPGDPVYGATINSNGVIRFKAEKVGNETALAQIIKLVEDAQGSKAPIAQMADIVSGYFVPVVCAIALAAGAAWFIAASFGVVILPDGKSATEFALTIFISVLVIACPCALGLATPTAIMVATGKGAENGILIKGGEALETAGKIQTIVFDKTGTITEGKPEVTDIVISREWIAGSEEQKEEFFLQLIAAVEKNSEHPLASAIVREAEKRGLTLPSVTDFKALPGRGIEAKISSLSLSATNYSLPATNYQLPILVGNRKLMDERNISFTELEAASDRLAGEGKTPMFAALDDKAAGIVAVADVLKPSSKAALEKLHKMGIQTAMITGDNKKTADAIARQVGIDRVLAEVLPQDKSAEVKKLQDEGKKIAFVGDGINDAPALAQADIGIAIGSGTDVAMESADIVLMRSDLIDVPTAVNLSKRTIRTIKQNLFWAFGYNVMGIPIAAGILYLFGGPLLNPVFAAAAMSLSSVSVLTNALRLKRFRA

SEQ ID NO: 87794 - protein, 95 aa, Unknown
  Obtained from environmental sample
  misc_feature (1)..(95): Xaa is any amino acid
NGVQIVNSTLQRTRYPAITVQQGIPVRWIINAPPGSITGCNNRMIIREYGIQYTFKQGDNVIEFTPTRAGRFSYSCWMAMIFSTITVLADTEKEG

SEQ ID NO: 87795 - protein, 343 aa, Unknown
  Obtained from environmental sample
  misc_feature (1)..(343): Xaa is any amino acid
MLYVIDAYEFNVKGRSLPSALLYKLVEKGEFREGELITGKTNLEKYINDITQIYINQRVLKDNAEISYSTGEQNEDGTYPVTILIKVEDSWNIIALPRPYYKNNVFDLTIKARDYNFLGSMNPLRIDIGYNYNEDKQQSFLFGVYFNNPFRAFGYYWNLTFDNTVQYRVDAPVYYQNKTGLSVELPFKSTTFTLGIDEKFLLNDENSDWAKNQGFGTYQDGLYMSSNLYVSWKIPTGLTVSKFGDLIYTPEISSTLVHELPKWPLDDYRKGPFLGFSHSLGFEKIDWHSNYREGLSVSADNSYRYDFNRMLYSISFDFTGIGHFIVKDFFAISARLMYKYWYS

SEQ ID NO: 87796 - protein, 240 aa, Unknown
  Obtained from environmental sample
  misc_feature (1)..(240): Xaa is any amino acid
LHFGPREIGQGVDQHTMKEFIRLLEFCSGPAKHEKLTTRALSILLYRDSKRLEDLLSLCAPLLSRAEKTASIPDLSFLERSYPETMIAGKIFFTFKKDYIEINEDSSLFNDNAFIMGFPLETVEKINGIGYMSGKDKPYALTIENKETFYALARPQRRGTSELLSMFDCFLYVGGYSNRASAAMIKKLAMSNFTFYHAGDLDPDGVLILQHIQELAKRPVTPLRMDAATFDQYMDWARPL

SEQ ID NO: 87797 - protein, 633 aa, Unknown
  Obtained from environmental sample
  misc_feature (1)..(633): Xaa is any amino acid
KKYQNERYIAERKKDEAADLLRDIRSELADLERGILRYPDAPRELHAALEKVGIEAFFLAEAAEITAPDWVDAVEGWLNTRRFAILVDPVHFQKAIEVYNRLPRSVAGAFIPNIEKMRDAVVRQGSLAEIVKAEGYARIYIDYTLGKVMRSDLANLKTYDSAVTKECMTYMNHTASRIKEEVYRRHYLGRAALEERKKTLTAEAVRVEAELTVAEREEREARGREDCCNRVTRFLPELKYLFPSIAGAELLANQLAASEQELAAIDTQSFKELENKRDELVKYLELLKEDNDKLQKTWGSLNTKFTNCRDDLDRFTQSQEEKEEAIKYFSDDHPLMIGECEEYAQEKLSKNSIADLTNSYESTLKSFKTRTETCKKEYNKLVADYEHEFHYLLGMEPSENAEAETLLKRLETSELPQYREKIAKAYQDAEKEFKDHFISRLNEHIEEARESFDEINDILRTLHFGRDQYWFHLEEQSDRKGQIEVIRQAARIPPNDGGLFSQLVDPAEKKAAEELFNRILNSPLDSKELKSICDYRTYFHYDIRIKETDNLDEDDNPVILSLSKVLKEKSGGEAQTPYYVAIAASFYRFYKARPENTVRLVIFDEAFNRMDDERIGKILSFYNNLNLQIITSV

SEQ ID NO: 87798 - protein, 489 aa, Unknown
  Obtained from environmental sample
  DOMAIN (380)...(489): Domain of unknown function (DUF323)
  misc_feature (1)..(489): Xaa is any amino acid
RCVSDDGEIVKAGERGAFSLTVTAGSGGAASVAPRKDAYAVGERVTLTAAPDDGYVFAGWTGARVTDSASLVTSAAVRSDMAVTANFRRIDYGELADGRDGKTYRTVKIGHKTWMAENLNHKPEGSAGESGCLDGKAGNCAKYGRLYDWPTATEVCPSGWYLPSFDDWNKLGVYVGGAYVAGKKLKAANGWVGESGYRGGGTDDYGFSALPGGGEPERFENINIFGAWWTTTTSDYLYNGAVNARLTLHQNKLSGLAVDESDMYSVRCVMDEGGSLVLSAEAGGTVSSNPRKTSYKAGEHATITAVPKSGYEFVKWTDGKVADPSSAVTAVTVRSNMEITAHFREIPSNGGKDGKAGKTSASGGNKSVSARTEKHKAGKPEIEMVFVKGGTFKMGNADNEGGEKKYDDRAHNVTVGDFYIGKYEVTQKQWFQVMGGNPSGGAEGDDYPVNNISWYDIQEFIERLNAATGKKYRLPTEAEWEYAARGGAE

SEQ ID NO: 87799 - protein, 224 aa, Unknown
  Obtained from environmental sample
  misc_feature (1)..(224): Xaa is any amino acid
MKTAIFILLCIICINGVWAEEKGEIQTQTDLSLVFSTLGEMQFGLEKRYIFPFLQGTSPMTADNNVTLKIGAEVTPISINILADIIWTPIAFFEVSLGSQAGSGWNYDMFGARMNGMGLYRRMESENPQEWADGSGFDGAVWDVHFGAALQFDLAAIFPGDWNHVVMKFENFLNYQNYTKARGNEQWYFKADDGVDQNSFGYYFSAFLGYQMPIFFNMAGVQFE

SEQ ID NO: 87800 - protein, 80 aa, Unknown
  Obtained from environmental sample
  misc_feature (1)..(80): Xaa is any amino acid
VKMNITELNTRLYQISEKLTGLGFVQISKYCLLNINKLDKIIPLSNKRMEAVLKNGKRVFITRKYLYDIKKVLQENLDEN

SEQ ID NO: 87801 - protein, 99 aa, Unknown
  Obtained from environmental sample
  misc_feature (1)..(99): Xaa is any amino acid
MIMLTERLKIRRFTENDYAGLYEYLSDKRTYKYEPGKPITIAQSKKLCIERSKDRVFFAVELKSENKIIGHIYFNIIEPKKLLTYEIGFIFNKKYQGKG

SEQ ID NO: 87802 - protein, 313 aa, Unknown
  Obtained from environmental sample
  misc_feature (1)..(313): Xaa is any amino acid
MKKLLVIALFLLPLAIWAQNTDRTANGELVLRAFQKSFPGKTGAVAFIDNDWTISAGGETFFWAGGRLLPRAEKDKTDSYSPHFFYIIPDRPTSPDSYPPQFIEDLRNRSSREARRERRDINRAFMGVLYGGLERKEIEAQLARVDFLGYRVTVHKDIAEPLKRVDAEIRKWTGAEDFISSIGSIDGYSWRQIAGTQRMSYHSWGLAVDILPKRLGGKAIYWLWEMEKNKDWMLVPLENRWNPPRQVIDAFEKEGFIWGGKWPVYDNMHFEYRPELHEFTRLVAANPDKNDTAIGGPSRDLHHVAPDFLLRNK

SEQ ID NO: 87803 - protein, 681 aa, Unknown
  Obtained from environmental sample
  DOMAIN (324)...(500): Protein export membrane protein
  misc_feature (1)..(681): Xaa is any amino acid
MTIAEYSVKHPVTVIMLFALVIGMAVSIVPNLAVDLFPATQNPVISVSVRYAGAGPTDVEKNVTERLERALAGSRNLVNMTSNSQFESCSVTLQFAFGTDMDRAASETQTIVSRLANSLPDGADNPVIRRYDMSASSIMRLSVRGNYPPDQLRIFAEDEIQSQIERIEGVAIAEVTGGTTQVVRVAVSLNRLAAFNLTLSDISNALRGQNVLASGGNLLRGTREYQIMTQEELVSLNQIKRLVVKTINMGAIGPSQPNRSHVVRLEDIADVSLSYNENAARVYNNGQSGVYIQITGEANSNQVQLSGRVRAALAGINNKLPQGITLEVLSDNTTMITATLDQVYKNAIQGAFLAMLVLFVFLRNIKGTLIIGLAIPISILLTLMCMAVFGFTLNLLTLTGLVMGLGMTVDGSIVILENIHNYRLRGAKPEIAAILGSREMLRAIIASSATTLCVFIPLIIYKNDLKEMGQLFNDLIFTVVISLTASLLVAITLVPSLCGSVLPLNTRIQKPLKSRFLRAIDDKMESFLKTLENKYRGALEYCLSHRLIIVMLVLLMLIFSVMQFGGIGMNMYVRMRTDDNVNINVSMPQGTAIDVTEEMLFRLEELVKKEVQGYRNIILTARRSGTNQGTIQIILPEPAKQIDTPDSVIRKLTPYTNQIPGARISFRAGRGVGNTSAVELP

SEQ ID NO: 87804 - protein, 368 aa, Unknown
  Obtained from environmental sample
  misc_feature (1)..(368): Xaa is any amino acid
MASSTPMEISLTSRNYDAIMETADEIVHILERHLPEIENPTVNIEEGAPQLVVNIDRDRAAALGVSLSSIASEIRAAMDGTTAATVSMGDRLVSVRVQLREEDRTGIPNLDAISVMSRNGSRVSLSNVAEISESRAPTSIRREKQERVVRVTGGLPSGIAASEMQKRLEATVKGYLVPHEGVTVSFLGEAAEIQRYYGRYVLIVITAIFLVFSVMASQFESFVDPFIIFFTIPMLFIGVIWIYKFSGEPMSMFSIVGVIALVGVVVNNGIILVDYTNTLRSRGLTVREACLEAGRSRLRPILMTSLTTILGMFPIAFLTGAGAESIQPIGKTFVGGLTVSTLMTLFVIPAVYSLVNSRYDRKRARLAA

SEQ ID NO: 87805 - protein, 284 aa, Unknown
  Obtained from environmental sample
  DOMAIN (1)...(279): Dehydratase family
  misc_feature (1)..(284): Xaa is any amino acid
MGIMAELARANLIDTSVRRLESAKLADTFEAFDVRSPKVTKEAVSLYKSAPGGYRNLEFGSQDKMYGELDLDRQGGCVRDVDHCYFKDGGLAVLFGNIAKRGCIVKTAGVDESIFKFSGTAKIYNSQEAACDGILGGEIKAGDVVVICYEGPRGGPGMQEMLYPTSYIKSIHLGKECALITDGRFSGGTSGLSIGHISPEAASGGEVALIRTGDIIDINIPERTINVRVDAAELEKRRAEELAKGKEAFKPAGRNRVISPALRAYSLFAASADEGAVRVLPEGV

SEQ ID NO: 87806 - protein, 57 aa, Unknown
  Obtained from environmental sample
  misc_feature (1)..(57): Xaa is any amino acid
MPAKPIKLRSATVTEGRRMAGARSLWRANGMTEAQIGKPIVAVVNSFTQFVPGHVHL

SEQ ID NO: 87807 - protein, 306 aa, Unknown
  Obtained from environmental sample
  DOMAIN (147)...(266): Polysaccharide biosynthesis/export protein
  misc_feature (1)..(306): Xaa is any amino acid
MPIPTSKRGHPLFSTLAAVAFALLAAASAAPLFAQSVVSAELMRQLKNDKNAASQLNRALQNKDQTMRRDSLLWRRAAFADSAARKQDSLTRLAVDSSRPTRDTATGVVSVYEEMFQGKEIFPDSLIPYLRPYGSEFFSQKRRHDLGPGDMSSAPGDYPIRAGDEIKIHLWGRINEEYTLTVSREGTVTVPHNVGPVTVAGLSYGSMQRVVTDKLKNIEGVNVSLSVGELRPIGIYIVGEVNSPGFHTVSPLTSVTNALFAAEGVTRRGSLRNVLLKRGGKTVAEIDFYDFFMSGSDKSGLRLQSG

SEQ ID NO: 87808 - protein, 279 aa, Unknown
  Obtained from environmental sample
  DOMAIN (42)...(59): Bacterial transferase hexapeptide (three repeats)
  misc_feature (1)..(279): Xaa is any amino acid
DDRAPCPCRNGGTLIHPTAIIDPGAQIGVNASIGPYAVIESDVVIGDGSEIGPHAIIGNGTRLGERCRVFPGASIGLEPQDKKYAGEKTLTIIGDDTLIREYVTVNRGTSATGATRVGARGWIMAYCHIAHDCVVGDDVTISNALAMAGHVTVGDHVTIAGIVSINQFCRIGDHAMVGARARVSSDIVPYALIGTEPLRVVSINKIGLERRGFTAEQINNLKRAYKILFRDGLPLNDALTAIDAEFPGDDSVKTLTDFVRASEKGFLRMATEAPTAPTA

SEQ ID NO: 87809 - protein, 463 aa, Unknown
  Obtained from environmental sample
  DOMAIN (75)...(270): RimK-like ATP-grasp domain
  misc_feature (1)..(463): Xaa is any amino acid
MLNSNPETVSTDYDTSDKLYFEPLTLEDVLEVYERENCFGTIVQFGGQTPLNLAEGLKANGVNIIGTSPTDIAVAEDRELFANMIKKLGILQPPNGLAKTEEEAEKIAERIGYPVLMRPSFVLGGRAMVIVYDKAGLHEYMAKAMEVSEGRAILIDSFLENATEVDVDCLSDGETQVIGGIMEHVELAGVHSGDSACTIPPVTLSEQTQNTIRNHTKAMAKELNVCGLMNVQYAIQNETVYVLEVNPRASRTVPFVSKAIGVPLAKIASLCMAGKKLKEIGFTKEFIPSHFSVKEAVFPFARFPGVDIILSPEMKSTGEVMGIDRAASMAYLKSQTASGSKLPKSGNIFLSLRKEDRAAAIPCIKKLVELGFTLYCTRGTSTMLRNSGIPTNAVFKVADGRPNAVDLIEEGKLAWIVNTPSKGEKPASDEMKIRTNCLMHGIPITTTLHGLERTVDGLYAMKK

SEQ ID NO: 87810 - protein, 312 aa, Unknown
  Obtained from environmental sample
  DOMAIN (6)...(126): Carbamoyl-phosphate synthase L chain, N-terminal domain
  misc_feature (1)..(312): Xaa is any amino acid
MPKRNDIKKILLIGSGPIVIGQACEFDYSGVQACKSLKTEGYELVLVNSNPATIMTDPDFADRTYIEPLTKEALTEIIRRERPDALLPTLGGQTALNLAMELADGGVLERYGVTMLGATPEVIRKAEDRGLFKEAMKKIGLDMPRSGIAHSYEEACNIKNTLDTWPLVIRPGFTLGGTGGGIAQNEKEFKEICERGLYYSPTKELLIEESIEGWKEFELEIMRDTKDNCVIVCSIENIDPMGIHTGDSITVAPALTLTDQEYQKLRNAGIAVMREIGVSTGGSDVQFAINPNDGRLIVIEMNPRVSRFSALA

SEQ ID NO: 87811 - protein, 281 aa, Unknown
  Obtained from environmental sample
  misc_feature (1)..(281): Xaa is any amino acid
GYITLDTVEAAFDEYGSVVTEDYFPLIFRSSCLLTRKEELKPVISVLDKAMNDRTITYLIELRNTGHLQYLRNKLHKFLTEEERSYIKNHPVVPIAAEINNYPVSFFDTNTKQWQGIYFDALREIKNMTGLVFERVNGPQAQYPELIEMLENGKALILSELFHIEKYKGRFIWSDVPILKDNYAFITRSDYPNIEVSEIPYLRVGGRKDTPYLELFTKMFPNHKNYTVLDTQEEIWDALKHGKIDVLFASRRRLVVFTNYYEEAGFELSVMYDHEFGTYFG

SEQ ID NO: 87812 - protein, 622 aa, Unknown
  Obtained from environmental sample
  DOMAIN (101)...(167): His Kinase A (phosphoacceptor) domain
  misc_feature (1)..(622): Xaa is any amino acid
MADLFNIVDTAAIVGLDDLDGIKINAEEAKIANDIDRMVMTDQRQILYEEYLTGADGVGHYFETIKVPLIQHGDVVGMIGIGRDITQRKAMEEELRAASLAKSAFLANMSHELRTPLNVVIGLTDLVLEENNLAGHITENLIKISDAGNTLLSIVNDILDFSKIESGRIDLTPVEYHLSSLLNDVITLVSTRLGEKPVKFILNISDNLPNNIYGDDLRVKQIFNNLLSNAIKYTHRGSIELSVSCKRDGGDLILEASVKDTGIGISEENLKKLFADYNQVDTRANRNIEGTGLGLAITKRLTELMGGKIHVESEYGKGSTFSFYIRQGFVSDTPIGPVVAENLRKFRYADDKRAVIKKLARRDLSSARVLVVDDMQTNLDVAAGLLRKYKMQVDCLHSGPEAIECVNSGNPVYNAIFMDHMMPGMDGIEAAGAIRSLNTEYARKIPIIALTANAIQGTDNMFFEHGFQAFISKPIDIMELDSVIKKWIHNKPAANNEKDPEIIIPGVDTKEGLALYGGDMEIYLPALHSYVSYTTGVLEKLKTVSRESLPEYVINIHGLKGASASIGAEIVRESAMNLEKLARDGDLQGVLARNDRFIKGTENIVVNIKKWLETHNGEKQNL

SEQ ID NO: 87813 - protein, 428 aa, Unknown
  Obtained from environmental sample
  misc_feature (1)..(428): Xaa is any amino acid
MTKHFFSFIFFFFLFYSILPAQEALKSIEEEYYDFLALQGLTERPALNYRTLSDSVWKIDKDAAHPWQDNNLGTIHPLFGDFRMRVYGPELFMSYNTAAPYGQNDGLLWQGRGFNSLFKGGVRFEGYGVELTLLPHFAFSQNAEFDIMPSAYESEYGYFWGYAHNIGADAPQRFGDKPFFDWDLGDSEIRYTWKTLTVGFGTQAIWLGPSYLNSMLHSNNAPAYPKFDIGLRKQRIVIPWINWYAGDVETRFWVGRLSESEYFDSDDTNNYTMFHGFSFAYTPSFLPGLTLFTNRVCLIPWEIENIKFIIPSDDNTIEDQKSSFGFSWIFPQVGFEVYGELGFDDFVPNSFPQGYIRYPFHTMMYTIGLKKTIPIISASKIYLELLFESNSMEMSQDFHFQWPYSPYFHHQVLHGYTNRGQWLGAGSG

SEQ ID NO: 87814 - protein, 365 aa, Unknown
  Obtained from environmental sample
  DOMAIN (2)...(267): ABC transporter transmembrane region
  misc_feature (1)..(365): Xaa is any amino acid
MPFISLASEPELLATGWYKKAFDFAGFNGFEPFIFAFGIVIIFFYIFRAIYSSLLTYLINRYSINIYKYLSKNVLKTILSISYKVFVQKNSAEQIRTIAEETNDVGKIVLSIMKALSESFPIILIYVVIVILNWKITLVITFVLSLLLLIILPLLTKINKKLGEKRLESGKISYRLLKESLGNIKYIKLKGNEENILNSYENSIAIKARTEVLSNVLGVLPKCILESVGFSLLIAGIMFYIRIYHNATAAIPIISMYALALYRILPSIHRLTQNIGDIAYLEKTLESVNESLNQKADNEESDPLDFNHSIRLENINFKYLTGDEVINEISFIVKKGEKIAITGESGGGKSTLIDIITGIHKPVSG

SEQ ID NO: 87815 - protein, 355 aa, Unknown
  Obtained from environmental sample
  misc_feature (1)..(355): Xaa is any amino acid
MKTALSFYRYTMGISPTGFWPGELGWSNDLSNYLQSYGFNYTIVNSHGLLFGKPPPSRGTFYPVKTGDGLFVLACDYNASTLVAEMQKKGPYRDNSRDTVDEPENVETNLFIAQNGERYHSGYKYRQAGNGGLYEPTEAKSCAQEQARELLENISGRLAAASAHMKETPISLCAFNADGFGRQWHEGAYFIESLFRLAAGYRELQFMTPSDYLCQQPISAIEVSHPEFSSWGDNGYAELWLDSSNDWIYRHINRSIERMVELADRFTEDSSLKERALNQAAREILLAQASDWPALLYHEKNAEYAKKQIEGALQNFTTIYESLGRSHISAEWLTSLERRHQIFPNINYRVFRSRR

SEQ ID NO: 87816 - protein, 141 aa, Unknown
  Obtained from environmental sample
  DOMAIN (44)...(118): HAMP domain
  misc_feature (1)..(141): Xaa is any amino acid
MRYRLRSKLALFTIALVLLVDLLISAPLFFMIIKTQQETLLKSLLVISAAALAFGVFGALLMSSLLLGTIRKLVKHVELIRDTENRASLANQEIKISGKDEVAILVKTINEMTQELARAAASVYDLNIGKEIQIKFIPLDA

SEQ ID NO: 87817 - protein, 448 aa, Unknown
  Obtained from environmental sample
  misc_feature (1)..(448): Xaa is any amino acid
VVPNQIPGDPLEIVPDSSEWSNIRVGLTPGFGSDQNMGVIPITQGDNFKVSVRMASAADDITELYADVIPHNYIFELENIGATNCGDGGWELIWDDNDFHYISGTIQEDFTNIPPGGKKQLTVSLASTQIDTEMKNKEVKISLWNYDSKSKKLREWEDAVSVNFHNVSIPIRFRSEKQVQGVIKAKNGKSYYFKTARTGTAGDYAATVNVPWSKDAYTIAFLGATIESGSATKYSFAIDAEPPTNWDSISPIDFLAQYKPSNEYENTAPYLNLNTGDRAFMGYLAGDSIDYYKVKLSYTPPETTVYTVTFDPNGAESETTPASVTLGNGSVIWLSSMERTGYVFNGWNTAADGTGTRYDADSKYTITENITLYAHWLENVNVPGTTLAEKLTWLETNAESNAIYNIEVTADEGIAPTTLSYDDKTNVKINLEGNTLMRTISLTSYTDN

SEQ ID NO: 87818 - protein, 117 aa, Unknown
  Obtained from environmental sample
  DOMAIN (1)...(109): FabA-like domain
  misc_feature (1)..(117): Xaa is any amino acid
SDNEKIVAKRVFTEKEYFFKGHFPEYPVVPGVILVETMAQCGGAGLRKLGVMGDDALFFFATVDKVKFRRQVRPGDEVRCEIENLRVSPKMIKQQGKAYVGDEVAAEAEWMCLVGSK

SEQ ID NO: 87819 - protein, 654 aa, Unknown
  Obtained from environmental sample
  DOMAIN (576)...(609): Tetratricopeptide repeat
  misc_feature (1)..(654): Xaa is any amino acid
VELGNLDEQLSVDGLVETASDDAFEGFDPASGIGQDTGDDTGDTLDAFDDIDDMSFPDLDVGESPKDKKTTAAGKAVRKKDKRKGEIPIPEKEDDIELNDSELRYLQETLAGYPLNLRIACEEIIAEQSVRPEQMVRLIRNLIRGAPARETAALASEILDRAITVPRGFEKSSVEALEAEKSTFAYIFFHNLLPVLRLVMLIAILAGSVFYLTYKFVYIPLKAESIYKMGYERIPEGEYQRANERFDQAFAIHRKKDWFFKYADAFIKERQYIYAEQKYDKLLYYYPRDKLGVLSYAQLETKYLRNYAKADELLRHQILDYNPNDPDALLALGDNNLAWGEIDSSKYEDARFAYARLLDMFGQVPWILERMMKYFIRTDNLKEVLPIWQWFDADPRKRPLGAETLSELGGYLLDKQLEEVRGVPNEYVALIEDVRKILLRAVQQDPSLPEPHYHLARYYKNLGNDHEERVTLEIAINRFDNAKEEDLSRLTNRIDAHQRYADNLINSREFMHAEEQLQKGINLYEDAMSRRLLSSSPQYGRLYAGLGDLEYFVKTGDMEAALRYYNLAQQNGWAPPDMQYRMGAAHYQLGNWQAALENFFAASSKLPQNRRILFALGNSALKRGDSFAAQGYYNRLLDMLENQAPARLPLAVAQ

SEQ ID NO: 87820 - protein, 170 aa, Unknown
  Obtained from environmental sample
  misc_feature (1)..(170): Xaa is any amino acid
VAEGRAAWLEFQAGVEGRRLVFLDESCAKTGMARLYGRSLGGSRCHGKAPAGHWKRVTMLSAVRLDGSTHSVVFEGATDRAVFDEYISQVLAPTLAPGDILVLDNLSVHKSAALREAVAARGAEVRFLPPYSPDLNPIEKMWSKVKQVLRSIGADTMEGLFLGRGAALDT

SEQ ID NO: 87821 - protein, 483 aa, Unknown
  Obtained from environmental sample
  misc_feature (1)..(483): Xaa is any amino acid
MQGTKHYQEKFFVNFRLSERIPSDNFYKRLKDSLDLDYLRPLTAKHYGKEGQKSIDPVVFFKLMLVGYLENICSDRKIIEQCSLRLDILYFLGYDIDEPLPWHSTLSRTRKLLGEEVFLSFFRDILKRCVEKGMVDGRTQAVDSAFIKANASMSSLEEKELAKKSKSYFDEITAGESSSEDSTLEKSDDGKKPPSNYNERYTSRTDPDARASQKKGKPLALNHRGVISVDARSHVICGATVDYADKRDSDTIENITGQTIANLHGNGLSVEEVLADTNYSSGEAYKYLEGKGITAFIPTCGSYKAHRDGFSYDSEADCYICDRGVKLAFKGITRLEGRKTTGRAYCSSAKDCRNCPSREQCCKNKNYKRIDHSSDKPYYDEAYDRIHTALGRRKMRLRSATVEPVLGTLLNFRRMRKVYTRGQELARKQFLMAAAAYNLKKLMGAMGLRRVAAAVNAAKEAIRKNWAMMRFIFGWHKLSLGCD

SEQ ID NO: 87822 - protein, 460 aa, Unknown
  Obtained from environmental sample
  DOMAIN (134)...(445): Poxvirus D5 protein-like
  misc_feature (1)..(460): Xaa is any amino acid
MREALGDESVFLRVAEFKNGLIQFTDSTNAMRLIKEHGRDIRYNVAWKKWVVWNGKYWEIDEGSVLVHEKGLEMVRNIYDELLKTADYRERIDIEKAAIMSESVRRRKAFVEAATWVSALRVRTDELDHNPWLLNVKNGTVDMSSGEFREHRQEDMITKIANVEYDPNADCPMWKQFVREIMGYKADLIKFVQTAAGWSLSGDISEQTMFILYGTGANGKSTFLNTIMYLLGDYALATPTETFMKKSGDNYSNDVARLRGTRFVTTTEVEQGRRLSETLIKKITGNDELTARFLYGEFFNFMPTFKIFMATNHKPVIKGTDHGIWRRIKLVPFITRIEEDKQDKHLEQKLMEESPGILNWLIEGSKRWCTEGLKTPSVIIRATDEYRGEMDVIGNFIKERCVQGADYSVKARELFKCYQDWCDDHNENTVSERFFGLRLKEMGLDQKRLTDGRYWQGIGL

SEQ ID NO: 87823 - protein, 296 aa, Unknown
  Obtained from environmental sample
  misc_feature (1)..(296): Xaa is any amino acid
VCDALVVFDNKIIIISVKDIKYKETEKIEIGWDRWNKTAIQKSIKQLKGAKRFLDDSNTVRSQDGRVTIQLPEKNDRIYFFLTISLGSQREVPVILPENEVIHFLDEYNLDILFSELDTVSDFIEYLQKKEDFLKKSKKIIGSEEDILAFYLHQNRVFPENADLLIFGDDLWKEVSNKKEYKIKKRIDKISIFWDSLIEEFINLRDPSIVKIPGYFDPTNKNIEFALRTLAKENRFSRRILSQTFFDFYNHPKIVSRIVESINGIIYVFLKAPISVERRVRIAELSFRCYIAKSKK

SEQ ID NO: 87824 - protein, 303 aa, Unknown
  Obtained from environmental sample
  misc_feature (1)..(303): Xaa is any amino acid
MNGHHARYMNNPLKDSLPFDVHNIAMDLEINEFIDDLPKDAYKAKDFDFPEKKSYEEYLQLINKDHARYFQGKMPINDLNFDDYNDGYQDALNELIEECKKHERNAETRNRPYNNNRGIKKIKYRWEQVFQNILTTKITEITDGLKYRTSEEADRGNVHTPDIILPVVIDGKVKMSLAIIMDISGSMCSIINKMYGVMKSLIDIPDMEIDITVLEVDTDVENIMHEFDLKRETVESKEGGGTDMGAGLRYILENKMEPDLIIIMTDSETPWPATPILADRTVVLTDSPDYYDGPYPMYPVKFD

SEQ ID NO: 87825 - protein, 80 aa, Unknown
  Obtained from environmental sample
  misc_feature (1)..(80): Xaa is any amino acid
MLKNLDSLFPADFTDDQKARAKTQFLKNLSLSAHRFYGGKMQTLPKCGIYGNAWFNVWYTPGVSAVSTAIRSDREASFAL

SEQ ID NO: 87826 - protein, 299 aa, Unknown
  Obtained from environmental sample
  DOMAIN (27)...(177): Diacylglycerol kinase catalytic domain (presumed)
  misc_feature (1)..(299): Xaa is any amino acid
MNNTEFFAEALADICRRSLVAPGKPLRWLIIANPAAGGFTMRSRRNKCRRALGKCRAEAWKNPLREDCTPAAAALASYGLAQTDGHGCAAKYAQTLIGEAKTHNEYFYLVISAGGDGTSREILTALYHAPEEVRSNMAILRLPMGTGNDGADSPDLADALMLLIKPSRIEFCPCLRLVIAPAGQAASTPAHLAFNILSVGLDAFVTHMTNKMKGKLPGDSYKLWVDIASLLYDRLYTVGFLDVKADGGAIMLREKLLLLAVGASGRRTYGSQKKILPDDRNVCAVKQMPLLRKLALKGL

SEQ ID NO: 87827 - protein, 259 aa, Unknown
  Obtained from environmental sample
  DOMAIN (48)...(137): Cyclic nucleotide-binding domain
  misc_feature (1)..(259): Xaa is any amino acid
VKSALYAYSRYLALCPNAPDKDNIKAIIADIESSVTELTTEYAPDKMIQKYPKEHLLFAEGETGQTMYIIQEGSVKITKIVDNKEIILAVLGKGDIFGEMALLEDKPRAATAEVYEDCTLLAVNRDNFSNLIKDQPDMVVRMATLMSERIWLLYRQLDNTFIDNPLGRVYDALLIQLEKNRVNINSDEPYQCNFGIKELIGMAGMQESENKYLDRKIAGDGKLTFKDDKIQINKISDILKESTFYRRAQKISENRINSK

SEQ ID NO: 87828 - protein, 635 aa, Unknown
  Obtained from environmental sample
  DOMAIN (358)...(549): 3'-5' exonuclease
  misc_feature (1)..(635): Xaa is any amino acid
MKNPLYLIDAYGLIYRSYFAFMTFPLKNNAGKNVSALFGFARTVISLLNEGAPVLKENGKHAPAGGYLKETPKLLAAVFDSRTPTFRHKMYSEYKATRQKAPDDLHAQVPLVEEFLAALNIPCLRADGFEADDIIATLAKKCQEEKRQCYILSSDKDLLQLVGNGTFELRPAKTQKNAASSAAASPASTPGWEIIGPAEVKTEWGVPPEKIMDLLSLAGDASDNIPGVKGIGEKTAVEYIIRYGSLDGIYENIAGLGGSRGKKIAEGKESAYFSQSLIRLDANVSLPITDIDELSAENPDRKAAAQILFREGIRQSAKQLDPNISVSAASGQAQPDEQQDRVGAVYSADKSLFGSGVYKIVNDLVELQTILAEARKQKILAIDFETDSLDAWNSRPIGISLALKPKEAYYAPTAPHGVQEDGTATDLNHLDPEKVRGLLLPFFADPEMTIVAHNAKYDYKVSRGWGVDRWKCKIRDTMVAAWLVDPERNNYSLDSLSEYTFDYTPVKYHDIVPKGRSFDAVPLETAARYSAEDADLCLRMLRHLEPLLEKNGASTLYENLEMPLLPVLAEMEGAGIMIEPEVLTGYGRELEAELENLQRDTWKMAGHEFNLSSTKQLQDVLFNERKLKPGKKLKT

SEQ ID NO: 87829 - protein, 457 aa, Unknown
  Obtained from environmental sample
  DOMAIN (8)...(302): Lyase
  misc_feature (1)..(457): Xaa is any amino acid
LSEKLWGGRFSGQTDELALCFHSSIAFDSRLYRHDIKGSIAHAQMLGKQGIITKQDSESIVKSLETILADIESGVLKIDMNAEDIHSFVESELVSRIGDPGRRLHTGRSRNDQVALDMRMYIKEEIDATAALLNQLLDALLAAAKKNTASIMPGYTHLQKAQPVTLAHHLLAYAQMFKRDRERLKDCRERTDEMPLGSGALASTGYPLDREYVREKLGFARITANSLDAVSDRDFCAEFIFCMALVMTHLSRFCEELVLWSTDNFSFVEISDAYATGSSIMPQKKNPDMAELIRGKTGRVYGSLTALLTVMKGLPLSYNKDMQEDKEAVFGAVDTVKACLSVFRGMFETITFNTDNMYKSALGGYTNATDAADWLVKKGLPFREAHEITGRLVLYAINKKVRLDELTLDEIKSISPVFDETFYRAISIETGVSARDLTGGPAEKAVLKSIEQLSKRI

SEQ ID NO: 87830 - protein, 448 aa, Unknown
  Obtained from environmental sample
  DOMAIN (52)...(118): His Kinase A (phosphoacceptor) domain
  misc_feature (1)..(448): Xaa is any amino acid
RRSFSDDEMNILHSGGLLIANTFIRYDMTQNIRDTAIKLETALKEAQDANLAKSKFLATMSHEVRTPMNVILGVTESYLQNESLSQDVLDGYKKIYNAGDMLLHIINDILDFSKIEAGKLELISVKYDIMSLINDTAHMNVIRYQQKPVKFSLNIQDNMPANFIGDELRIKQILNNILSNAFKYTDFGEINLAFSVEHSNNENDVTLVFSVKDTGQGMTPEQVDKLFDEYTRFNLETNRTTVGIGLGMTITKNLIMMMNGTLTVNSQHGKGTEMIVRIPQRLAGHETVGKKHIENFKGMLLEQKDYPNSKKIKRELMPYGKVLIVDDMKANIDVAKLLLKPYQLNIETAESGLEAINLVRSGNEYDIIFMDHMMPVMDGMEAVKELRTMGYKSPIIALTANAVVGQQDIFISNGFDGYISKPIDIRQLNDSLNKFIRDKKNNAATASQ

SEQ ID NO: 87831 - protein, 93 aa, Unknown
  Obtained from environmental sample
  DOMAIN (1)...(87): Protein of unknown function (DUF497)
  misc_feature (1)..(93): Xaa is any amino acid
LNQKDHGFSFNEILEVFDDPAFLEGYDYEHSIKEDRYYGIGCLNNVLYVIVFYTIREKSESRGAIERKRIISARKADNEEQERYNDYFKKIKL

SEQ ID NO: 87832 - protein, 507 aa, Unknown
  Obtained from environmental sample
  DOMAIN (1)...(182): Peptidase family U32
  misc_feature (1)..(507): Xaa is any amino acid
MNIASGRGANMLSRYGVSRVVLARELGLEELRSIRSETNMELEIFVHGALCVSVSGLCLFSGYLGGKSANRGMCTQACRRLYHRGEHGDSTGDGYYFSPADLQLLEHLPALAAAGINALKIEGRMKSADYVGAVVSAYRMVLDAIEQGDEEKIQCGIAEGQKILRGDFARGKTAYFFNAAHTDDGVNWLNPAQDGGTGISLGVIEKIQGKAGERRALVSGGELSAGALPAAGDSIRLHRRDDSERVSHKLQFAEAAADGLTTSGFWLSIPDGFDKGDRVYLIQTKAMSKRHKPVIAPNAGMGGRGPGHEKAPQPQFPAAAPRKTAKNKSAVFPDGLYVATSRLNDLYIIQSSRPARVMLTLTRKTIDYLLDEDKPPLPFKPADIILILKPFFPQAAAQELADIIPSLVDRGYRQFMVNNLGHFSLFRDIRSEVQLIAGPWLYTFNAWALSYVLSLGVDGFVSPLENNRQNWERTIDTGNRQMRSLAFVPVFVWPPLFTIRANLGTLY

SEQ ID NO: 87833 - protein, 477 aa, Unknown
  Obtained from environmental sample
  DOMAIN (47)...(112): His Kinase A (phosphoacceptor) domain
  misc_feature (1)..(477): Xaa is any amino acid
MLNSALIIDNDGRTLGGIQSFDDITEKLESEAELIKTRELALQASRAKSEFLANVSHEIRTPMNAIIGMSELALREPLEPRVRDNVLEIKQAGSNLLAIINDILDFSKIESGKLEIVPAEYELASLFCDACNIMRAKMGDGLSFFAYIDGSLPCRLLGDETRVRQVALNVLNNAAKYTKEGHVSFSVTGRSSGGGFELEMAVSDTGIGIKGEDMGRLFGKFTRLDGEKNRAVEGTGLGLAITSNLCEMMGGEICVDSEYGKGSTFTVRLPQGVVDDAPLARLETPGDCATLVFERRPKYLESIEATLGGLGVPFAAASTLSAFKDGLSGGGYRFAILPKHLYDEAPGVLAAAAVGGAEVFVLLEFSETVPAKGVGTLSMPVSCISVANAFNHAGSEGDPGRAGGFEYFTAPGARVLIVDDIPTNLRVMEGLLAPYGMRVDTCASGEEAIELARAGGYDMVFMDQMMPEMDGIEAAGH

SEQ ID NO: 87834 - protein, 612 aa, Unknown
  Obtained from environmental sample
  DOMAIN (321)...(387): His Kinase A (phosphoacceptor) domain
  misc_feature (1)..(612): Xaa is any amino acid
MLEIKRINLEAYVMNEIAIVKKMAGSPLIKDYLADPTEAKLRMQAVKEIAAYRAAFENKSVFWISDRDKVFYSNDNAPYVVDPNSPDNYWYPLTLYKTEVYNFNINYNPDLDMINLWINAPVFDDGKKPLGMVGTGLELSAFVSALFSDLDDRMELYYFNADGEITGARNIEFISSKKKIGDVSIGMRVDFLTIAAKGDISGAKDIKRVSLKRNIDDEVTQGVLALAQNLSPSETRTLTVPHGNLVISTVPQLKWYAIAYMPDSIDDYKTSMTALFLVVLVVILLIFIIFNVFVSDFLKSQHETMLSLELARNEAEIANRSKSNFLAAISHEIRTPMNAIIGIAQIQLQRENLPDDYAVALRRIYGSANSQLGIVNDILDMSKIETGKMGLNPVEYDVPNLINDAMQFNVVRIGEKLIEFIVDVDENLPSRLYGDELRIKQILNNLLSNAIKYTNEGCVKLSVGYLTDGDGVTLRFVVEDTGQGMKPQDKERLFSEYQRFNAEANRATEGTGLGLNITKKLVDMMGGAICVESEYGKGSVFTVTVRQKAVECPAIGADVAEQLRKFAFTGDRRVSNLRIDRELMPYGNVLVVDDVATNLYVAEGLLALYQLK

SEQ ID NO: 87835 - protein, 1059 aa, Unknown
  Obtained from environmental sample
  DOMAIN (709)...(734): The GLUG motif
  misc_feature (1)..(1059): Xaa is any amino acid
MLPATQASSNVGGIVGFNQANTTLEYCYNTGIVTGSSAVGGIVGNVAAGSTVRYCVSLGERVTGSGTNIGRIAGIYNATLTGNVARELMRIGASGSESVVTGATTQGNGLDVSLGVGQQGSVFSGWNYSTIWNISGNLVVGGDLPTLKDNPQSPAPTLPGSNPALGTAANPFLVTNEADLRKVGTGTDGWTLSAHYKQTQNITMTTSNFPPIGYVSGTGTTKFSGVYDGDGKTITGLNITGTANYLGLFGSIDAIGTVKNMNVTGTITQNGDTSYTGGIAGTNFGTIENCSFSGTVTASACDMVGGIVGQNNGTVINSRNSATVSGKSQVGGITGRNEGKIENSYNTGTVSGSRYIAGIAGVNTNTGMYIKNSYNTGNITATPIITTESSMAGGIAGLNQSGATVEYCYNTGNVTASTNNVGGIVGSNSGSTVRYCVSLGARVTGGNNTCRVVGVMSGTTTLTNNKARADMKVGVSGSEAIPTTNIGANEREGESVSLGAAQNSVFSSFFTTTIWTLGSTLTVGGNLPILQMNTQSPAPTLPATYTAPGTAANPFLVTNEADLRKVGRATAPDGWTLSAHYKQTADINMTGGYFMPIGNITDRFFGSYDGDGYTITGFSQVTSSSNVGFFGYIGSGGTLKNMNVTGTVTNNGTNTSFTGGIAGYNIGTIDNCSFSGTINVGTTNDQVGGIVGQNNGTVINSRSNATISGRTSIGGIAGVNNGTIENSYNTGNITGTNQVGGIAGANSGTGSFIKIRNSYNTGDITATTTSTANAGGIIGMNQSSATVEYCYNSGNVTGTSSAVGGIVGNNANNCTVQFCVSLGARVTGTSNVGRVAGTVPGLGNNRARADMKIGASGAEATVSGNGSSSNGASNSIGTAQTSFFVGWDSSIWNISGDMTIGVNLATLKTNTQSPAPTLPAEYLVPGTAENPFLVANQTDLRKVGTETTAGGWTLSAYYKQTADIAMNGAFGRIGDNTDRFSGSYDGSGYTITNLNMGPAASYVGLFGYIGDGGTVKNVNVTGTMTQTGSNTSFTGGIAGIYAGTIDKLSFSGNCHGGTT

SEQ ID NO: 87836 - protein, 87 aa, Unknown
  Obtained from environmental sample
  misc_feature (1)..(87): Xaa is any amino acid
MPAIRKSADLRNNYGKISDFCHKYREPVFITKNGEGDLAVMSIETYEELAGRNELYRLIQEGIDDIENGKTLTEHEVLKNMESALGK

SEQ ID NO: 87837 - protein, 297 aa, Unknown
  Obtained from environmental sample
  misc_feature (1)..(297): Xaa is any amino acid
SRNTVIQATFRLQRQQTRREKPATRKDDIFKGDEFINFWKNLSRKTKYQINIDSNKLIAECAARLNDLNTIFPEPRIVITKGSYSMSEYKIALLGTNNGKAKIRITITDTDGRNDVLFGNYYKVGDNFGRKSKDKNLMGFQIVDINDDKKDPFVLFSNKQILTLTDPKVFSGAPEAGYEPITVKEAQANYPVFNIIERACKSLSLTRPTILSIFKSLNADRKNKLFRNPEGFSTVFISEIRDELAKHVAEKIEYTLSRDFKLFKGNKKNIEVSANAEDYALYAAESAPAYGEEEIPQ

SEQ ID NO: 87838 - protein, 346 aa, Unknown
  Obtained from environmental sample
  DOMAIN (158)...(228): TrkA-C domain
  misc_feature (1)..(346): Xaa is any amino acid
MHVVIVGAGNTGTQLAKYLINEKHDVSIIESNESRAKHASNRLDCIVVHNSGNDLSALKNSGITKADALVCVTESDEINMIICGLATSQLTNKSGKLLKIARVRNVDYLNLGHFDGNNVLGIDYLIHPGMEVAHSIIKAIEHGVIGEIYSFFNTPYEMGSIDIGEGSAMDGLSLLNYKNLVTYDSLVTLVERGDKVMLPSGSTVLKSGDHIHILADGKYLPDIYKIAGDVQKPIRKIGIVGGGELGCLIAEGLLNKNDNRFSLLKFLSQKNQRIVIIEQDTKLCGELAARFPSALILNEDISDESFVNEEELDDLDCLITTTANEDLNIITAVFMKSRGIKRTIAI

SEQ ID NO: 87839 - protein, 397 aa, Unknown
  Obtained from environmental sample
  DOMAIN (170)...(393): Putative RNA methylase family UPF0020
  misc_feature (1)..(397): Xaa is any amino acid
MENTETAVALCAVGAEKVVSNELRKLNLKVDDSLYGRVRFRADITGLYRALIGLRAADRILLEIANFKAADFDALFEGTAAANWERIVPKGMGLKVAKVRSNRSQLKAETSIQAIVHKAAAQRLCGKYKVNRLPEFSQGSPVKTAEVRVYVEKDMVSLLVDLSGEPLFKRGYRSEGGAAPLRETTAASMLLLSGWKRKFPLYDPFCGSGTILLEAAMYAWDMAPGLGRRFAIEDLLIADGEIEQSTREEFRSKIDFSRLVRIAGSDEDTRSISIAASNAARLCDIAEGRTPQRGIREADKTTGIELKKLTIDEASSPFPDTGFLVTNPPYGKRLGDQATAEQTYKKMGDLSRRFSGWKLAVITDNSGFESFYGKKADSCREISNGAIPSYFFQYDIL

SEQ ID NO: 87840 - protein, 741 aa, Unknown
  Obtained from environmental sample
  DOMAIN (82)...(242): DEAD/DEAH box helicase
  misc_feature (1)..(741): Xaa is any amino acid
MLEKFIKALFGSQHERDLKALLPILHSVNEKEAWAAALPADEFPKQTEKLRERYNNGESLNHLLPEAFALAREAARRNLGERPYDVQVMGSIVLHQGKIVEMKTGEGKTLMSVAAAYLNAIPGKGIHIVTVNDYLASRDAEWMRPIFSYLGMTVGTILSDMDNDRRKENYACDITYGTNNEFGFDYLRDNMHREMERRVQRGHNYCIVDEIDSILIDEARTPLIISGAAEDDTFKFAEVDKLLSSLKEVQKKENGEYPDETQGEEVVGDYKINEKNKNVSFSNQGLAAIEEILQKRGLIQGAIVDEGNFEYIHYFTQALKAHKLFHLDVDYVVQDGQVQIVDEFTGRILHGRRYSDGLHQAIEAKERIKIAQRNRTLATITFQNYFRLYTKISGMTGTADTEAAEFSKIYKLEVVVIPTNLPVARHDEDDVVYLNETDKYKALCDEIAEANKKGQPMLVGTVSIEKSEKISALLTRRGVRHEVLNAKNHAREALIIAEAGAKGSVTIATNMAGRGTDIKLGGSPESRARRRAGTQATPEQYAAMYNEEYEKWKKDYAEVKAAGGLYVIGTERHESRRIDNQLRGRSGRQGDPGRSKFFISLDDDLMRLFGGENIKGLMSKIGMSDGEPIYHPWLNKSIERAQTKVEERNFEIRKHLLEYDDVLNQQRKFIYEQRNAIMEDTNLTERVNTATDDMVGSYLDTYGETSRKDPPGAMKELSDTLNNKFNYILKTSADEAKDVEA

SEQ ID NO: 87841 - protein, 718 aa, Unknown
  Obtained from environmental sample
  DOMAIN (531)...(662): Acyltransferase
  misc_feature (1)..(718): Xaa is any amino acid
MAETHLLRGLNTEQKQAVLHSHAEEGPLLILAGAGSGKTSVLTKRILYRIGQGVNSANILALTFTAKAAGEMDERVKELAPDSKALLCTFHSLALRILKMQIQGVENWKRVGFQKIPMPKEQSDFEFQDWLMELNIKAGSVNRENLFCPELKLGKEKLEKLRQNVLKSAEIVFEDLIWLSIRLLSEFNEVREHCQNMWNEILIDEYQDINPSQYRLVRAILGSSKNLFAVGDDDQAIYGFRGADIGNILRFQKDFPNCKVLKLEWNYRSTASILEAANRIFTDKPLAFRKNLRAGALRPYPLFKENRKPEILVSQTAEEEILKLVYEIKFLKEEYSMKWSDFALLSRYNRQCEYYELALKDYDIPVIEDESPEDFDGVHIETIHASKGLQYPIVFYCGLAESLSPGELPENPKERKKQLGEEKRLFYVGVTRAEAHIFFLYCKQRYFKGELKNFKASRFLKYCEERKPKKGIAMPVFIFKILAVAKIIVFMFYHIPIYFFEKIFRASTTDIWLREKFLHWARFCLKTLRIDLNVGGQYNLAKVDWSRPVIAIANHNSYTDIPVILTSAQRPLGFLAKVELSRIPVLYYWMRKIGCVFIKRQSSKAGQKFMDKMLNYSSEKPPQIVIFPEGTRSKTGEMGAWKSGAFRMAAELKATVLPIAIKGTVATFEKRKNSKTVHEVSSQILEPFDVAQWERENGKEIEYKDLMARLNSIMQIKR

SEQ ID NO: 87842 - protein, 349 aa, Unknown
  Obtained from environmental sample
  DOMAIN (160)...(328): Domain of unknown function (DUF303)
  misc_feature (1)..(349): Xaa is any amino acid
MIRLVLQTPPIFGDNMVLQCEKPVRVWGCSGDEKGTVTVRWECGEHSVCASTIVYRSEWGLMLPPLAAGLSGELVINDRFDEIHFKNVITGDVWFAGGQSNMEMELVNCKNGKEELASCANLNIRFYQVTKRAVLDEDYFREESKSCWKECTPDTAAMLSAAAFFFARKINADVKIPVGIINCSWGGTSISAWISEEQLNKSTAGRRFIDDYAQRIGNKTSEQYNAEMADYFEQWQQWDERIRLRKEKEPDVSWEILNKECGECPWPQPAGKTSPYCPTNLHTAMIRRIAPFTMKGFIYYQGEEDYLRAADYREMMYYLVEQWRGDWNDNNLPFLFVQLPMYASRQEMD

SEQ ID NO: 87843 - protein, 447 aa, Unknown
  Obtained from environmental sample
  DOMAIN (1)...(87): SRP54-type protein, helical bundle domain
  misc_feature (1)..(447): Xaa is any amino acid
VFEKLSEKITDAFRFVTGKSSISEKNIEDAVEAIKMALLEADVNLRVVRRFVNSTIEEAKGEKVLRSVDPGQQFVKIVHDKLVSFLGDEDPASRALKLRGPDVISTILMLGLQGSGKTTSAAKLALRLKKEGRKPMLVACDLIRPAAMEQLAVLGGQIGIPVYKEDGAKDSVKVYQNAISWANKNMIDTVIIDTTGRMQIDEPMMQELSRLKNAVAPDEMLLVADSMTGQAAADIAKTFDEKVGLTGVILSKFDSDTRGGAALSLKTVTGKPLKFTGTGEKPEDLEPFHPERIAGRILGMGDVVSLVEKAQEVIDHKEALELQKKMEKENFTLDDWLNQIRSLKKMGSLQKMLEMIPGMQGQINEDDINKEELKYQEAILSSMTLKERNNHLIIGPPRRSRIARGSGTSVAEVARLLKKFEKMRGMMKKMAKGARGGAMPGIPGMFQ

SEQ ID NO: 87844 - protein, 192 aa, Unknown
  Obtained from environmental sample
  DOMAIN (103)...(192): SRP54-type protein, GTPase domain
  misc_feature (1)..(192): Xaa is any amino acid
MFEKLTGKISDALRFVTGKASISEKNIEDAVEAIKMALLEADVNLRVVRRFVNSTIEEAKGEKVLRSVDPGQQFVKIVHDKLVSFLGDEDPASRALKLRGPDVISKILMLGLQGSGKTTSAAKLALRLKKEGRKPLLVACDLIRPAAMEQLAVLGGQVGIPVYKEDGAKDSVKVYQNALSWANKNMIDTVII

SEQ ID NO: 87845 - protein, 143 aa, Unknown
  Obtained from environmental sample
  misc_feature (1)..(143): Xaa is any amino acid
MKKSNVKSLAVLLLFIIFGTPLSALGGRQNTAASGPVTIRFWHSMADEAGIAFDEYVKEFNAGHGAAKQITVEAVFQGQYADATAKLRPLLQTRQVNTLPDVMQIDATGVVDYLNTDYAFTIDDALAADRSYDLKQIMDAPLK

SEQ ID NO: 87846 - protein, 482 aa, Unknown
  Obtained from environmental sample
  misc_feature (1)..(482): Xaa is any amino acid
MKAYYEYKNGSFWAIRTEGSDCFTAHGSKYDEFWPELMLRAGSEKENWRMPPNAKKLPFESPEVAEQEAAKMAAEKSAGVIKQDAEFWRIAIEINAMLLFFVPDEYKTQELCALAAGRSGWALQYVPPEMRNRELCKQAVINRAYALEYVNEGEITEELCYMAIKQSGEALKFVPEKFKTPKLCLEAVKNGDWVLGFVPDELKTQELCAEAVRKEHRMLEYVPEALKTKELCLLALSLNDDLVFMFSKEGMECPLAWVPREFITKEICLDAVAAYSESLKFLPDIFKIPEVYLAAVTKQGWALVHVPEEFKTYELCLAAVNNHGPALKYVPEKHKTTELLDAALKNDGTALEFVPEEYKSREICLEAIKNNWQGLAIKYVPAPLLTKEFYTEAFELNTKIFEHIPKEFITRQMYKKAVKKNEYSLKYVPAEFRSDKIITEAIKQNGFALDHLDDRQKTERLCLLAVKSHGEALQYVPYPLRT

SEQ ID NO: 87847 - protein, 259 aa, Unknown
  Obtained from environmental sample
  misc_feature (1)..(259): Xaa is any amino acid
MTEEVNREAVRRNGNALEAIPEEMRTFELCVEAMQNKNSLDSPLIFVPDKIKTPEFCLSCIRIDGTNLKGVPEDLKTYELCLEAVRKNGYALKFVPPHILTKEIILAAVSRYSDTIEYVPAAFKTDEVYIEAVKNQHFSSNGDVPEKYYTKENCLAMLSKHPLLLSSIVKNLPKSIKTEDFFIAAARVNGEMLEYVPEKLRTQELCFEAVKNNGSAIIFTPPEFITETLCLAAFESNAFALKFIPAKFKTREVCLSAVK

SEQ ID NO: 87848 - protein, 230 aa, Unknown
  Obtained from environmental sample
  misc_feature (1)..(230): Xaa is any amino acid
MKKQIAVLLCVAALIIQPLFAKGATDGGAQNNSIANQGQAKYVFLFVGDGMAMPQVSSAEVFSTARSSKDINITRLGFSQFPVTGLTTTYDAGTFITDSASAGTAIASGNKTLSGVINMDAGKTRKFKPITEYIHEAGMKVGIVSSVTLNHATPASFYAKAPSRSDYYDIAVQLAKSNFDYFGGGSILQRTGKNNDQQDAVAIAKANGFTYIDTKDGFNTLKPGSGKVSP

SEQ ID NO: 87849 - protein, 190 aa, Unknown
  Obtained from environmental sample
  DOMAIN (68)...(189): Polysaccharide deacetylase
  misc_feature (1)..(190): Xaa is any amino acid
LNDPALTYPHERPFASLHDRIPYVPFPDRQPIEWLGGARLAVWVVPNVEHYEYLPPAGPVDPYPRSPHPDVRKHAYHDYGNRVGFWRMLPVMDRHEIPCTVSLNVAHLDHYPEIASAMVERGWELMSHGMYNTRFLDGMSLAEQIEFFNACETVVRRRTGRGIRGMLGPYISATAETPDAMALAGMTYHA

SEQ ID NO: 87850 - protein, 407 aa, Unknown
  Obtained from environmental sample
  DOMAIN (165)...(354): Adenylate and Guanylate cyclase catalytic domain
  misc_feature (1)..(407): Xaa is any amino acid
VFCFPFFAAFMLESIGIFGAKKKYIIACLLGYSLLCALFIAFQNTKQSVNAMYTIMTNINTIPILACSIIILSYVVFFRKNIKIVPLFIIALTVAGSSLRDLFVLQSGTVPLFWAAPYSFMIMVIIIYIILITDENFIQNAFSRYLAPEVISEIVKDPDKLNLGGEKREMTAIFTDVQGFSAISEQLDPVHIVQLLNKYLTTMSDIIMEHLGTVDKYWGDAIIAFFGAPLFNAEHPALACRSALAIKAAEKKLNETIVTEGLSPVPIFTRIGINTGEMVVGNMGAEKKMDYTIMGNAVNLASRIEGVNKQYRTGGILISEYTRARIGDEFPLRRIDRVRVVGINTPLRLYELLPTDTEQGTLEIWEKALDLYEHRDFRKAFGLFVSLIKRYPQDNVALVYAHPCKAF

SEQ ID NO: 87851 - protein, 86 aa, Unknown
  Obtained from environmental sample
  misc_feature (1)..(86): Xaa is any amino acid
MNISTENLVSITETNQNFSRVARLVDRTGAAVVLKNNVPRYVIFDFNQLNDEETASTSEALVSARKLLKKHLPAFKKLTKQITQKQ

SEQ ID NO: 87852 - protein, 845 aa, Unknown
  Obtained from environmental sample
  DOMAIN (310)...(379): HAMP domain
  misc_feature (1)..(845): Xaa is any amino acid
AIVVALATTVMVQRATKIAKELTKDKVTYLVRQRCEYWSGRVDGFFQVLHTISNNMNYYENVDVNQRREQYEGTINSIFEDVPDFIRMFTIWKPNALDGMDSRYIGRVGSTETGQFAFALGKETGEIVPQVSTQVQSINEFFRTATPASKEEVSHPTTAMLLGKEINQIRLIVPVLNGKRTEVVGVVGAQVNLDIIQPRITTTIKEFDEISAMSIYSSNGFVMASYVPERIGKQMVDAEVQFGSYINEAFDAVKAAKEFACYSWAPTMKTNIQIAVVPVTLGQSNTTWSIMAGTEEWYIMKDINPMIMFAIIIAAVAIVVSAIIIFVVLDRTTKPITVVANTLKIVAEGDLTRSVNVDSKDEIGKLAHDFNYTVGRIRNLISTIKYKINGLDHTSFELSVNMGNTSSAVEQITTNLDSMRNLMVKQENGAEEAGKAVGDIKINIDNLKKMIEEQTDSVNRSSSAIEEMTANINSVTRTLAENSKNVSVLTEASENGKTGLQLVAQEIREIAHDSEGLLEINSLMNNIASQTNLLSMNAAIEAAHAGEAGRGFAVVADEIRKLAESSGQQSKTTAAMLKKIKASIDNITRSSNEVLERFGAIDSSVKTVSEHERNILNAMEEQETGGKQILESISRLREITHSVKKGSDEMAVSGETLVRETAEFIKTSQKAVKGMNEILTGVNQIKVSVNHVNEMSMENNQNFELLKQETEKFHITAGNEKLKILVVDDDDIHLEMLKAVLSSEYDVTCVKSGKEALNLFYQGLVPQLILLDLIMPDMDGWNTYGRIKAIGGLHDTPIAFFTSSNDPKDIIHAKEMGAVDYIKKPYDKDDLLRRIEKILKKDSPY

SEQ ID NO: 87853 - protein, 268 aa, Unknown
  Obtained from environmental sample
  DOMAIN (1)...(238): D12 class N6 adenine-specific DNA methyltransferase
  misc_feature (1)..(268): Xaa is any amino acid
TIENNCKPLFHKLAGIGIADPVKFLEENDISSAESFSTFVADNYAPNDHCERMYISKQNAMRVDYIRNTIEEWNRSGLIDEIEYYYLLAALIEGVPYVSNITGTYGAYLKTWDKRAHKAFEMARLDVLDNGRNNRCYNADANSLIREIDGDILYIDPPYNSRQYAPNYHLLETISRYDSPTICGVTGMRPYDDIKSAFCVKSEVLEFFEDLVAKARFSNIVMSYSTEGLMSSGQIEKILKRHGIENSYKRYDIPYRKYRSKISNEQRY

SEQ ID NO: 87854 - protein, 209 aa, Unknown
  Obtained from environmental sample
  DOMAIN (5)...(140): ThiF family
  misc_feature (1)..(209): Xaa is any amino acid
MERLGGAHVMVFGIGGVGSYASEALVRCGVGAITLVDHDLVGETNINRQAHALHSTIGQPKIDAMASRLLDINPAAKISKIAKFYSPGSADVFFQGPVDYVLDCIDTLACKIDLAIETSKRGTPIISCMGTGNKLDPSRFQVSDISKTRDCPLARNMRKELRRRGVNHLKVVYSQEAPVAPLDTEMHSAMLQELSPEAASRRAIPGSVS

SEQ ID NO: 87855 - protein, 613 aa, Unknown
  Obtained from environmental sample
  misc_feature (1)..(613): Xaa is any amino acid
LTLALSAFFAVTAAAPAAVPVAADTAAAKAAPAAAGTAVKAAPVVPAAVTIPGTDIPVPSAVPAGLAVPEVPAEKARIIVADTLQFQWPPIDSAATAKAKAAAAKQSAKTAAADTSSAKTLTVDTSSAEAKTDAFDTPPPKPAAPPPIKRPRTRQELGKMSREELFRLAFGRSAPDKPRNLTVRLFGEGRPVGNTEIVYNDDFTSFTFQSMPFARLLDRLILPEARAAAGDSLGYFNSEVMTAAGYKLRVDDMKFELHVTFPPEDKAVQFTSLYGGYQAAEPRGEEIPPADVSFYANYSLDERARYLWYGYHSSYKGVRYGGNDTIMRDPATVNVDGALNVREWVLESSGWIREPYGGQPFTWENIRRGDARVVRNFVKLRSQLAIGDITAGTSIVPGPMAGGVRYERNSYFFGNNPNDNLNSVTFFMPEPGEVEVYMDGTFRRRLYLPAGHHQVGGFGGEVGRNRVRLLLRMASGTTEEIPFEFVLSHPRIMARGDVRYSLSAGVRREYAPSPACFSYDVSEPAAGADYAYGIHHAVNAGFSAVATRHAGQAGTQISFGTGSLGFVDLRAIASYLMAEQVGGGRMEASYTADLRRPVARFNRLITGDPDKTF

SEQ ID NO: 87856 - protein, 507 aa, Unknown
  Obtained from environmental sample
  DOMAIN (369)...(485): Metalloenzyme superfamily
  misc_feature (1)..(507): Xaa is any amino acid
MQKRPVCLIIRDGWGRGNPEQSNAIYSADTPFTDAYESGCPTTLVKTSGRSVGLPDGYQGNSEVGHLNIGAGRTVYQSLTRIDKSVEDGDFFTNAAFIKAIDFAKKNGGNLHLIGLIQEEGVHAVTRHGVALLKLCRDKGFKNVLIHAVTDGRDTPPKSALEHMALLQKGMDDTGVGQVATVIGRYYAMDRDNRMDRTELAYRAIVEGEGAPANSWKEAIESSYAEGVNDEFVKPHILTPANYKGATDKDAVIFFNFRFDRTRQLTKAMVEPKFDAFNRRNGAPVKCFVAMTHYYDDGNFTEAYPEIHNANILGEVLSKRGLKQLRCAETEKFAHVTFFFNGQRNDPYEGEDRILIDSPKVATYDLQPEMSIYGVRDKLVEAINSNKYDAIICNYANGDMVGHTGVYDAIIKAVEAVDECVHDAVEAVIKLGGVAIITADHGNAEQTKLPDGSPMTSHTTNPVPLTIIGAGDIKLRDGGTLADIAPTFLQLMGQEQPGDMTGKTLIC

SEQ ID NO: 87857 - protein, 130 aa, Unknown
  Obtained from environmental sample
  misc_feature (1)..(130): Xaa is any amino acid
MTVCPSGWHLPSRGEWETLADLAGDISTYNYGINNAGKMLKAASGWNWWYGAVSQSGDGTDDFGFSALPGGYRYSDGKFYSIGDYGYWWTATEYGSGIAYGRDMRYDEGFVNEDYHVKGGGDSARCLQDN

SEQ ID NO: 87858 - protein, 846 aa, Unknown
  Obtained from environmental sample
  DOMAIN (9)...(169): DEAD/DEAH box helicase
  misc_feature (1)..(846): Xaa is any amino acid
MNYLDLPVYKHKDIILNALEKTQALVVESPTGSGKTTQLPVILYQAGYAKNGMVGVTQPRRIAALSVSEFIARQMGCAMPGLVGYKMRFEDKTVPNTQIKIMTDGILLQEMKLDPWLSKYNCLVVDEAHERSLNIDFILGLLKRVLEERKDFKVIISSATINAEVFSEYFGECPIVKIDAQTFPVTLIYDPPAVEGIPGSQIAGEALLSKIEAITERLINAKQNENGEEKIEGDILIFLSGEKMIKDCMTTLAFSPVGKYLHLLPLYGRLGKEEQEKVFDPAPKGKVKAIVSTNIAETSVTIDGITAVIDSGLSKLNYYNPRTFTSSLVEAPISKASANQRKGRAGRTREGTCYRLYGRKDFENRQLFTTEEIYRTDLSEVVLRMADLGITSFEEFDFISPPSKEGLIAAIETLDLLDALESDHSLSNTGRLMTEFPLPPRHSRIIVEAILKYPYVIKETVIAAAFLSTQSPYILPPGEETDARQAHHRFRDEDGDFVSYLKLYAAYMESSSKQKFCEKNYLDERAMAEIANVTNQLEEIVSHLKIPILSGGSQQDYLCAVARGLIQFVCVRENRDFYRSLRADKILIHPGSVMFRLTPQYIIAGEIVRTTRMYAMSVSPLAYETLEKISPALVAGLGAGRRGREKDTGSKQRPRDRDFTNHIKIGSEVFTIETVRGKKQVMLPWEKLKRVIDNTVADNAFIYKSLRGVVILDGNYTLLEGEKLKLILLLAPALEIEGALKRKLFSKKSFNSYSNPDALLAVLPDLVKPGLLKGNGPNGKRELGFLCLYTDGEGNYWTKCSRRFHTSLNESLASVETLIDELAGHVDAEKKRLVNQCYRRLSDYLG

SEQ ID NO: 87859 - protein, 463 aa, Unknown
  Obtained from environmental sample
  DOMAIN (270)...(417): ABC transporter
  misc_feature (1)..(463): Xaa is any amino acid
VIRGKKGEHQKIIEDAKKAGFARARIDGVPVSLDEKISLDKQKKHTIEIVVDRLVIGTSIRQRLAESCEAALQAADGVMLVLCQGPKGSDGSEGPVTEHFFSQKNACPDCGVSIPELQPRLFSFNNPFGACPACTGLGIKMEFDPSLIIPNLSLSFNEGGVVPYNPDSAWYRSRFESIARHFKFSLDTPLKDIPKKALNAMIYGSDDDLEVHYRNRDGTSHFDYNTRFPGVLEDLKRRYMETSSPGIKDWLEKFMSQKPCEECGGKRLKAEVLAVTVGGRNIWDLTGLSVTDTLKFFETLKINKTEKTIARQILKEINARLGFMKNVGLDYLTLERKAATLSGGEAQRIRLATQIGSSLVGVLYILDEPSIGLHQRDNQRLIDTLLHLRDIGNTLIVVEHDEQTLRTADHIVDLGPGAGVHGGRVVAQGKPSEVMKVEESLTGQFLSGALKMDVPKSEGKETA

SEQ ID NO: 87860 - protein, 100 aa, Unknown
  Obtained from environmental sample
  DOMAIN (43)...(77): Putative Fe-S cluster
  misc_feature (1)..(100): Xaa is any amino acid
MIIIVITAVFALAIAFVLGTALGFFKDFFAVPQDPLTASIREALPGANCGACGFPGCENYAIAISSGSAGISSCSVGGPALVEKLAQITGKAGEAVKQTV

SEQ ID NO: 87861 - protein, 435 aa, Unknown
  Obtained from environmental sample
  DOMAIN (275)...(308): Tetratricopeptide repeat
  misc_feature (1)..(435): Xaa is any amino acid
MPAAQETFPHPRASTPLAGSGALPVRDAAVPGAAPLKFAVVIGNANYTDIAGLRNPINDANDMNTALTELGFKVEMILNGSLEQMETAIINLKRRLGASKNSYGFFYYAGHAVESKGNNYLIPADAKIPGENMLRERAMSVQTLLLELEEARNDLNIIVLDSCRNSPFGWSRGGNRGLAVVDHIPTGSVIIYATGAGQVALDGDGKNGLFTSQLLKNLKAPGLELQQIIKRTGADVMRESGNAQVPAVYYQFFGEAYLGTGSDNSGSRTLIKTEAGAHFIRAEDFFAKEDHAAALAAINEALRLDPANAAFYTARGKYRLFSIGSYINLTERDSKDVLADYNEAIRLDPKNPEWYFWRACLYLYGMGQQDKAFADYPEAIRLEPGNAVWYEGRGQAYEHLGQYDKAIADYTEAIRLNPEKLKYYIRRGDLYFNWG

SEQ ID NO: 87862 - protein, 380 aa, Unknown
  Obtained from environmental sample
  DOMAIN (132)...(165): Tetratricopeptide repeat
  misc_feature (1)..(380): Xaa is any amino acid
MELEEAGNDLNIIILDSCRNNPFGWSRSGSRGLAVVDHVPTGSVIVYATAAGQVAMDGDGKNGLFTSQLLKNLRVPGLELQQVIKRTGADVMRESRNAQVPAVYYQFFGEAYLGTRPGADNSASRADIKAEAFAQFTQAEDFANKGDYVTAFASINAALRLDPRNAAFHIARANYYIKSGGDRQKALDDCTEAIRVAPKNPDCYTIRANFYRSLEQNDKALADYTDAIRLDPQNSERYRYRADFYKSLKQNDKALADLTAAIRLAPHNPSMYGSRAYFYRELEQYDKAIADYTEAIRLDPKNPGRYSWRADLYRDMEQYDKAIADCESALLIDPYYAEAQRLLEELRAAQRLPEEFHDAEDAEYVKDAESAEYVESAEYE

SEQ ID NO: 87863 - protein, 384 aa, Unknown
  Obtained from environmental sample
  DOMAIN (3)...(160): ABC transporter
  misc_feature (1)..(384): Xaa is any amino acid
KRFELPCLQGFSLRNVALQSKWENLSWIEFHSKTLLELNKELPTYLESVPKRLKNTLLDIPLRISILCDLGLGHLSLGRLAETLSSGEAQRIRLAALCTGHLNGILLCIDEPASGLHEKDIEKLWSVLLRLKERGNTLAIIEHHPMLIRRADNVIEMGPGAGEEGGEILNFVPERKIDLDLPKNNVKKYLKISKINFNNLKNLKIEIPMGAMSVICGVSGSGKSSLLWGVIEPYARKHTDLAVLAARTGRAFAQKRSTIATAIDIMQVIKNLFASLPESKIRGYLAPKFGTDKPGGRCETCKGDGYLLDPSGYEESECPICQGKRYRDEILEIRFKLMSIADVLDLSVSQALEIFANFENLTSKLKPLADTGLHYLRLGHQPRI

SEQ ID NO: 87864 - protein, 360 aa, Unknown
  Obtained from environmental sample
  DOMAIN (43)...(360): DNA gyrase/topoisomerase IV, subunit A
  misc_feature (1)..(360): Xaa is any amino acid
MAETQEKQELASPVPTGKVIPVAIEDEVKTDYLNYAMSTIVARALPDARDGLKPVHRRLLYAMDTLSLKPGGATKKCALIVGETMGKYHPHGDMALYQSLVRMAQDFSLRYTLIKGQGNFGSVDNDPPAAMRYTEATISKVGSEMLVDLQKETVDFAPNYDDSLKEPVVLPSAIPNLLVNGSSGIAVGMATNMAPHNLVEICDAICAHIDNIEISIDDLMRYVQGPDFPTGGVIFGRRGIREAYKTGRGKLLVRGKFNVETTKSGKEKIVFTEIPYNVNKAELLEKIGQLMRDKLIDGIANANDESDREGIRIVIELKKGAIVKVVLNQLFSRTPLQTSFSIINLALVNGRPQCLNLKEL

SEQ ID NO: 87865 - protein, 289 aa, Unknown
  Obtained from environmental sample
  DOMAIN (103)...(246): GAF domain
  misc_feature (1)..(289): Xaa is any amino acid
MKGECVRMRESNYNKDQAAFLRGYGIKSILMMPIFTHGDLWGIVTFQDHTNDRYFDEDCSDLLYTAARIFSNAVIREEMKRHEKAEAALNRAAIMFLSQKEEAFEATMTAGIKEIADSFKLDRFSIWRNSPKPDAVHVSQIYRWDRESGGTTMPTKGLVDVTYAQLAPRWEKLLASGETINSPVRLLPEAAMLSTFGCVTAFITPIFINNVFWGFALLEDRHNERFFEKEDIDMLRSAAFLCANTVIRADMEREIANVNEFNNAILDASPLGFTIFDENAHVVDCNDFT

SEQ ID NO: 87866 - protein, 798 aa, Unknown
  Obtained from environmental sample
  DOMAIN (121)...(264): GAF domain
  misc_feature (1)..(798): Xaa is any amino acid
EKYVPRWREIFSSGGTINGPVKFMPEAAVLLSFGLVSICVTPVFINNAFWGIGFFEDLHSERYFEKECVEIMRLAAFLCANTVIRADMEKDIRNHGEQLRIKLEQQELISELSRGFISSGDSQTLVQEAVAKLGRYHKVSLVSVFAIDYQHKNIYMAYQWCADDSPPRTAITNLYTYLTDIFPITLPSCATLPIVVCDDTADNSDAVFQALYAIGVRAVISAPLYVDGHLWGAVSVEQNSTPRKWTENEKGFVAMTASTIAGVIMRDIYTKKLTEALNKAMEASKAKSDFLSSMSHEMRTPLNAITGMTTIGKKAKDMERKDYALGKIENASTHLLGVINDVLDMSKIEAKMLELSPGEFNFEKMLQKVVAVVNFRVDEKRQKLVVHIDNKIPKTLIADDQRLAQVVTNLLSNAVKFTPEEGSIVLNADYMGEEKGLCTIQVSVSDTGIGISDEQQKRLFSSFMQAESSTTRKYGGTGLGLAISKSIVEMMGGKIWVQSEPEKGSTFIFNVKAKRGAEGKQKHLLDVNLSDVRIMAIDDDPDILSHFIEIMRGYGVTIDTATSGEKALELIDQKGGYHIYFIDWKMPGMDGIQLAREINSRRSGNSIVTMISAAEWSTIAEDAKAAGVDKFLSKPLFPSTIAEVINECMGVDKRDVEKSHAADIAGIFAGRCILLAEDVEINREIVQTLLEPTKLEIDCAENGAEAVRMFSETPLKYDMIFMDIQMPEMDGYDATRCIRAMNIPQAKTIPIIAMTANVFREDVERCLKAGMDGHVGKPVDFNEVLAKLRSFWDTGLNK

SEQ ID NO: 87867 - protein, 220 aa, Unknown
  Obtained from environmental sample
  DOMAIN (1)...(220): Homocysteine S-methyltransferase
  misc_feature (1)..(220): Xaa is any amino acid
AEAGADIIETCSFNATSVSLEDYGIGDLAYEISATAARIARKAADAFSTAVKPRFVAGSMGPTGKSAGLSPDVNDPAKRSIYWDELEAAFYDNARGLLDGGADILMLETIFDSLNAKAALFAIKRLLDERNIDIPIIISATITGDSGRLLSGQSLEAFYASVLHAAPWAIGLNCSFGAEKLLPHIRRLSAIVPCFVSSHPNAGLPNKLGAYDESPESMAF

SEQ ID NO: 87868 - protein, 299 aa, Unknown
  Obtained from environmental sample
  DOMAIN (61)...(105): Bacterial regulatory helix-turn-helix proteins, AraC family
  misc_feature (1)..(299): Xaa is any amino acid
MKPYQLLENILIDIEEGIKQNIDAFTLSKRYNYSEIHLRRLFSFAFNKPISGYIRSRILSESLNDLLHTDKNIIDIAFDYGFDYEQSYNRSFRREFGISPGNLRKSGQIVKIQPPLHLFDENKIDDNAFFGPEFVIVPQFHLIGKPHKIPFNISLRKAPNVGKLFWENERRRIKKVINPDVYIGFTHKINHEKKYSEYLPSVQVRDLSDVPPGFSGTTFNTSLCARFRYIGQHHFYDINRKIAKKMYSAILKYMNDKNSQYSLLSYKTYFERIDTRQYDGNYCQMEWFTPVTEKHLNKK

SEQ ID NO: 87869 - protein, 422 aa, Unknown
  Obtained from environmental sample
  DOMAIN (30)...(244): Methyl-accepting chemotaxis protein (MCP) signaling domain
  misc_feature (1)..(422): Xaa is any amino acid
MVKQENGALEAGKAVGVIKTNIDSLNKMIEQQVESVNISSSAIEEMTANIHSVTGTLTENSKNVGVLTEASENGKTGVQTVAQEIQEIAHDSEGLLEINSVMNNIASQTNLLSMNAAIEAAHAGEAGKGFAVVADEIRKLAESSGQQSKTTAAMLKKIKASIDNITKSSNDVLERFGAIDSSVKTVSEHEQNIRHAMEEQETGGKQILESISRLRDITSSVKKGSDNMEESGKTLVKDTDEFIKTSKETVEGMNEILKGIHQINVSVGHVNDVSQENNKNFESLKQETQKFEDTAGDEKKKILVVDDDGIHLEMVKTVLSNEYDVSTARSGKEALGLFYQGLVPQLILLDLIMPDMDGWNTYGKIRAIGSLYDTPIAFFTSSSDPKDIKHAQETGAVDYFKKPFNADDLTHRVRKILTGRQP

SEQ ID NO: 87870 - protein, 185 aa, Unknown
  Obtained from environmental sample
  misc_feature (1)..(185): Xaa is any amino acid
MKHLLLPLLCLLLFFCAKQQVNPELQADLKPSSSSSGSEQQNLLFWDGKSEMLRGVAIGNSVWSLQEYANLAINDSSDYIRISADGFNAARFYLSYKFFENDAEPYSYKQGGWLFLDRNIELAKKNGIKLILNMHVPQGGFQSNGEGGALWDIEENQKRLVALWREIAKRYANETSIAAYDILNE

SEQ ID NO: 87871 - protein, 282 aa, Unknown
  Obtained from environmental sample
  DOMAIN (7)...(282): Phosphoglucose isomerase
  misc_feature (1)..(282): Xaa is any amino acid
MSTQNISYNDKFLSTFLSASELESYNPAVAQAEKQLVSKTGLGNDFLGWLDLPAKTPRDLIKSVADKAGDIRDKIKDGFLISIGIGGSYLGAKAAIEFCSPSFDDLRKPRVLFAGQNINSDYLADMLELVKDREVAVNVISKSGTTTEPAIAFRIVREWMEKRYGRKGAAERIVATTDRAKGALRKLAKEEGYTAFEIPDDVGGRFSVLTPVGLFPLAVAGLDINKLLEGAASASAFCSGESVEKNLAGRYAANRNILFRKGYTTEVMATFQPALHYVNDWW

SEQ ID NO: 87872 - protein, 514 aa, Unknown
  Obtained from environmental sample
  DOMAIN (22)...(512): Carboxyl transferase domain
  misc_feature (1)..(514): Xaa is any amino acid
VSEKLEQLKEIRKKLEEAGGQKRIDKQHESGKLTARERIAMLFDEGSFVELDAFVKHRCVNFDMATTEAPAEGVVTGYGKVYGRLVYAYAQDFTVIGGSLGQMHAAKICKVLDLAAKMGAPVVGLNDSGGARIQEGVDALSGYGQIFYRNSINSGVIPQISVIMGPCAGGAVYSPALTDFVFMVDKTAHMFITGPQVIKAVTGEDVSAEALGGAMTHNKVSGVAQFVSPGDRECIAEVKRLLSFFPSNNRESAPTYQTPAGGNDVIGELNDIVPLEPKRAYDMKEIIRKLADSADMMEVSAHYALNIITCFIRINGKTVGVIANQPSWIAGCLDINASDKAARFIRTCDCFNIPILNLVDVPGFLPGTEQEYGGIIRHGAKMLFAYSEATVPKVTVIVRKAYGGAYLAMCSKDLGADLVLAWPLAEIAVMGPDGAANIIFKNDIQNSADPSATRQQKIEEYTREFATPYKAAERGFVDDIIEPSQTRLRLISAFEMLAGKKGDLPSKKHGNIPL

SEQ ID NO: 87873 - protein, 303 aa, Unknown
  Obtained from environmental sample
  misc_feature (1)..(303): Xaa is any amino acid
MFGLFVEGKSDFESMGEKRESLFFKEALGLPCVYAKETARLYLGKMAGDADGIVEQLRESSAKIIRQAPLHGLWIQGKHYLPVDVDTTAMDNSKTKKEGVNRTYRGFDGFHPIMAYVGKEGYLLDSELRPGSQHCQKGTAAFIEGLNARLGGIKSGGRLLFRLDSGNDSFDTLKAVTGKGRYCVIKRNKRRENDEEWLKRAKRHGKRVESRKGKKVWIGTVRMHPKRKGEALEEVMCVFEVIERKTDSQGNRYLFPETEVNSWWTNLGCGAEKVIELYRGHATSEQFHSGLYPNRCTQLSVVT

SEQ ID NO: 87874 - protein, 378 aa, Unknown
  Obtained from environmental sample
  DOMAIN (69)...(377): Poxvirus D5 protein-like
  misc_feature (1)..(378): Xaa is any amino acid
LIHEKGLATVRNIYDDLLKTNDYSERNEIENFAKISESIRRREAMVKTAQYIKELNTGAEELDKNPWLLNVRNGTIDVLTGDFMEHRQEDMITKLANVDFDPSADCPLWKKFISEIMNNKPELINFLQTATGWSLSGDISEQTMFILFGTGANGKSTFLNTIMYLLGDYAASTFTETFMKKSGDGNTNDVARLRGTRFVATTEVEDGRQLSEPLIKKITGNDQMTARFLYGEFFNFTPTFKIFLATNHKPVIKGTDHGIWRRIKLIPFMTRFTEDKQDKHLEYKLREEASGILNWLLEGAAVWRKERLQTPNIVSSATDEYRVEMDVIGNFINERCVQKKELKINIRFLYKAYSEWCGENNEHAVSERFFTLRVKEIG

SEQ ID NO: 87875 - protein, 86 aa, Unknown
  Obtained from environmental sample
  misc_feature (1)..(86): Xaa is any amino acid
GKFAVNKIVLAAAMNAYNALKMLGQKSIEKEGRKKLKRKRVGKVIRDLICVAGKLVKHGRELIFKINEKDPMLPVFLRLNAALDCS

SEQ ID NO: 87876 - protein, 285 aa, Unknown
  Obtained from environmental sample
  DOMAIN (12)...(211): haloacid dehalogenase-like hydrolase
  misc_feature (1)..(285): Xaa is any amino acid
GVVVARSTEPHTELITKGAIEEVLSVCKYAEYQHKVEPLTDEIKNYILKKVEGLNESGMRVLAVAEKINPSPVGQFSVADESDMTLLGYLAFLDPPKESTAKAIKALKEHGVSVKVLTGDNEKVTRSVCKQVGLPVEHIMNGWNIERLSDKELSEAVENVDVFAKLSPQQKARVVTTLRNNGHSVGYMGDGINDAAAMKASDVGISVDTAVDIAKESADVILLEKDLMVLEEGIIEGRKTYGNMIKYIKMTASSNFGNMFSVLAASAFLPFMPMLSIHILFLNLI

SEQ ID NO: 87877 - protein, 107 aa, Unknown
  Obtained from environmental sample
  misc_feature (1)..(107): Xaa is any amino acid
IRFLKHISRTSALAFLIDLSDDNYISAFDVLQQELASFSADLVQKKRLLVGTKTDLPETGERLAELSAKYPNEKVFGISVFSGEGIKELALEFLRLADSEAASEVQA

SEQ ID NO: 87878 - protein, 363 aa, Unknown
  Obtained from environmental sample
  DOMAIN (225)...(345): HD domain
  misc_feature (1)..(363): Xaa is any amino acid
MRLAILGGSFNPIHLGHLFLADAVLSELRYDRVVMVPAYISPFKPAAVGMEDSAQQRLEMIAASITADPRLSVDACEIRREGVSYTVDTVADIIRRYNPDGKPGLIIGDDLIGEFPKWYRSDEILSMADIIIARRVRSGSPEVPYPYTGITNDIMEISSGAVREKIASNSTWRYLVPNAARIIIEDRKLYGFRDPTANNGARPASVKNIIQRIENEARANLNQARYIHSRHTALLAWDLCCRFRKDYPSLDPDLGYLVGIAHDLCKQLCDDEQIRLAKIYGGEISRIEKEKPSLLHGRACAVMLKERFKINDNEVLEAIAHHTEGYKDMGPLAKVLYIADKMEVSRVKVEPALRNPDIVRRYS

SEQ ID NO: 87879 - protein, 504 aa, Unknown
  Obtained from environmental sample
  DOMAIN (249)...(465): FGGY family of carbohydrate kinases, C-terminal domain
  misc_feature (1)..(504): Xaa is any amino acid
KTVCGIDLGTQSCKVIIYDFKNKSLITQASAPVGMIAENNGTREQKAEWYNDALKNCFDKIASETKKTIAAIGVSGHQHSLVPLDEKGKTVYNVKLWCDTSTTQECEELTKLAGGEKKLISRAGLPMRPGYTAPKIQWLKNHKPKAFAKIRHILLPHNYINYLLTGVYCAEYGDASGMAIFDVRKRKWARDICKLISPDLEAWLPPLIEADAIAGRVSKEAEKIYGIPEGTLVSSGGGDNMMSAIGTGTVRDGFLSMSLGTSGTLFGFSKTPVIDPTGNLAAFCSSSGGWLPLLCTMNCTVASEEFRALFGLDVKAFDAEAAKAPIGTAGVLVLPFFNGERTPNLPNGRASVNGVTAANFKLENLARAALESAIFGMRIGLEGFNTLGFKAREIRLTGGGSKSPIWQSIAASVTGLPVKVPASSEAAAMGGAIQALWCLQKNSDDKLSEKAKDAKSNTIEALADEHVVLEGGKVVKPEKKDIAAYNKAYEAYSRYLGVLSPLYK

SEQ ID NO: 87880 - protein, 60 aa, Unknown
  Obtained from environmental sample
  misc_feature (1)..(60): Xaa is any amino acid
KNKTAKFEYVNGPIELSFRNKLSDSILSEMGIKQHICDILEGGDEAFKLREQKYKEKLSI

SEQ ID NO: 87881 - protein, 216 aa, Unknown
  Obtained from environmental sample
  DOMAIN (10)...(216): Protein of unknown function (DUF1016)
  misc_feature (1)..(216): Xaa is any amino acid
MPLTNNQHNFIASIKEKIRLAQYEALKEVNTQLIKLYWEIGKDISEKQGENWGESIVSVLSKELQQEFPGISGFSERNLWLMTQFYNEYQNVEFLQPLVAEISWTKHITIMSKCKDNQERRFYIMATKNFGWTKNVLIHQIENKTYEKYLLGQTNFVTTLPDSIKNQAVLAIKDEYTFDFIDLADNHSERQLETALVNNVRSFLLEMGSQFLLWKS

SEQ ID NO: 87882 - protein, 256 aa, Unknown
  Obtained from environmental sample
  DOMAIN (105)...(245): Thiamine pyrophosphate enzyme, C-terminal TPP binding domain
  misc_feature (1)..(256): Xaa is any amino acid
MDIKALEKIALSVRALSIDAIEKANAGHPGLPLGTAELGAILYGELLRHDPSDPSWADRDRFILSAGHGSMFLYSLLHLAGYKDMTMDDIKSFRQIGSRAAGHPEYGLVAGIEATSGPLGQGFAMAVGMAVAETMLAARFNTPNGKIVDHYTYALCGDGCLMEGVSAEASSFAGHHGLGKLIVFYDSNKITIDGSTDLAFTEDVAKRYEAYGWQVLHGSMYNFEEIAKLTAQAKAETKKPSMIILKSIIGKGAPNK

SEQ ID NO: 87883 - protein, 92 aa, Unknown
  Obtained from environmental sample
  DOMAIN (3)...(77): Phd_YefM
  misc_feature (1)..(92): Xaa is any amino acid
MTAIIKSSSELRKNYNSVAEICRTQKVPVFLTRNGEGDMVIMDIESYNRREEDLALAQRLAAVEMARAIGVKDLTLNEFEQNMRKAVATQKK

SEQ ID NO: 87884 - protein, 86 aa, Unknown
  Obtained from environmental sample
  misc_feature (1)..(86): Xaa is any amino acid
MPELSHFLGISILMYFDDHNPPHFHVRYNDDRAIISISELKLLEGHLPARILGLVIEWAEMHKEKLMQNWDLVKTTGKFFKIDPLV

SEQ ID NO: 87885 - protein, 84 aa, Unknown
  Obtained from environmental sample
  misc_feature (1)..(84): Xaa is any amino acid
MVWVIKSELKEDYKVFIEFNDGTSGVIDFYDKLQNDHRQIIRELLDLEKFRTVKTGLDTICWDNGVDFAPEYLYEQIKIQQKAA

SEQ ID NO: 87886 - protein, 343 aa, Unknown
  Obtained from environmental sample
  DOMAIN (167)...(290): HD domain
  misc_feature (1)..(343): Xaa is any amino acid
METIFVVDDCDVDLDMVKQALDASYRVFALTSAEAMFELVDTVTPDLVLLDIRMPEMDGFAALSRLASDPRTASVPVIFMTSYGDAETEAHAFEAGIVDFINKPFSQAVLLRRVEAHLRIDDLIKRRTARLLRLKNGIVSVLADIVECRDETTGGHIDRTSRCIRVLIEALKENGVYANEMADWDIDTMVASARLHDIGKIAVSDVILNKPGKLTPEEFAIVKSHVREGERIIDKIVTKTGDEEFLQCARLFVSYHHERWDGSGYPYGLAGLEIPLVGRIMAIIDVYDALVSSRPYKKPFSPDMAVNTIMQESGKHFDPNIAEIFFLKREEFNAIAADTVKHG

SEQ ID NO: 87887 - protein, 156 aa, Unknown
  Obtained from environmental sample
  misc_feature (1)..(156): Xaa is any amino acid
SRPLHAELKVVYPSRDEEKEILKRMAAGPVPEVSPVIKVDKLLSARKLVGEIYMDSKVEDYIVNIVFATREPETVGLGDMKSLISYGASPRATLFLTRAAKAHAFIRGRGYVTPEDIKSVGMDILRHRVITTYEAEAENVTSEQIVQKIFDSVEVP

SEQ ID NO: 87888 - protein, 396 aa, Unknown
  Obtained from environmental sample
  DOMAIN (148)...(340): Calcineurin-like phosphoesterase
  misc_feature (1)..(396): Xaa is any amino acid
MAVYAGVNLYLGKRIFQTICALYPKTNAAIFAAIYAAAAVLMIAANFATVSTFPAAVKEALRWCGGCWMGFFLYALMFFLAADAAIAIGRIAKIIPSPVPQNVRLYAGLAAVTLTAALMTYGIIHANKIKAASYSVRLNENKTLPGGMTIVMASDLHLGAAGSEKRLPKIIDAINDRKPDLICFAGDIFNDNYYALSNPERASELFKSLKATYGVYACPGNHDAGKSAEDMIDFLVRSGVTLLSDEFDIVNGQAVVMGRLDPRPIGGFMGKRRAGIGELIVRASNETSVTLINNRTAPGQTKLFTINGNTPIIVIDHNPKSIHEYGNEVDLVLSGHTHKGQLFPVNLMTKMIYTADYGHYRKEPGAPHLIVTSGAGTWGAPMRVGTNCEIVCVSVF

SEQ ID NO: 87889 - protein, 438 aa, Unknown
  Obtained from environmental sample
  DOMAIN (42)...(282): Iron only hydrogenase large subunit, C-terminal domain
  misc_feature (1)..(438): Xaa is any amino acid
MDGSKEKVLINPDLCIGCGNCISVCHHEARHIVDDTASFFSDLKRGDKFIAVAAPAVASVFPGRHLNLNGYLKSIGVEDFFDVSLGAELTVISYLNYIKAKKPRMVIAQPCPAIVSYIEIYHPELIPYLAPADSPMLHTIKMIREYFPQYRGHKIAVISPCIAKRREFDETRLGDYNITMAALKHYLQEKNINLSSYKSLEYTGILAERAVQFSSPGGLLDTAERFVPGIRRNTRKIEGLPNIYPYLTEIAELLSKDSDVEFPLLIDCLNCEKGCNGGSGTGNHSVPLDRLEGPIRKRSAEHEKKIASLKKKNYEKYHEQLNRFWKRGLYDRSYRNLSGNLHLRHPSEAELTEIYRKMKKFDKSHLYDCGACGYGSCKGMSTAIFNGINRPENCAHYTLAVLKEKKDTEELNRLLHEHIGYATGILEGINSLVDELHT

SEQ ID NO: 87890 - protein, 504 aa, Unknown
  Obtained from environmental sample
  DOMAIN (14)...(153): Histidine kinase-, DNA gyrase B-, and HSP90-like ATPase
  misc_feature (1)..(504): Xaa is any amino acid
VLPPQEARRIAAGEVIDRPAALIREFIDNAIDAGASNIDVSIEGGGGKKAEVSDNGSGMDRENLEKCVLPHATSKIRSLDDLDTAETLGFRGEALAAAAAVARLEIITATFSGANSGSSEAWRLETGPGECKLHITAANRTRGTTVRAANLYESIPARKKFLKREGSEAALCRQMFIDKALAFPEISFRFTQDGKPKDFFPAANSKKERFAAVMLENNEREFIHEINVSGEGFSVDIVIGGPELFRADKRMLYVFANGRRIQDYALMMAMEYGTQGWFPNGVHPLGAVYVDIDPALADFNIHPAKREARFRDPGAIHHAITSGLRDFCRRLSLKNGIQKEQNMPLALEALGDGVPDKPFEGGTQSAADRGGSFSYGNNSAAHAPYAPNAGMAYKISDIASVAAAFHAAEEAPIYGEPRYAGKIFGVFLLVEWGDKLFIIDQHAAHERILYNRFLESPIPQQELLIPIFFNAETAEDADFLAAKKDELAALAIVIEKDGDGWRID

SEQ ID NO: 87891 - protein, 344 aa, Unknown
  Obtained from environmental sample
  misc_feature (1)..(344): Xaa is any amino acid
VIRETLVRQEKIKNVGDFTLLEPKNVKSFIFADSFAVGQQVKGLPQLKADEVYGFGEITHIDPDQNKITIRNTKTDEEFKVDPSDYVKKQFSVFDKTESALGVGEKITFLKNAPVIDQNTGKTVNLRNGQLATIAALDKEGNISVKADKKEVKFNLNDYNYLTTAFALSLHKSQGMTVDKVIWHADTSKEVSTNSFYVAITRCKRDIAVYTDDIERLKIKAVTGQDKYSTIEVDEIYNNEYQKHLKTIQRRDQKDVTPEIATAPETATPIRAAKPPATVNAPPPTAPDPAVQTAKPRAEYSLNKIDGYNLVPRHNEDLRKLSDETIIKLTLPPKDCDTFDAIKT

SEQ ID NO: 87892 - protein, 76 aa, Unknown
  Obtained from environmental sample
  misc_feature (1)..(76): Xaa is any amino acid
MAKPHRGSSLRELFKHGRGECPVCKRKNVKILYEQEKDGQKFKICKTCKAAVKNGTKSLPAVEKPASEEKSAEAAG

SEQ ID NO: 87893 - protein, 55 aa, Unknown
  Obtained from environmental sample
  misc_feature (1)..(55): Xaa is any amino acid
MKERNGGYTRILKLGERKGDAAELVVLELVDYKFDAAEEKKKAKKKEEKKNEKGK

SEQ ID NO: 87894 - protein, 334 aa, Unknown
  Obtained from environmental sample
  DOMAIN (241)...(306): Oligopeptide/dipeptide transporter, C-terminal region
  misc_feature (1)..(334): Xaa is any amino acid
MSNDTNSEEILEVKNLRTYFYTDEGVVKAVDDVSFSLHKGEVIGIVGESGSGKSVANLSVMNLILSPPGKIVGGEVLFHGEDILKLKEKQLQKIRGAKISMIFQDPMTSLNPFLRISTQLIETIMLHQNLDKKQAREKAIEMLNMVGIPAAAERVDSYPHQFSGGMCQRVMIAMALSCNPEILIADEPTTALDVTIQAQILDLMRDLTHKLGTAVILITHSLGVVAGMCDNIYVMYAGRVVEYGTAEQIFETPKHPYTRGLIKSVPRLDQRNRDRLFSIPGQPPNVIDLPPCCPFFPRCSEVTERCKNAYPEQVDFGDGHCSSCWEASAKEAAK

SEQ ID NO: 87895 - protein, 706 aa, Unknown
  Obtained from environmental sample
  DOMAIN (560)...(673): Response regulator receiver domain
  misc_feature (1)..(706): Xaa is any amino acid
IREYVINENSDKSWFGVLLNEQYEFIAHREPLLEGTKLEDMNSDALRLVDEMGAGHDISEFRMRNHKNVPSITFMRKLENGWYLGIVTPEAEYFLEVRKVRFILILLGIILSIIFSVIMIRIVKGKQEADAEKEKAAAEKEKAAAEKEKADELLKKANSLIANIQIMEKVLNSLDAIIYITNPQTNAILFLNDNCKKNYRAFDNYTGKQCYQVFQKGQNGRCESCPCNKLDKDSSQIIEWIEYNPVTERQYRNRSCYITWPGGILAHLMYSVDITELYAAREQAIQANRVKSDFLARMSHEIRSPMNAILGIIEIELEKELPPDTDEALNKVHNSGYMLLNIINDILDLSKIESGKMEILPVEYDVASMINDTVQLNLMRFGHTTIKLSLEVDENVPARLFGDDLRIKQVLNNLISNSFKYTKVGGIKVSVRAEVSGSDNAKSVILNFRISDTGLGMTKEQVSKLFDGYARFNSEANRQVEGTGLGMPITKSFIDMMKGELLVESEPGKGSTFTIRIPQGYVNADVLGKEHAENLQKFDVEKKIKQKKGAQIKREYMPYGKVLVVDDMEPNLYVAKGLLAPYGLSIDTASSGRAAIDIIKGGQKFDVIFMDHYMPEMDGMEATKIIRELGYKEPMIALTANALVGQDQMYLANGFDGFMSKPIDTRQLNSVLNRFIRDKYPPETVEAARKLKMKLEKGEDAGPPDL

SEQ ID NO: 87896 - protein, 406 aa, Unknown
  Obtained from environmental sample
  DOMAIN (153)...(274): Response regulator receiver domain
  misc_feature (1)..(406): Xaa is any amino acid
MPYGKVLVVDDMEPNLYVAKGLLAPYGLSTDTASSGKAAIEKIKTGQKFDIIFMDHYMPEMDGMEATKIIRELGYKEPMIALTANALVGQDQIYLANGFDGFMSKPIDTRQLNSMLNRFIRDKYPPETVEAARKLKLKLEKGEDAGPPDFSKVKALVVDDFMPNLSVAQGMLQEYKMQVDGLSSGQEAVERIENGEPRYDIIFMDLMMPGMDGMEATRLIRSLSTEYGKTVPIVALTAIITSETSDQEKMLLEKGFQAVLYKPLSVAKVDAFLKDWINGKLKGIVSPNNKGIMSPNNKEEESDMEIDIPGVDVARVEELYGGNIKIYLPVLRSYLSVIPGELEIMSHVTAETLPEYVIKVHGVKSTSDSIGAERAHQMALELEMAGRDGDIATVMAKNETLIRYVK

SEQ ID NO: 87897 - protein, 508 aa, Unknown
  Obtained from environmental sample
  DOMAIN (61)...(508): UvrD/REP helicase
  misc_feature (1)..(508): Xaa is any amino acid
TAIRPEDRAALAGQGRLFQDLPASTRSPVRLPSRPRLTPTAEEKPAPTPAAAGGAPLLDGLDESQVRAVTSPAPALAALAGPGGGKTLVLVRRAAWLIRSSLARPEEILMTTFTRKAAEDLAPRLTAALAGAGRPRSIRVATLHGLAYEFLKAAQPDWDLAPADFLDELLKRTARPAGQTPAALANFISLAKSRPNFLEIGQTPANSLNQAETPAEALNQYQAALAERRFWDFDDLILRAVPPAARPFRTVLVDEFQDLSPAQFDFLVRLLGPAGPDRPGALTVIGDPDQSIYGFRGADPGLFARLEALPGGLTTVTLSANYRSTRTILEAAESLWPQVGRPRRRAARGETGPRLTRAVLPTALGEAAYVVKRLKAHLGLLKLGLGASSRQDAEFMPGLNFGDIAVLFRLRALGPPVAEALTAAGLPWQMCGEEPLTAADHLDWTADKISLLTMHAAKGLEFKLVFIIGVEAGLCPYFRPDQERPETSPEALAEERRLFYVALTRARD

SEQ ID NO: 87898 - protein, 303 aa, Unknown
  Obtained from environmental sample
  DOMAIN (7)...(217): PHP domain
  misc_feature (1)..(303): Xaa is any amino acid
VPERHFIDLHIHSRYSRATSPALTPANLSRWAEIKGLALLGTGDLTHPAWRRELAESLTERDDGFYSLRERPEGPRFIPTGEVSAIYKQDGRTRKIHLVVISPDLAAADEFARLLGAFGRLEADGRPILGLTARQILDIALTSHPATQVVPAHIWTPWFSLFGAKSGFDRLEECFGDLSPHITALETGLSSDPDMNRLVSALDSRALISSSDAHSPEKLGREATIIRGPLTRASLFEALAGGPTLGGTVEFFPEEGKYHLDGHADCGPPLTPAETRSLGGLCPVCGRPLTIGVLHRVSQLADR

SEQ ID NO: 87899 - protein, 173 aa, Unknown
  Obtained from environmental sample
  misc_feature (1)..(173): Xaa is any amino acid
MAAPFFSEILSKRFNPDAVLDLNKSSPSGKVLIISDFHMGNGKRDDFRNNGEMVIKILENYYFKNGWYLVLNGDIEELAKFSLSDIRKEWAGMYRVFDLFASAGRFYKTLGNHDEDLIFEKDYPYNLYNAVRIETGLIPIYVYHGHQSSRMYTKYNTIIRLALRYLLKPIGIR

SEQ ID NO: 87900 - protein, 387 aa, Unknown
  Obtained from environmental sample
  DOMAIN (123)...(352): Methyl-accepting chemotaxis protein (MCP) signaling domain
  misc_feature (1)..(387): Xaa is any amino acid
SGAVYNSVIAQLENLSSEQKDLTKRISICSVDELGTIAGMVNAFCEHLGGGIINIRNETDTLSDIGNDLSSNMSNTAVAVNQITANVQSIKSRIINQSASVTETHATMEQLVVNINKLNNHVENQSGDISQVSSSIEEMIANINSVTGTLVSNAGNVRTLQDASEVGRAGLQEVASDIQEIARESEGLLEINSVMANIASETNLLSMNAAIEAAHAGEAGKGFSVVAEEIRKLAESSSDQSKTISAVLKKIKASIDKVSASTGNTLTRFEAIDSDVKTVSQQEENILRAMEEQNEGSKNILEAVGRLNEITRQVKDESTVMLDGSREVIKESRNLGQVTQEITGGINEMAIGAEQVNMAVNKVNEITAKNRENIDILVKEVSLFKVE

SEQ ID NO: 87901 - protein, 105 aa, Unknown
  Obtained from environmental sample
  DOMAIN (4)...(65): Biotin-requiring enzyme
  misc_feature (1)..(105): Xaa is any amino acid
GSQRVIHAPVSGTVVHKKQIGDIVQRDEVLFIIEEAEVRAPFTGLLRGLIREGAAVPKGMKIADIDPRTDVDWRTISDKARCLGGAALEGYFYYFSLFNCSAAAS

SEQ ID NO: 87902 - protein, 118 aa, Unknown
  Obtained from environmental sample
  misc_feature (1)..(118): Xaa is any amino acid
MPGKFFSQKIVVRGGGDLATGVIQKFYRAGFSVVILETPAPAAIRRSVALCEAVYDGFARVEDMVCRRVSGIDELDGCWQQGAIPLLVDPSGETIIEQIRPSAVIDAIIAKRNLGTHR

SEQ ID NO: 87903 - protein, 246 aa, Unknown
  Obtained from environmental sample
  misc_feature (1)..(246): Xaa is any amino acid
VGSREWGSGIVNYLDIINGSIVAVVGCGGKTSLIELMADRLRKKKVMVSTTTKMFPPKMKDIVLCETLWQCEEHEPRTGIQCMGLMNGASGKLEALPEAFLAALQPRYEIALLEADGSRGLPCKGWLANEPVVPDYCTHTVGLITMGALGKPAGENTVHRLPEFFALTGVGEGETITAAALEAMVCDSKGMFKNSAGQRYVLVNQVEDDATAAAALSFLRTIKEKYPARFEKLFFGSVRHDAWQEV

SEQ ID NO: 87904 - protein, 52 aa, Unknown
  Obtained from environmental sample
  misc_feature (1)..(52): Xaa is any amino acid
MLEGRNFVTPEDVKNAALPVLRHRIVLSYEAEAEGMDADAVIARILNHVPVP

SEQ ID NO: 87905 - protein, 322 aa, Unknown
  Obtained from environmental sample
  DOMAIN (44)...(180): ATPase family associated with various cellular activities (AAA)
  misc_feature (1)..(322): Xaa is any amino acid
MTEKESPNRCGAIIENFRKEMAKRIVGQNEMIDGLLAGLIAGGHVLLEGVPGLAKTLAVKSLAQITGLDFKRIQFTPDLLPADLTGTLIWEQANGRFSVRRGPVFANVILADEINRAPAKVQSALLEAMEEKQVTIGEETHPLPDPFFVLATENPIEHEGTYSLPEAELDRFLMKLLVFYPQPVEELDIVKNSPLLSSVSANKGAALNPVLNREKLSFLRNAADSVHIDEEISKYIVSVVTATRPASTRQAPTAPQQRTESAKTDAESVYRYVSFGASPRASIALYRCSRILAMFEGRNFVSPENVKTAAFPVLRHRIVLSY

SEQ ID NO: 87906 - protein, 271 aa, Unknown
  Obtained from environmental sample
  DOMAIN (31)...(271): Glycosyl hydrolases family 2, TIM barrel domain
  misc_feature (1)..(271): Xaa is any amino acid
MPKLYTVVISLIGPDGKELDYESCRTGFKSLEIKKGVLYLNGVRLIVNGVNRHEHCVTHGRAVPVEHMREEIRQMKRMNINAVRTCHYPDSPEWYDLCDELGILLVCEADLETHAVMGALSHSPEFAREYLERAQRMVTFYKNHVSIFSWSLGNESGTGANHAAMYGFIKEYDKTRLCQYEAGVPGKNISDIRGNMYAPVEHILRMLADPEDERPIILVEYLYQIMNSGGGLDNFVWLTSQFPRFQGGFVWDWQDKCLLAKDENGKEFLPF

SEQ ID NO: 87907 - protein, 93 aa, Unknown
  Obtained from environmental sample
  DOMAIN (2)...(92): Putative neutral zinc metallopeptidase
  misc_feature (1)..(93): Xaa is any amino acid
AIAGLFFALPLLTNIGIVLFGGAVIFYLITLPVEINASARALKLLKSENVLSASELEGVRKVLTAAALTYVASALTALMSFLRLILLSRSRRR

SEQ ID NO: 87908 - protein, 102 aa, Unknown
  Obtained from environmental sample
  misc_feature (1)..(102): Xaa is any amino acid
MKIEIPELCLVAIVGASGCGKSSFAKKHFKATEVLSSDYFRGLVSDDENDQSATDAAFDSLYYLVRKRLERGKLTVIDATNVQQFARKKIIETARAYDVIAA

SEQ ID NO: 87909 - protein, 271 aa, Unknown
  Obtained from environmental sample
  DOMAIN (16)...(137): Oxidoreductase family, NAD-binding Rossmann fold
  misc_feature (1)..(271): Xaa is any amino acid
ELENATVPVLPRKKDYAIGCIGSGFIMNDCHLVAYRNAGFNPTAITSRTAEKREAAAKRHSIPKVYDSWQKLIDDTEIEILDIAVPPDVQMEALRYAAGKKHIMGILVQKPAAMSLAEVREIAAIGKAMDIPIAVNSNMRYDQSMRALKHALDRGYLGKPVIATIEMRAIPHWQEFLRKYPVLEIYSMGIHHVDIFRYLFGDPEKITALCRPDPRTRFAHNDGIVQFTYKYPDGFMATSLDDVWAWPNEPCEKDIYIKWRVEGLEGMATGT

SEQ ID NO: 87910 - protein, 182 aa, Unknown
  Obtained from environmental sample
  misc_feature (1)..(182): Xaa is any amino acid
MKLQERGVLPESNTYFHIPKEHDRKIFLTPNSSGYYFCDENYKVDRDKYNGYLFQNNPQHFTENHHGSYLYLFVKAGKGYVYQNDHRIILNKNDAFLLNCYHPHIYGTFAGSKMEMIWVHFDGHMIRDSFRQIANNTNCAVLKSLTPNRAQIIYNNLFNIYEKFDQKKGINDILNNKYLIII

SEQ ID NO: 87911 - protein, 276 aa, Unknown
  Obtained from environmental sample
  DOMAIN (4)...(173): FAD binding domain in molybdopterin dehydrogenase
  misc_feature (1)..(276): Xaa is any amino acid
MADPPNQIFFPLNYPELFASWARFPEASPFAGGTGLLREQGRKIFALPSIILSLDRLEELQRVSRTERYLEIGAMAKLSQIIDLGNLVPKALRRCLESIGGQQLRNMATIGGNICYPGRCLDSAAVITALDGQYELRSAQSARWVSAARFFSPGGKNTLGKQELLTRIRVPLENWDYTSYKKFADHANQSRTAVFLVKTQKTMLTDIKVIYKSALIWRDKNIETRLIGKELPLNRRIAADFVEHWDTFLSGIESIEALSRKEMVNYIAMNVYNLSE

SEQ ID NO: 87912 - protein, 161 aa, Unknown
  Obtained from environmental sample
  DOMAIN (73)...(147): [2Fe-2S] binding domain
  misc_feature (1)..(161): Xaa is any amino acid
MTIGFILNGEDVVIQCEAGRRLINILRMDFGLLGAKTGCLTGKCGFCAVIFNGLVSHACLIPAFRLRGSEVITIEGFSQTNEYHDIVTGFTQAGLEGCGYCSTSKILNAGALLDRIKRPSRQEILNAFSGIKCRCTDTEKLIEGIEKAAEIRQRRLYGRSA

SEQ ID NO: 87913 - protein, 269 aa, Unknown
  Obtained from environmental sample
  misc_feature (1)..(269): Xaa is any amino acid
VLKKSAEVYPGSVEITLNKEGTLEIKTSSSDSDHVSVWDALASKILEIDKKKVRISYNADSRDSGPSTTSRNITILTKLIEQACKLIHKRREKDSLPITVRKTASPRKPDVLEERPPKGVLDINSFSRLGWASAVVEVEFDPIGYMPRIRGVWMCVDGGKILSEDNARKYLKTSIVQALGWSYREQISYIDGTIPVDQFENFDIMGLAEIPPIAIDFINCNSEEPKGIGALPFCCIPAAFVQAVSQAAGCHFRAIPLKARNIFSAGRLS

SEQ ID NO: 87914 - protein, 344 aa, Unknown
  Obtained from environmental sample
  misc_feature (1)..(344): Xaa is any amino acid
MDKLIIKGAREHNLKNIDLELPRDKLIVVSGLSGSGKSSLAFDTIFAEGQRRYVESLSAYARQFLGRMDKPDLDYIEGLSPAISIEQKTTHRNPRSIVGTVTEIYDYYRLLFARIGVPHCPVCGKEIREQPIDQIIETILQMKEGSRIQLLAPVIRGKKGEHQKIIEDAKKAGFARARIDGVPVNLDEKISLDKQKKHTIEIVVDRLVMGAGIRQRLAESCEAALQAADGVMLVLCQSQEGPVTEHFFSQKNACPDCGVSIPELQPRLFSFNNPFGACPACTGLGIKMEFDPSLIIPNPSLSFNEGGVVPYNPDSAWYRSRFESIARHFKFSLDTPLSDIPKKA

SEQ ID NO: 87915 - protein, 201 aa, Unknown
  Obtained from environmental sample
  misc_feature (1)..(201): Xaa is any amino acid
MIYNPTAECMDEEARKKLQLANLKNLVETLYSKVGFYRKKMDDAGLKPADIRSLKDIEKLPFTTKDDLRLNYPHGLRACPPDRIVEVHISSGTTGKPVVDEYTMKDIDIWREAMARTLAGGGCTKDDIVQNCYGYGLFTGGPGAHYGALAIGAEVLPMSSGNTERQLMVMQDFHSTMLTCTPSYALYMAEEAAAVGVDLRK

SEQ ID NO: 87916 - protein, 164 aa, Unknown
  Obtained from environmental sample
  misc_feature (1)..(164): Xaa is any amino acid
DPDIEANINFITSIIVDRQTGDDRRESDFLTSVFYGIHTLLPLNTQLTVLCALLFILSIIASAMLMKRGLARLWLAYGAALCALLIITVGTSAGYKIYALERTQYAIILSASIDAKNQPSGNQTLFTAHEGTKLQIRKTVGEWSLVSLSNGASGWVTTSALGKI

SEQ ID NO: 87917 - protein, 472 aa, Unknown
  Obtained from environmental sample
  DOMAIN (221)...(386): Protein of unknown function DUF115
  misc_feature (1)..(472): Xaa is any amino acid
VTVWERNAEALKNHYPGLLEDITRMEEPDLSPDDIKIMTASSGDPTLCVKGINIHSGRDPAREGLRLAQTAAGGGPVVILGFGLGYAACAAAQAVEKGRPIIIAEKHRKLLVKALETRDLSGFLSKNRIIFVIGGAGEGMTNALSIADGFISSNERAEAVVIRNRALIDLDKEWYGVVEEKLRTWSMRDDVNSATLKRFGRRWVRNLSRNIGAIRDYAGISRLANIANGITDGITENITAGVAVDAPVFLAAAGPSLDKVRPLLHEIHKRCVTVAVDTSFRFFTDNGIQPDFVLVVDPQFWNSRHLDRCPCGHTALIAESAVYPPVLRLPFKNIFLCGSLFPLGSFVEKQVDPKGPLGAGGSVSTTAWDFARTLGSKEIWIAGLDLAFPGLKHISGALSLRIVPTPHQTALAPSKHGWYAPCATVSRSTLHALQAGRFLPTGGCPYMPRGLKTVSASTPKCKITAFFRTVLL

SEQ ID NO: 87918 - protein, 540 aa, Unknown
  Obtained from environmental sample
  DOMAIN (170)...(327): Protein of unknown function DUF115
  misc_feature (1)..(540): Xaa is any amino acid
INIHSGRDPAREGLRLAQVPAGGGPVVILGFGLGYAAAAAAQIIEKGRPIIIAEKHRKLLVKALETRDLSDFLSNNRIIFVVGGPGEGITNALSIADGFISAGERTEPVVIRSRALIDLDKEWYGVVEEKLRTWSMRDDVNSATLKRFGRRWVRNLSRNISAIRDYAGISRLAGLAANIADGVADGAPVFLAAAGPSLDKSRPFLHEIHKRCVTVAVDTSFRFFTDNGIQPDFVLVVDPQFWNSRHLDRCSCGNTALIAESAVYPPVLRLPFKNIFLCGSLFPLGSFVEKRLDPKGALGAGGSVSTTAWDFARTLGSKEIWIAGLDLAFPGLKTHFRGAVFETRSNAASTRFSPGETWVVRALRDGFPFKAPCASGGQVLTDRRLSLYAAWFENRFRLHPETRNYALFQDGLAITGIQPAEAETLLSLPERRAGIDKKLAAAFSQIDGDFNSPEEKQKRAERYAKAVCALVSGLEEIKSAAQKGAGIARQALKGKTDSGKQNKILKELDEIMRRVTESEVKEVAGFLFPSENKNGESEGA

SEQ ID NO: 87919 - protein, 343 aa, Unknown
  Obtained from environmental sample
  DOMAIN (216)...(333): Protein of unknown function DUF115
  misc_feature (1)..(343): Xaa is any amino acid
VSVWEKNSKVLIDHYPGLLEEITGEEDNTFTPEDIQIIPASCGDPSLCVKGINIHSGRDPMREGLRLAQSASGGGTVVILGFGLGYAATACADAAAQAVEKGRPIIIVEKHRKLLVKALETRDLSDFLSNNRIIFVVGGTGEGITNALSIADGFISAGERTEPVVIRNRALIGLDKEWYGVVEEKLRTWSMKDDVNSATLKRFGRRWVRNLSRNISAIRDYAGISRLAGFTAGVTDGAPVFLAAAGPSLDKARPFLREIHKRCVTVAVDTSFRFFTDNGIQPDFVLVVDPQFWNSRHLDRCPCGNTALIAESAVYPPVLRLPFKNIFLCGSLFPLGSFVEKRR

SEQ ID NO: 87920 - protein, 378 aa, Unknown
  Obtained from environmental sample
  misc_feature (1)..(378): Xaa is any amino acid
KQGYLSVPLTWDSEAPLSFLHALDTASMTGRSTNLEALVEAAADAFQESSPAKKVIILVSDGEALGGVLGNALNRCVREDIIVNTVALGSDRGRPVPQYSAGAGMPAAVSRRDTVVMRMAAEKTGGIYIDGSRDDAAILLANHLLSVSRQTDAGRTRNEPKERRSLFVILAILAYGLSKFIPLLPGIPLVPLAAIIFMFTSCSESKLLLLEANYLQTRGRYDEALLRYMKAQNFKDSAPYAEYGLGLTFYMMDENNAALKSFDNSQKILETLPEAGHSELRFRNSYNSGIIYFEEGDYKSAAAAFKDALRADGRKIEAKRNLELSLMSAARQVNEDNSEKRTENETRELLFNFIKEEEQRLWKSQEWGPEEKFTGADY

SEQ ID NO: 87921 - protein, 269 aa, Unknown
  Obtained from environmental sample
  DOMAIN (115)...(263): Glycosyl hydrolase family 3 N terminal domain
  misc_feature (1)..(269): Xaa is any amino acid
MRFFHILIICLLLLPACKKREAVNQDNDMVNETKNEVSVDEIYEKWLRAREIAASLDDRLLAAQVLISGIEGNGSLTSNTVTLLSEFPTGGIMLFKYNLDTDNDSIRALINQTAALVNSESGIPPFIAVDHEGGTVNRFRSGTADLPDASSYWELSLKQNRQTSLNKIENDSLRAGKELKDLGINVNFAPVAEYLNDGNRVFLSRRSYGPDPLFTANAAQAFIMGMKQAGILCVIKHFPGIAGSDPHYSASVINVDKAEWKSWFFLLRR

SEQ ID NO: 87922 - protein, 285 aa, Unknown
  Obtained from environmental sample
  DOMAIN (1)...(284): Citrate synthase
  misc_feature (1)..(285): Xaa is any amino acid
GFGFEEVCFLLLFGHLPNKNENKEFSDLLEENTALPENFVRDTIMNAPSKDMMNSLSKSVLTLYAYDDNPDDISVENVLRQSINLISQFPLLAVYGYKSYLHYHEDKSLMIHPPLKGASIAENILHMLRPDSSYTDLDAKLLDLALVLHAEHGGGNNSTFTNHVVTSSHTDTYSAVVASLASLKGPRHGGANIKVVQMFRDMMENVSDWNDDAEINVYLEKLLNKEGFDRSGLIYGMGHAVYSLSDPRALIFRQFVEQLAKEKDRYDEYKLYTKVEILAPQIIGR

SEQ ID NO: 87923 - protein, 501 aa, Unknown
  Obtained from environmental sample
  DOMAIN (23)...(91): ATP synthase alpha/beta family, beta-barrel domain
  misc_feature (1)..(501): Xaa is any amino acid
MASYDYLTRVLQERINNWQGRAVSGNSGFVVQVGDSVASVYGLTGAVYGEQVEFTSGATGIVLNLEDENTGVVILSGENLVKEGDEVKGTGKVVSVPAGNSLFGRVVNPLGKAVDGKGPITAEEYLPIESPAAPVIDRGSVDTPLQTGTISVDAMIPIGRGQRELIIGDRQTGKTAISIDTIINQKGKNVICVYCAIGQKSSSTAALIGKLEEHGAMDYTFVVLASASDSAALQYIAPYAAVAMAEHFMRQGKDALVIYDDLSKHAVAYRTISLLLRRPPGREAFPGDVFYLHSRLLERAVKLSPEKGGGSITALPIVETQAGDISSYIPTNIISITDGQIFLDSELFNSGFRPAIDVGLSVSRVGGSAQTKAIRKISGRIRLDLAQYREMAAFAQFGSDLDKATQDKLAQGERLMETLKQPQFSPYSMEEQAAILFLAVNGYLMDVKTEEVSSFIKNYLSYLKTQKADLLISIAETGAISTEQENEMRNAVESFKKHKQV

SEQ ID NO: 87924 - protein, 524 aa, Unknown
  Obtained from environmental sample
  DOMAIN (47)...(507): Protein of unknown function (DUF342)
  misc_feature (1)..(524): Xaa is any amino acid
NQTHALQALGAKDIAEYDMDLVNKLLDEAEGVYYKIGEFDHKPQNDAMGSVLVDDNEMKVTLILTPPGEGGCDLTVEAFHSLLIQNRVYNGVKEEFLQEFADSPVYREHVEVAEGLRPVNGKDAYIKYNFETDQTKISLKEGANGKVNFKELNIIQNVTADSVLATKVPPEDGVDGKTVTGKILPAKAGNDIPMPVGNNVRLNDNEDTILANINGQVLIANGKINVEPVLTVEGDVNLKTGNIIFLGNVIIGGNVEDGFSVKADGNIEIKGTVSKAELDAEGDIIIYQGVNGKGGDKKIRAGRSLWSRFIENANVEVGNMVVVTDGIINSNVDAVKSIVCMGKRASIMGGRLRAGEEISANVLGNPTSGTETICEVGFDPKSKVEMERLMAQKTTSTDELETIRMDLQVLINTKKQRKTLPEEKEAYMQELMERRQLLSEELKKIEERIFKVQEYMNNLQARGRVSAAKKVYPGVKIMIRDVREDVRTDYRATTFILEDGLVRVSPYEEPNEMAQKGLDGFSTH

SEQ ID NO: 87925 - protein, 194 aa, Unknown
  Obtained from environmental sample
  misc_feature (1)..(194): Xaa is any amino acid
VFCLLFFFYIKWYIKRKVSATELLAEYRAEVYRLNADINAVTDRDSMLVEDRIKKLKEILEDTDKRIKVYVQELDRSRTGEALYTSLGRGIRAALKTPSETSPESPSRPENAPALSTQMPKLTLVRQESVPTPISPPVSVPASSLPKPPSKRQIRVQIDDMVKEGFSPSDIASGLGISIAEVDLAMNLMQSKKK

SEQ ID NO: 87926 - protein, 98 aa, Unknown
  Obtained from environmental sample
  misc_feature (1)..(98): Xaa is any amino acid
MNKKTEFLILLLIFIVSSSLFAEGENLTLKVAVMGPGDELYFWWGHIALIIEDSDVDTSRFFDYGLFSFDNENFFYNFAFGRLLYSCGVSSTKRNIAV

SEQ ID NO: 87927 - protein, 81 aa, Unknown
  Obtained from environmental sample
  misc_feature (1)..(81): Xaa is any amino acid
VRKLNNILVTGGAGFIGCNFIRYLLEKAEGFSGKLINLDALTYAGNRMSLADIEAKYGTRYFFEKRRHLRPLFGRIAVCKI

SEQ ID NO: 87928 - protein, 80 aa, Unknown
  Obtained from environmental sample
  misc_feature (1)..(80): Xaa is any amino acid
RRKTKKIGNLCNGPGKLTQAFGITKKHNNLSLIEGPLYVFDNKRKYEIATATRIGLSVGKELELRFFIKDNEFVSNRKGL

SEQ ID NO: 87929 - protein, 239 aa, Unknown
  Obtained from environmental sample
  DOMAIN (59)...(186): Acyltransferase
  misc_feature (1)..(239): Xaa is any amino acid
MIKTILGFGWLIFAMIFLLPFALTALILSIFGLKKPMMHIIYRLAQLWALSLIPVAGCTAEVKGRENIPKKGGVCFVSNHCGFFDIIILVAFCGRPFGFVAKKELLYVPFMNAWIYMLGGLFIDRGNVRNAIKTINKGVQRIKSGGSMIIFPEGHRSKGRGLLPFHPGSLKLATQAGAVIVPVAIEGSYEVFEKNYRVVSAKTKIAFLEPIDTKSIPLEDRKQILCDRIYSAIKEELKL

SEQ ID NO: 87930 - protein, 375 aa, Unknown
  Obtained from environmental sample
  DOMAIN (8)...(374): Formate--tetrahydrofolate ligase
  misc_feature (1)..(375): Xaa is any amino acid
MEYPKKFLGSDIEIAQSVFPEYALHIDEVAKRAEIPEKYIEHYGKYKAKVNYSLLNDNKDKKDGKLILVTAINPTPAGEGKTTTTVGLADGLTLTGKKTIAALREPSLGPVFGVKGGAAGGGWAQVIPMEDINLHFTGDFHAIAAVNNLLAAMIDNHIFQGNELNIDPRKVVWRRCIDMNDRQLRFITDGLGGRINGFPREDGFDITAASEVMAILCLAESIDDLKAKLGRIIVGYTYGKQADEKPVTAAQLNAQGAMAALLKDALKPNLVQTMEGTPAFIHGGPFANIAHGCNSIMATRLALKCADYVVTEAGFGADLGAEKFLDIKCRFAGFKPSAVIVVATVRALKSHGGAKKSELENENLTALETGFPIFC

SEQ ID NO: 87931 - protein, 360 aa, Unknown
  Obtained from environmental sample
  DOMAIN (1)...(360): Formate--tetrahydrofolate ligase
  misc_feature (1)..(360): Xaa is any amino acid
MAILCLSSGIDDLKARLGRIIVGYTYGKQSDGSEKPVTAAQLNAQGAMAALLKDALKPNLVQTLEGTPAFVHGGPFANIAHGCNSVMATRMALQCADYAVTEAGFGADLGAEKFFDIKCRFGGFKPSAVIIVATVRALKSHGGVKKQDLEKENLAALEAGLPNLLQHIENITGVYKLPAVVAINAFPKDTKAELDLVEAKCRALGVNVALSEVWAKGGEGGEQLAREVARLCEQPNNFEFAYDVNLSINEKIETIAKNIYHADSVVILHNAQKQINQIEKMGLDKVPICMAKTQYSFSDDATLLGAPRGWRLTVRDVKISAGAGFIVALTGEIMTMPGLPPVPSAEKIDIDSNGKISGLF

SEQ ID NO: 87932 - protein, 361 aa, Unknown
  Obtained from environmental sample
  DOMAIN (39)...(358): Glycosyl hydrolase family 10
  misc_feature (1)..(361): Xaa is any amino acid
MKPLMCLIVVMFLLPCGGINAKASQEKANTMKGAANTPVLKEQYASFFLVGNVISPRDLDGPRFEMLKKHFDILTAENAMKPRYLQGSPGVFTFETADRLVDAVLKSGMKMHGHTLAWHQQSPEWINREGIGRAEAVENLITHTKTVAAHFRGRVVSWDVLNEAVIDNPPNPADWRTALRQSPWYKAIGPEYIEIVFRAAREADPEAKLYYNDYNLDNWNKAQAVYNMVKEINGQNLDVNGRPLIDGIGMQGHYRTKTRPENVAAALESFASLGVEVSITELDVQAGFNFNLNEEQALEQGIAYARLFALFRKYAAVLGRVTIWGLDDGTSWRRDTSPTLFDRNLQAKPAFFGALNPAAFL

SEQ ID NO: 87933 - protein, 366 aa, Unknown
  Obtained from environmental sample
  misc_feature (1)..(366): Xaa is any amino acid
MRVENNLILDDEGRTLILRGVNLGGDSKIPYTAPGGEISPDFLDRKKEVSFVGRPFPLEEAETHFRRLRKAGMTFLRFLVTWEAVEHEGPGIYDEAYLAYLRKILQVAENEGINVFIDPHQDVWSRWTGGDGAPAWTMVKLGFDLDLLDRCGAAITKQRYTVYHNKPYPKMIWPGNYNRYAAATMFSLFFAGNTYAPDLRIDGENIQDWLQSRYIAAFKHVQRRLKNCANITGWGSMNEPHFGFIGQKDLNAAEDVMLPIGLRPTPWLVIRAASGYQVEVPVYSMISMGKRISHYETFNADKISLFREGFSCPWKQAGVWDNEGGEPKLLKSSHFSLYQNRPAAFADDFLKPFIIKYINAMKESNE

SEQ ID NO: 87934 - protein, 284 aa, Unknown
  Obtained from environmental sample
  DOMAIN (64)...(259): von Willebrand factor type A domain
  misc_feature (1)..(284): Xaa is any amino acid
MRDPFVAAIPLGAPGGVPFKTSQINGIVRLLKLLELTGIFLLFLSAAGPSMKTAEIVWLNRGADIIFILDVSPSMAAIDMDGKNRFDIGKSLLVQFAQKRPTDSIGLVAFGEDAALLTPPTSDRYALELRLEQLRIGELGDGTAVGMGIAIAAYHLDKSAARRKIAVLITDGENNAGSIHPETAADLLRELGISFWVIAVGSMGEVPIDYVDPYTKIRRKGIFDSRYDIESLRRLCAAGGGTFLTAVNADAFAAAFSQLDDSEITVQRSRVVNRMTSVSFQFLL

SEQ ID NO: 87935 - protein, 330 aa, Unknown
  Obtained from environmental sample
  DOMAIN (2)...(285): tRNA synthetases class I (W and Y)
  misc_feature (1)..(330): Xaa is any amino acid
MKKISLTGIQATGELHIGNYFGAIKPALRLAEEYDARYFIADYHSLNSVKNPKELNNNIRQVAAGWLAAGLDPEKVIFYRQSSIPEVFELTVIIMASTAKGLLNRAHAYKAAVQANSEKGSDPDAGINMGLFTYPALMAADIILFDSDVVPVGEDQMQHIEIAQDIAQAFNANYGQVLKVPQAAIQDEVAVLPGLDGRKMSKSYGNTIPLFAPEKELHKTIMRIVTNSQGVEEKKDPDASQIYAYYKLFAAPDEQAALASRLRAGGMGWGDAKEELFRVANRELAPKRQKYEELMANPKLLDEILAKGAERARPIAAATVKRARKAAGID

SEQ ID NO: 87936 - protein, 115 aa, Unknown
  Obtained from environmental sample
  misc_feature (1)..(115): Xaa is any amino acid
VSVKSPWLSHLELGESYTVPVSHGEGRFIAQESLIRSLADNGQIATQYVDFDGNPSQDIRFNPNNSNFSVEGITSPDGRVFGRMAHNERFDDGLYKNIPDIRKMDIFSGAVSYFN

SEQ ID NO: 87937 - protein, 519 aa, Unknown
  Obtained from environmental sample
  DOMAIN (252)...(414): AIR synthase related protein, N-terminal domain
  misc_feature (1)..(519): Xaa is any amino acid
GADYAEEAASVTADLRLGLQIESIKNVRIINRYFAEGITEDDFEAVKHVIFSEPPVDIIYDKLPSLDGAYFFAVEYLPGQFDQRADSCAQCVSLATGKERPVIQSAKIYAVFGNITDDEFGRIKSWLINPVESRQALLEKPATLCQKFTQPDDVAVLDGFISLSSSGLEQLRLNMNLAMDLSDLEFCRAYFRDKEKRNPGVTEIRVLDTYWSDHCRHTTFLTELDDVQIDDEPLRESFENYLELRRSLGITEKPVTLMDMATIGAKVLKKRGFLNNLDESEEINACSVKIKVDVDGAEQDWLLMFKNETHNHPTEIEPFGGAATCLGGAIRDPLSGRSFVYQSMRVTGAANPLQDSACTMKGKLPQRKICRTAAAGFSSYGNQIGLATGHVCEIYHPGYTAKRMEIGAVIGAAPAVNVIRNTPQPGDVVILLGGRTGRDGIGGAAGSSKSHTSSSLETCGADVQKGNAPEERKLQRLFRSHEATEMIKRCNDFGAGGVCVSVGELADGLEIDLSKVPKK

SEQ ID NO: 87938 - protein, 133 aa, Unknown
  Obtained from environmental sample
  misc_feature (1)..(133): Xaa is any amino acid
GFYPFTLAQDYKVTAGEDATLGRFKCRLLSLEAVTKDVTYPKMKIWISEDGLLRKTEDYSLSGQLLRTSAIPDYYQISGRFVPKQILFVDALQGAKINGKFVNEKTQITISKPSFNKVADSIFSKTFLESVNK

SEQ ID NO: 87939 - protein, 438 aa, Unknown
  Obtained from environmental sample
  DOMAIN (22)...(438): Aconitase family (aconitate hydratase)
  misc_feature (1)..(438): Xaa is any amino acid
DFYAKIPYRVLAARRVLGRPITLTEKILYAHLIEGREDEAYTRGKDFAEFNPDRVAMQDATAQMALLQFSTAGRASSAVPVSVHTDHLIQARKNASSDLSKAKDENKEVYAFLESVCKKYGLDFWEPGAGIIHQVVLENYAFPGGLIIGTDSHTVNAGGLGMLAVGVGGADAVDAMVSLPWELKYPRIIGVKLRGSLSGFASPKDVILKLAGILKVSGGTDSIIEYFGEGAKTLSATGKGTICNMGAEIGATCSIFGFDSSMERYLRATDRAEIADAAKKIISYLRCDAEVEVEPEKYFDKVIEIDLSTLKPHYNGPFSPDRSFAIGEMEKSLEEFESPSEISAALVGSCTNSSYEDLARAASIIKDAQAKGIKPKVPLYINPGSEAVRATAERDGILRTFMDFGATVFANACGPCIGMWARNDVKKGQKNSIVHSFN

SEQ ID NO: 87940 - protein, 445 aa, Unknown
  Obtained from environmental sample
  DOMAIN (154)...(307): Magnesium chelatase, subunit ChlI
  misc_feature (1)..(445): Xaa is any amino acid
EGFDEFFGKNTEDRQRVTQDFNFQDLSLEDLSIILMKKLRERGLLFDPALKKNFLAYIRERKSDPSCEYKNGWLIEKDVIPSIDKNQQARLERLDGASVTDEDFKTIKAEDLPLKNKPKTVDEILAELDAMIGLAKVKNAIREIAQTIKMQKELEEKGGAKAQRLAIHLVFYGNPGTGKTTVARKLGALFQAMELLPSDHIIETDRTGLVAGYIGQTASMVKDMCDKAMGGILFIDEAYTLSSGGGGDFGKEAIDALLKRMEDDRGNFVVIAAGYKNEMQNFIQSNPGLKSRFTHELELEDYNPDELSAIFMSMAKDRGNKLSKDAEIAAKEAIADIHRKKGKDFANGRTMRNLLDDTVRKMAARTAKLPEAQRTVEALSTITAEDIPYEKPKVKTTEEILAELDGMIGLAKVKTAVRQLIETISMQKEREEKARRRGKDTGDSS

SEQ ID NO: 87941 - protein, 207 aa, Unknown
  Obtained from environmental sample
  DOMAIN (78)...(207): Peptidase family U32
  misc_feature (1)..(207): Xaa is any amino acid
MPQNQIEIMAPAGSYESLMAAINAGANSVYFGVQNLNMRARNSNNFSLNDLAKITDICKEKNVKSYLTLNTVIYDSEMEQMQQIVNAAAENGINAIIASDMAVLNYARKKGLELHASTQLNISNIEAVDFFSKLCDVVVLARELTIPQIADIAKEIEKRQIKGPSGNLLKIEIFCHGALCMAISGKCYLSLHHYNHSANRGASSKAA

SEQ ID NO: 87942 - protein, 558 aa, Unknown
  Obtained from environmental sample
  misc_feature (1)..(558): Xaa is any amino acid
DASCEEILEKEAGDVMRNHWEPHDSYYLGSDVFYTYIVHNGLWDLRIKQKTAEGYFTVAKELQEKMRQGKFPDTIREQFIQMLEHFGQSPIIVRSSSLREDNFGNAFAGKYESVFCANQGTPEERYKAFEQAVRTVYASTMNDDALAYRQRRGLTNQDEQMAILVQRVSGNHYGELFFPHIAGVGNSTNLYVWEKTMNPEAGMLRLVFGLGTRAVDRVSGDYAKIVPLDCPNKGPPVSYGDEKKFSQHKADVLDLHNNELSEVSLEKLADGDLKTEKDIFFSTDNEAIKRMRELGIKSDTTPRIPDFNKLLTGTSFPEFIRTVLSTLSTAYKYPVDIEFTANFDPNGEFRFNFLQCRPLQTKGLGRAIKIPDLKQEQIFFSSIGNFMGGNVRLGFDYAVCIKTMEYLALPDQEKYSVARTIGVINQKYKDKTMLLLGPGRWGTTTPSLGVPVHFSELCNMAAICEVSYPKAGVVPDLSFGSHFFQDIVESDVFYAAIFNGEPDVVFCPEQILERENLYGKLLPGEKNMDSIIHIAQTPGLILHSDITNQKLLIYWEKT

SEQ ID NO: 87943 - protein, 765 aa, Unknown
  Obtained from environmental sample
  DOMAIN (17)...(384): Major Facilitator Superfamily
  misc_feature (1)..(765): Xaa is any amino acid
MTPSLSPYRLRKAREVFNLFNVFNALSWNLLVGSIITLFAIRLGATSTYIGTLSALLYVSFFFLPLGKLLSKKFSIVGIFSFTWTMRAIGMITAVFAPISAHLGHHDTALGLTMLGVAIFHVIRGIGMIANNPVLSNLSMGPDRSSYMTQIQIINSAVGMFSGFAIAVILGKEPGLFLYSIIMSAGVVCGIISGMLIGKVPEPPTEESAVKTSLVSLVREALLEPKIKLFLIILLLVILVSGVSRTFLVVYAREVFLQEDGMVLLYSVFGGLGNLLANMLIKFLVDRIGAKPIFILCVLLGFIMMIPIVFFPLSSVNSLTMVILFLSFLFFMLNFGFLGSEGIAQTYFMGLVPTEKMLDMGMLYFFVFGVAGAGGSFLSGLLLDILSALGLPPFYSFKILYIVLIVLAAIAVFKMQKLTPLGALSFTGAVKVMFSYRDLQAISLLDRLDKTADSNQEQELLGALYNNPSQLSTKGLLEKARSPRLATRQESIRALDKLESLSEDAEAALVNDIVNNPFTTAYISARILGNHGCVSAIPILRELAYSHDYMLAGEAMIALARLRDLAFRPHIENIILNTQNPRLRIMGVEALGIYALPDSLNTFINIIRSTDPPPFLLNEVILEMSAILGTQNQFYRILTRFIAEPSLAPALALDEAEAAVAYYKSNIGWRKGGKRKTELPLLDRQAGSIHEAVSALENNGDGKPLSLWIQALPDFAFSDEPAFKTAQALFPEILVDDNMASHKCLRLLIVHWAAYQIRVWTRRLK

SEQ ID NO: 87944 - protein, 267 aa, Unknown
  Obtained from environmental sample
  misc_feature (1)..(267): Xaa is any amino acid
ARYELGDTSWFNTDWWWTTTTQTAGQTGWAYIKLGSSGSLMVKHPESGISGFSLNGYAGSISEEEKTVTVNVPCRTNLTALTPSVTPASGWASATSGAMNFTGPVEYSFTKGDVTQVYTVTVAAVIIDIAAIRNLTMPVLGGTPVTTITDNAQYSGTVTWSPDHSTFAAVTVYTATITLSPKTGCTLEGVAADFFTVSGATTTNAANSGLITAVFPQTDAQTPLGRFEYYWVDQHDSLVTTSGGKVTVNSGETLTITAQVQVILSIN

SEQ ID NO: 87945 - protein, 285 aa, Unknown
  Obtained from environmental sample
  misc_feature (1)..(285): Xaa is any amino acid
EDGYGRISVSLAGGDTARTLLPSTVFDKYVYTFTREGETAGVKRDPDNNGFFIMEVGNYTVEVQAYIGAGEPYVLAANGVSEQFSVGPGDNDPVKVLLSGYNTGEQGVFNYTITYPENIDEVVISLQKWPDMDTVTLTPSSLAEGNGITETLELEAGSYILKIFIIKDGFYAGKGEAVHIYPSLTTVYTKNFIDNDLVTVIINIAAIQGVTLPVTGETPVTSITENTQYSGTVAWSPNDSTFVASTVYTATITLTPKDKYSLQGVAANFFTVDGATSVSNSANSG

SEQ ID NO: 87946 - protein, 385 aa, Unknown
  Obtained from environmental sample
  DOMAIN (5)...(276): Periplasmic binding proteins and sugar binding domain of the LacI family
  misc_feature (1)..(385): Xaa is any amino acid
LLEGVAGLYYASLWPGIVDCAKENGCNVVCFAGGALRISPQNPYEVQRNIIYNHIDTSKFDGVIISGTLNNFISEIEFAKFMERFSALPTVSLAPALEHIPAVIVDNASGMKGLISHLANSHNCKKFAFISGPKGNLDADQRLDFFRKYLKELDITCAEERIAAGDFSRSGGYKATLELLKQGVEFDALVTANDETALGAIEALLESNVRVPEDVAVTGFDDIEESGLTTPPLTTVRQPLYEIGRTAVELLVTKMNGKGVPRRTSLQTPLSIRQSCGCFINPNHALDRRTFSIIQRLSSNIDHLKEHLTSELFSFVAMEMGASIDDEDLREIASSFFDEVEGTRTGVFLSALNRMVRAATLAAAESDDILQWQKILVTIRQFTLG

SEQ ID NO: 87947 - protein, 282 aa, Unknown
  Obtained from environmental sample
  DOMAIN (50)...(191): Phosphoglucomutase/phosphomannomutase, alpha/beta/alpha domain I
  misc_feature (1)..(282): Xaa is any amino acid
MSVTTTNIPALAQKAQEYIGLEQDPHFRSQIEELLKKEDWVELNDRFYADLEFGTGGLRGVIGGGYNRMNPFTVRRATQGLANYVSKAVPTGASAVIAHDSRNFSDVFALQAALVFCASGIKTYLFTGLRPTPELSFAVRRLKATTGIVVTASHNPPEYNGYKVYWDDGAQVVEPHDKAIIKEVLSVGGAIKAMDKEEALKAGLLVMIDKEVDVPFVDMVKRCAVRPALLKEGGKSVKVVYTPLHGTGAVPVDTALKEMGVEVTFVEEQRKPDGNFPTSATP

SEQ ID NO: 87948 - protein, 278 aa, Unknown
  Obtained from environmental sample
  DOMAIN (22)...(55): Tetratricopeptide repeat
  misc_feature (1)..(278): Xaa is any amino acid
LSSEIARLEKIGASSGSSQERHNAFLTLARLYQLSGNNEAALKAWENALKINSDNGRSLLERGRLLISQGEYEKAFESLTVIFTGNYAKDLLLEARFLIAHLEAFRSGNLSPLSALANDADFSDYRRLIYYTLWKIEQSPSWKALLAKDFPLSPEAKITAGKALSAQTPLWILFPGREALALITAPSTTAPDTPTQTPVVTPTVQGTTVLQTGLFSREEDARALSERINKAGFQSLVQTKQQNGGSYWAVYVPYGSDMNAMIKRLKDAGFESFPVTVN

SEQ ID NO: 87949 - protein, 152 aa, Unknown
  Obtained from environmental sample
  DOMAIN (8)...(152): Abi-like protein
  misc_feature (1)..(152): Xaa is any amino acid
MNKQPYTKPPLSVQEHIELLKSRGLHITDEERAIRYLQNISYYHLSGYMFPFLADKKQHRYKPNSSFTDIINLYLFDRELRVLIFSSIEKIEIAIRAQITNHFAIGTKNPFWYTDINNFSVSTEHKDFLKNTSAAIKRSTDVFIKHFTDTYS

SEQ ID NO: 87950 - protein, 263 aa, Unknown
  Obtained from environmental sample
  DOMAIN (10)...(240): Amino acid kinase family
  misc_feature (1)..(263): Xaa is any amino acid
MISKLIADSRKIIIKIGSNTLAGSNGKINSAFLAEFAEQTAALMKKGKQVVVVSSGAQVAGLSTMDKWARKKDIHYRQALCAVGQVDLMGAWSKAFEQNGLHIAQILLTRDDFNDPLRTLNMRNTLFTLVDEGVIPIINENDTVSVEEIKIGDNDTLAAQSAILWSADLLILFSDIDGVYDKNPKEHKDAVLVEEVRDIDALQKDISIGATNDFGTGGIATKLDAAKLALSYGIPAILANGSKPRSLETLAAGGQKGTVFLVS

SEQ ID NO: 87951 - protein, 319 aa, Unknown
  Obtained from environmental sample
  DOMAIN (6)...(317): pfkB family carbohydrate kinase
  misc_feature (1)..(319): Xaa is any amino acid
MAFLTVCLNPTLQKTLRFSSIYPGTVNRTGDHRLDASGKGINVTRVLTQLGKKAVHLTQLGGDMRPLFLSLCEQDGCSVQWAESGSQIRFCYTLLSDGDGALPGGSTVTELVEESEPVHAGTEDRLMEKFDELLAHNTDLNWLIISGTKAAGFSDALIPAMTQKAKEKGLKVILDIKGKDLTGSLKYQPDIVKPNLFEFAADFAPELIKNNELITIDDSANERIKSVVMDMAQKHKCRVILTNGSRKIFAASANEFFKVEIQPVKAINSTGCGDAFTAGLAAALEPLVPGERADFREAISEGCRCGALNAALVRPGVVK

SEQ ID NO: 87952 - protein, 705 aa, Unknown
  Obtained from environmental sample
  DOMAIN (3)...(102): Aldehyde oxidase and xanthine dehydrogenase, a/b hammerhead domain
  misc_feature (1)..(705): Xaa is any amino acid
LEENCFVSDIILPKMLHALIVRSPVAKGRLISIECPELPEGYMLISAKDIPGKNCLDDSDIPILSGGELSYIGEPVALLLGPDINILEESIRNCKVIAEEGAPVFNTADPAVIAAKREFSTGDVDAALSGAASVIENNYITGIQEHWYAEPCGAVSWPEQQGKITVRTATQWPFHVTRSVCGVLGVPAAKVQVVPTITGLHMDGKLWYSSLVSCQAALGAWISKQPVRLILTREEDFSFSPKRFGTEINFTCAINEKSEISGLDIKAVVNLGAHAVNADEILELVNIGSTGVYKVKNVRFNGSAIKTNIPPQGPFAGLGLAQGFFALERHISYIADSIGQDPAQWRKQNFNAGPMAQSGPSIKGTSGKKTANKGSSLGNQLIDNVITISDYRRKWAAYELLKSIRKKPPAAAPEQGQAHKTPYVHLEAWKEKTEGMRGIGIALGYQGDSLFNADMYPCGVELTLNKEGTLDIKTSSPDSDHVSVWNALASKILEIDKKKVRISYNADSRDSGPLTSFRNITILTKLIEQACKTMQKRREKEPLPITVRKTARPQKTDVLEDSHPKGVLDANSFSLLGWASAVVEVEFDPIGYMPRIRGVWMCVDGGKILSEDNARKNLKISIVQALGWSFREQISYIDGAIPVEQFENFEIPGIAEIPPIVITFINSNSGEPKGIGDLPFSCIPAAFVQAVSQAAGCHFKGIPLK

SEQ ID NO: 87953 - protein, 613 aa, Unknown
  Obtained from environmental sample
  DOMAIN (13)...(176): Type III restriction enzyme, res subunit
  misc_feature (1)..(613): Xaa is any amino acid
MDKLTILREKFGYSSFRPGQEEVIDAILAGTDALAVMPTGAGKSLCYQIPALMLDGMTIVISPLISLMKDQVSALKEAGCGAAFLNSSLSGSEYHNTMEEITNGDIKLLYIAPERLQRTDIPELEINSVPLVVIDEAHCVSQWGHDFRTSYLQIAKFIKGIKPRPVVAAFTATATVNVREDICRLLALRKPLSVNTGFDRPNLYFEVQKPKDKKTALLDCLDKRKEASGIIYCATRKTVEETCNFLISHGFNATRYHAGLADEERRKNQDDFIYDRKPVMVATNAFGMGIDKSNVSYVIHYNMSKNIESYYQEAGRAGRDGSPADCILLYNGQDVQINKYLITHEEDEETADYELQAHNLELLKQMTFYATGQDCLRKRLLAYFGEQISANCGNCSNCLTEFEETDVTLEARKIVSCVFRLKQRGRSFGKTMIIDILRGSKNEKIIRFGFDTLSTFAIMSDTKAHRIRQILDHLIDKNFLFVEEGEYPVVTLGYAEGLLKEEERVLMKLPQEREKTSDDKKHKKKGEKLFDTQNASEDIDEGLLDKLKKLRKEIAAKESVPAYIVFSDASLRDMCRKKPTSLVQFSGVNGVGSVKLEKYGDIFISLIQKYYEG

SEQ ID NO: 87954 - protein, 349 aa, Unknown
  Obtained from environmental sample
  DOMAIN (5)...(324): NQR2, RnfD, RnfE family
  misc_feature (1)..(349): Xaa is any amino acid
MTERELILKQNPLVNVSRSTAARMWLVAICAFLAALQSAMGDSFLSLIVALAALFSALLTELLITYKTRGFARIKDGSAAASALALALLLPNQIHPVYAALSAVFAIAVVKHSFGGLGANWMNPALGGWLFARFSWPQAFSIALNGSMNILDESGTAVGNMVNISLNKTIFSFLGAELPPGYIDLFALRTPGIIADRAVLALVLATAIIAASQISRSWLSFVYLAVFGLLTRMLGDISGSLWNGDVLYAFLSGGTLVTAFILISDPSTGAKSMPGGLIAAVLAAVLGFIFRFYGREFFGCLYAAALVNTLIPLLYKAERRLFYPSSAGGSGHAVSGFNDNDNDSGGRYE

SEQ ID NO: 87955 - protein, 433 aa, Unknown
  Obtained from environmental sample
  DOMAIN (119)...(332): Respiratory-chain NADH dehydrogenase 51 Kd subunit
  misc_feature (1)..(433): Xaa is any amino acid
MKVYSFPRGGLSFDDPTVPPRNCSVAAFLPALSVIPLVQHPGGRVVTMVCVGDMVKEGMLIGQGKSPGLANVHATVPGRVVRNVEWKDSEGRHNEGFVIRMEGSFERLGKKEEKFPHDGIGHQELQRILTDCGIVEMEGSGLPLAEILSNFRGSGKRQTLVVRCVFDDPWLAADYVLCSERVQEVVEGAFIVAKAGGGIDRVLFAVSCHEKELGENMLSEAALYDIQSSLVLTGSKYPQRNYRELELVLRNYGKKEEIDLGPLLVLGPATLAAVHDAVKYRRPILERYVAVGGSAVAKPQVMRVRVGKRIGDLFEECGGFRGDPFRIAVGSPFYGRTVRSLDEPVTKNSYAIFAMLKSQAGYHPERDCICCGECRRVCPVGLDPEELYKRIISAPRDAPYAAEGCHGCGCCELVCPSSLPLSDVIIGKMGERK

SEQ ID NO: 87956 - protein, 228 aa, Unknown
  Obtained from environmental sample
  DOMAIN (53)...(217): Pyruvate ferredoxin/flavodoxin oxidoreductase
  misc_feature (1)..(228): Xaa is any amino acid
ALDPWWNIQPPEFDGGHFVQMVGATTDKTERHCKAFPAHLHPADISLKLAGSGGDGAQTAAMLIATAGINEGFDGTHIPAYGPESRGGTSYADVHIAKTEVLNPASPAPHILIAYNAPSLVKFGWTVAKNGFTIFDTSVAKEVKPADSSVKLIGVPMSEIAAELGNMVVKNIVSLGVLAAVTDIFPRDTFLTAIKQALKEKAKLIPLNEKAFDRGFEAGKACMKAKGY

SEQ ID NO: 87957 - protein, 294 aa, Unknown
  Obtained from environmental sample
  DOMAIN (1)...(289): pfkB family carbohydrate kinase
  misc_feature (1)..(294): Xaa is any amino acid
MKILVYGSLNIDLVFSVDHIAALGETISSLSLSKNAGGKGANQAAALAKAGMETWISGKIGKDGVFLLELLESYGVHTEKVVHYEGPSGQAIIQVDKSGQNSIVLFAGGNGLVQPDEINKCLSFFEKGDLIVLQNEISNTGLIMEKAKSSGLKVALNPSPWNEEAGKLPIDLADILFINEIEGAGLAGLENTIPVTEILDQLCTCYPKTEIILTAGSRGAYYGFGKIRAKGEILDIPVVDTTGAGDCFSGYYLAARERGLSVQASLDIASKAAAITVSKKGAMESIPFKDEVFV

SEQ ID NO: 87958 - protein, 510 aa, Unknown
  Obtained from environmental sample
  DOMAIN (45)...(235): ATPase family associated with various cellular activities (AAA)
  misc_feature (1)..(510): Xaa is any amino acid
MAEAPQIYEVTASKYRPKTFDELAGQEFVVSTLKNSLQSGHIAHAYLFSGPRGCGKTSAARILARSLNCEKGPANGPCGVCDNCLAISRGAGMDVLEIDGASNNSVNDVRQIKDEVLFPPQSGRYKIYIIDEVHMLSGSAFNALLKTIEEPPPYIVFIFATTELHKVPATIKSRCQQFNFRLIPVETIQEILKKVCGEMGITAEDDALFWIARESTGSMRDAFTLFDQVVSFSAGSIRGDLIREKLGITGLEKLNALAEMCAANDAPGAFALTGEILDTGVSIEQFVIDLAGYYRSLLLLKNGVTRESLLGYRSALFSAKALETFDSVRLEQALDLLLNCYRNIRYSVSPRFELETAVSKLSWLSRWISPTELGEAVENARGVLGNAGIRQGRAAAVKTAPAARETASSDIKSADIKSADVKSASAASAPAAAAPRPQPKSGSLSDEFRRMLAERGSNVSSASSDGTSSDDTFGDDDVPLWDRSVSKNGGGEIPPQVETVLSVIPGTVVE

SEQ ID NO: 87959 - protein, 757 aa, Unknown
  Obtained from environmental sample
  misc_feature (1)..(757): Xaa is any amino acid
MLIRCGFWFLYVMRHNKRARAVCLWKHARRRLGLAGLGYPGVKSGISESGWASGIDAMVKGSYALYLGYAAARFAPEYDDGAFASMQDNYRLFSVWYGKVPLWRRLLAWIFPPLALALKKTNSVNHISKKLVSLLFLVFLLVSVDGRAQSDRDLSDDAPSADDAPSSDGGQYFDDEYFTEADELFNKAAESEYSEYWERAIDLYREGRDRFPEDARFPLALGNLFFNRSLYSLAWDESKTAEQLMPYEPYILQRLAHTAGFLNLDKISVTYLEKLLLIDPDNMEAISYLGWMYYKVHRLDDGERLISEALERFGDDADLAMTLGTIYSDMYRYDEGKYWYQKAIELGVGARSFTAVAHYNLSILESRFYLYALSMDEANASIDAQNRASGLLARGELRMRRLDLEEALSDFQTAREIDRSPLAKVNLAQAYQISGRLEEARLYALDCLKTGDQSWMAYYGIDPVRYKRDLHEILYKTYSGLAKAEKFQPWGTVGGVIRSTVKLLSYRFYYAVHHKLYQKYSLASGDAYDIREANGHPPLDQYIQYYNAFETYPRRSLVYLRKARDFETVVIPASWGSYYLEESVLLKDTGLAAQALDALDPVWERDLVSYCYREFALTGSRTYAEELFALNRGALLQAGISLPLEIRFNTANEIGTAVGTGKIRTKTFLRALAKAGFVQTAKAARIVSATPAAPPRFTLDITINAAPSTGFTVFCELADAEGAIKPLRHAIPLRSMSRADICAFARALGNLMFRVEG

SEQ ID NO: 87960 - protein, 536 aa, Unknown
  Obtained from environmental sample
  misc_feature (1)..(536): Xaa is any amino acid
AYDTGHREPPPESAKDATEAILNVIEEKIKTEAAFTKEGVLREAMKSTIGSTITPEDINKEFDRLIETPTPKIAPLLTKATDYGETAYYSTPELMEIERQNVETCVDAKKTDITVDSRIVDEYIDQAHKNLIRESTDRRGFTQGQMDAIRHILTTDRRYSVIQGDAGTGKSFSLQYAKELLEAQGYNVLGIAPTGKATDELTASAEIETTMTIAALISAKNKPLEQGKKYCIFVDEMSMGDSRTVNKLLKITEEYGAKVIFVGDKEQFLPVGAGRFFADLQKADIKITRMKDVIRQKTKQTINVVNALAAKEIPAAINCLAGYTTVIGYDKTNAKKYRVGQRISFHDRTATANNAATIPLGTIAHVTAVGDRELTIEYTVRGQKITVNIDPRNTHKNYTLYDKNKGYKNCIHTLADKDDRQQAVAADYVNCYKKGIDALVITATNEDRRSLNKIIRETLVRQEKIRNVSDFTLLEPKNINNFLFADSFAVGQQIKGLPQLKTDGEYGFGEITNIDINQNKITIRNPKTDEEFKVDP

SEQ ID NO: 87961 - protein, 217 aa, Unknown
  Obtained from environmental sample
  misc_feature (1)..(217): Xaa is any amino acid
MKGPILVVLAAGMGSRYGGLKQMDKIGRSGEVLLDFSVYDAVKSGFEKIVFIIRHDIEKDFRDLVLARMESKVNCELAFQDPDSLIPPDIFRAAQEAGRTKPWGTGHALLCAADKIDAPFTVINADDFYGREAFAVMGKHLRGADTNDSSIVPYRLEKTLSPQGTVARGVCGVENGYLVSVDELTSIEKKDGRIFNTAPDGSIRSLAPDTPVSMNFW

SEQ ID NO: 87962 - protein, 155 aa, Unknown
  Obtained from environmental sample
  DOMAIN (1)...(155): Thymidylate synthase
  misc_feature (1)..(155): Xaa is any amino acid
IDQLRKLVQTLKTDADNRRMIVSAWTPIDLPRMALPPCHYAFQVTVIDGKVNLLWNQRSVDVALGLPFNIASYGCLLHLLAKEAGLGEGKLIGFLGDTHIYVNHVEGIRVQTERAPKALPRIKTENFTSIFDWHYGDTVIEGYDPHPAIKFEIAV

SEQ ID NO: 87963 - protein, 62 aa, Unknown
  Obtained from environmental sample
  misc_feature (1)..(62): Xaa is any amino acid
MKAYLDIIQKILACGYKKNNRTGTDALTIAGAMFEHDMAEGFPLLTTKKVPFRLVACELEFF

SEQ ID NO: 87964 - protein, 187 aa, Unknown
  Obtained from environmental sample
  DOMAIN (52)...(179): NUDIX domain
  misc_feature (1)..(187): Xaa is any amino acid
MDQNKLVWNEENRKQILDCKIFKVWESYCKSPEAQVNQNKPQAFTVIEAKDWAIVVPVVESVQGKKFVMVWQWRHGAMDLSLEFPGGVFEEGENPKEAAMRELREETGYIPKKIEKIGEFSPNPAIMSNRVHFFLAEELTNCGKLSLDEDEYVEVVLVNADEVIQGMGKEPYVHALMGSALALYNKK

SEQ ID NO: 87965 - protein, 224 aa, Unknown
  Obtained from environmental sample
  misc_feature (1)..(224): Xaa is any amino acid
IATGIADAFPQYLRNADDLALDAKAKYDAGDYYAAKDSADKALSDYQTLLVGGKAYNARQEIVNRGFVKFDPDNFEKSDEIGQKAIDAYEAGDKGTAVTNAEEALLRYNIVLSNGWVAYAADRKEAAERERQLAIAERANIASKETFRKGDASFESANGFYSEENYSEAALAYVDAEAVFAVSRKETEEKRVRAEEAIRIAEEKIEESSEAALEAEKIIEGVTK

SEQ ID NO: 87966 - protein, 267 aa, Unknown
  Obtained from environmental sample
  DOMAIN (182)...(267): DnaB-like helicase C terminal domain
  misc_feature (1)..(267): Xaa is any amino acid
MAKLRENIPPHDDELERAALGSLLADDQAIDAARQNHLKQGDFYSRAHQKIFETICALDDNNLTPDIQTVIQNLKQNGKLDEAGGAAYVSSLTSVVPSSANIEYYIQSVLGHSLRRSLLRVASEIGVAAYDESLESHEILDKAEESVYKLRDERQAFPYKKLSEVLLPTFEKIEEVYKTKKALTGIPTGFDRLDEMTTGFQPADFIIIGARPSVGKTALALNMAAHIAFRNNIPIAFFSLEMTDRSLAERLISSTAQVDGNKMRSGY

SEQ ID NO: 87967 - protein, 77 aa, Unknown
  Obtained from environmental sample
  misc_feature (1)..(77): Xaa is any amino acid
MLNKGFFGENAIVEDNDDMVHSYLMIDPSGRFFQNGNKEDYIYSDPIHEVGLEKALSQIKFSKEKFMSRYKDTTKNE

SEQ ID NO: 87968 - protein, 311 aa, Unknown
  Obtained from environmental sample
  DOMAIN (232)...(298): His Kinase A (phosphoacceptor) domain
  misc_feature (1)..(311): Xaa is any amino acid
MLKKISDLYDRLFQAPDNLFNSDTFYGELNYECSKLSFMFFLSSVAWLTYIPLDYKLHVHCLTLVLALRLGLTALSVASIALTFTKFFRARPIILLMALVAYLNFGTAIVTATADSSVVTPYMGGFIFVMMIPVFAPFPLISKFVITFFPVALLFVLGSVRGIPFFKPPISYATNDTLCTFVMSMILSYAQNTLRFNAWRQQVTLKFLVQQDQERIATISDLASKAEAASKSKSDFLARMSHEIRTPMNAVIGISELAMREKEVPQSTYNLLVTIRQAGLNLLSIINDILDFSKIESGMMKIVPPTTTSRR

SEQ ID NO: 87969 - protein, 232 aa, Unknown
  Obtained from environmental sample
  DOMAIN (6)...(119): Response regulator receiver domain
  misc_feature (1)..(232): Xaa is any amino acid
MADNRRTVFVVDDDLTSLAVAKVALKERYNALTVNSGAQLLKILEKSIPDLILLDIDMPDTDGYETIKALKSSFKTADIPVIFLTAHSNSDSELRGITLGAVDYIIKPFSAPLLLKRIEMHLIVESQKHLLESQNQELKAQHHELERQKSELINFNSKLQEMVDAKVKTILELQGALLKSMAELVESRDDITGGHIERTQSYLGVLLDAMKDRNIYTDEVANWDLNLVLMSA

SEQ ID NO: 87970 - protein, 336 aa, Unknown
  Obtained from environmental sample
  DOMAIN (20)...(317): Glycosyl hydrolases family 43
  misc_feature (1)..(336): Xaa is any amino acid
MKKQGFNPYLPSWEYIPDGEPKVFGNRVYVYGSHDKFNGYAYCLNDYICWSADESDLTDWRYEGVIYLKTDDPLNKDGAMNLYAPDVTQSPDGKYYLYYVLDKVNVVSVAVCDTPAGKYEFLGYVHYADGTMLGRKEGDIPQFDPGVLTEGGKTYLYTGLCPRVKTEDNRSHSSAVVLGPDMLTVLDGPFQIIPGVNASCGTGFEGHEFFEASSVRKKGDTYYFIYSSIALNELCYATSKNPLAGFSYGGVIVSNADLHIDSYKPAEKLMYCGNNNHGSIAEIAGKWYIFYHRHTNGNEFSRQACLEPIEIKENGSIRQVEITSCGPNGGPLAGKG

SEQ ID NO: 87971 - protein, 536 aa, Unknown
  Obtained from environmental sample
  DOMAIN (5)...(243): PHP domain
  misc_feature (1)..(536): Xaa is any amino acid
LKIIADIHIHSPWSRATSSRLSPASLERWAGIKGIGLLGTGDCTHPRWIEELQDNLEDNDSGSGFYRLKEKARSEFDSGPALAEGLPGPGGTDSPLQESNVHFVLTGEISTIYKKAGKTRKVHHVVVLPDFKAAAVFNAKLERLGNIHSDGRPILGLDSEDLLSLLLEADDRALLIPAHIWTPWFSVLGAKSGFDSIEECYGSLASHIPAIETGLSSNPPMNWALSGLDRYAIISNSDAHSPDKLGREATIFDMELSYDSFREALYRNKIIATVEFFPQEGKYHYDGHRNCGTCLEPEEAARLEGICPVCGKPLTRGVMGRVLELADRPVDETSPCPEEQSGNTRPYYSLIPLKEILGEILETGETSKKVEAAYGTLIEKAGSEFALLLDMSQEKIETLSCPGISGELLAKAICRMRRGEVSISPGYDGEYGVIRTFAPGEAKESGSGLFEDNIVNDTNKINKPRRAKQKTAVAVSEKSLSRERIFPLDEDQLAAVTSGLRRGIIIAGPGTGKTAVLPQKSPVSLAKVPTPLPYLP

SEQ ID NO: 87972 - protein, 484 aa, Unknown
  Obtained from environmental sample
  misc_feature (1)..(484): Xaa is any amino acid
DSRVTANGALAIYSGGTGEYDVTIGYLGIVSITGNVTTGATATTAGGGGLIRAIGRNNVNIENNAQLLITYAGSKAFAIEAASGTVKINGGRIMSKDGQAVTTYGGDILVNDGTPYGFENSLKSDSKTRITGDRGILIRAVKNATNQRAGTVALNGYHELDTIYNKYGTAVKVDDSVFVYGSIIVWTDTDTAITAGTAALPGLVTLQGGRVWAAGIHGKSNPVAVASKRVYMKGGEVWANTERTSIDNEEMYKDSKAIGILIRQGAGEGRLEIEGGDIIAYGASTGIDVRDTAVVAYIKSGKNTDDWTGSTRQKTNSVIQYTADSTSTVKTPGGVTIKAGNNGLGIKSIGQIKVESGDEFKGDIPDNYLLSTQVYIGSGNGPQARAIWMPVETGVKKKELNLGQAFVEAGSDGAIAIEGGKNTLIKVDHSVVLVRHASTGIKGAGGVYVDAGYVEVLATENNNTGTALTGIELRVSGGNVGEGE

SEQ ID NO: 87973 - protein, 446 aa, Unknown
  Obtained from environmental sample
  misc_feature (1)..(446): Xaa is any amino acid
MLRPEAAVSGRVLAAADSSAVSAAKVKAVSSWGDTVSAVTDGRGDFMFYCRAADWAITVEKPGFQVSSPRRVTLKLGADTALGNVYLVKNPFALSSISGVVRNSSDQPVMGARVRVLRDGVLVDELASTSHSGAYVFYLNAGTYTVTAEKPGFAMFSRGGVAVAGTTVQNITLREGAVVVSGAIIGKSWVAGVNNYSVAPITSARIAFADVARPDTFNVTSDPVFGKFSVSLPKDKDYRVTASAAGFASGAVRNFDTRNVGGGLSKVYADTLYALATIKGRITGVVAGVQVDVIVSDSVDGRLIASGKSVDGAYELRNIPGGIVKVGAGAEGYFVSDEEVYRITVSEGGKLSPNKEFYDFDMRAGTNTVRFNVDGYSGSGAVKVVSPLNRTISFSNAPGIVAELNGVGGGRYVVEAVPSGNANLLELSYHEFDVPVSEDEPVQHTE

SEQ ID NO: 87974 - protein, 482 aa, Unknown
  Obtained from environmental sample
  DOMAIN (421)...(482): Anticodon binding domain
  misc_feature (1)..(482): Xaa is any amino acid
WKESGRWDAMGEGMLRAKNRLDNDFVVSPTAEEAFTAIVRDELSSYRQLPLALYQINTKFRDEIRPRYGVMRGREFVMKDAYSWHCNDESLDETYQAMGRAYRRIFKRCGLTVIPVKADSGAMGGSGSEEFMVESEIGDNTLILCKNCDYAANVEKAGCAPDYDSAQASAASIPPIEKIDTPNVKTIDELCAFLKTKPQAFIKTLIYRAINVELDISAAPGCKDLERKKGDLVVWPEAFFAAAIRGDLDVNETKLAALLKASEVSLAADTDVIRLTNAPVGFAGPVGLNSLPVIVDHSVTAMNDAVTGALEKDLHYQHAAYGRDFTGWMTGDIRTVKAGDRCSLCGGELYEKKGNELGHIFKLGYKYTRSMNVSYLDENGKSQTPTMGCYGIGLDRALASVIEEHHDEAGIVWPASVAPYHVVIIPIKYDGAVKAACDRLAADLEKAGVEVLLDDRDERPGVKFNDADLTGIPWRVVVGDKG

SEQ ID NO: 87975 - protein, 82 aa, Unknown
  Obtained from environmental sample
  misc_feature (1)..(82): Xaa is any amino acid
GYVQDKKTKSETIEALVYPNPEFKNEKGTAPSADEIKDRIDAIISEVNQKLQSYEKIDRVTILNKPLEMTTTKKIKRSELKV

SEQ ID NO: 87976 - protein, 475 aa, Unknown
  Obtained from environmental sample
  DOMAIN (48)...(402): Alpha amylase, catalytic domain
  misc_feature (1)..(475): Xaa is any amino acid
MKPGDNDLWEGSFQVQKLGIYQYKIIAWTISPPDIPTESGVFEARVDSLCARQGTWYEMWPKSQGKNPNKSATWADCINRLDYIVSLGFDTVYLVPFHPVGETNRKGANNALKAKPGEPGCPYAVGNSRGGHFAVDPELGTMDEFENFAAACKQRGLKMAIDIALNCSPDHPYVKQHPEWFFHEADGSIKFAENPPKKYEDIYPFDYYNENYKELWEEIKKIILFWADKGFEIFRIDNPHTKPFPFWEWLIRSIKEEHPELVLLAEAFTRPKMMKRLGKVGFDMSYTYYAWRTEKWELEEYFRELTSKPVSDYMRGILFPTTPDIFPDYFANQGPPTFKLRYFLAATLSSLVGMYNGYELCENEKNPAKEELYNSEKYQYKVHNWNCPVNIKEFLRKVNFARKQQSALMEYENLRFHYAENTNIMVYSKRDWKNGNTVLCIVNLDVKKTQNSFVYLNLPELALSDGQGYTVKDLI

SEQ ID NO: 87977 - protein, 820 aa, Unknown
  Obtained from environmental sample
  DOMAIN (283)...(365): Helicase conserved C-terminal domain
  misc_feature (1)..(820): Xaa is any amino acid
MFINIENHFLTFKSMPDVLAEFLTQAESKGLQLYPAQEEAILELLEGKNVILATPTGSGKSLVASFLHRLMLSKNLRSVYTCPIKALVNEKWMALCKEFGAQNVGLSTGDATVNHNAPILCCTAEILEQIALREGENSNIGAVAMDEFHYYSDKERGVAWQIPLLTMKHTQFLLISATLGDTSFFETEMTKLNGLQSVCIKNAERPVPLEFTYSESPLANEIQRLLNEGKGPVYVVHFTQSEAAENAQAFTSLDIANLLKKDKIAEAMADFRFSSPFGADIKRWLRQGIGLHHAGLLPKYRILTEKMAQQGLLPIICGTDTLGVGVNVPIRTVLFTKLSKFNGEKTTMLPVRDFHQIAGRAGRRGFDSVGYVVVQAPEHVIENRLREAKFSKTGRKFQKASPPDGFVSWDKTNFERLINGEPEKLISRFSIDANIILQSISQSAGDRKSCRVLHNLIMNCHDSKEQKKVHIKRAVQIYRSLITQGIIVNGKPAVNLSDRFAMHQPLSLWLLESIEKIADLNAITLLTVIEAILEEAEMVRRKQLSKLKNEAITEMKAQGVEFEERQARLEEMRPPEPENAEWLEASFNEFAKKHPWVCGERLHPQIVVLEMFAECFSFSGYIKQYGLERVEGLLLRHINSVYKVLAHTVPEKYKNEEILEMQDYLREMLQRVDSSLLDEWKRMQNPEFILPEEKEEPLPPFAVSERMVKALVLQFLVAWGKGDFAAATDCLEPSEEFSEKKLAALHKEYIETHKELRLDAEGRSNKHTSIEKKGDVWEVTRMLQDYDEQNDWQMVFAVDLAESKRGERLVMKIFYIIPSL

SEQ ID NO: 87978 - protein, 257 aa, Unknown
  Obtained from environmental sample
  DOMAIN (171)...(242): Bacterial flagellin C-terminus
  misc_feature (1)..(257): Xaa is any amino acid
LQRVRELSVQSANDTLTSTERKYLNDEVTELLKEVDRIAMNATFNSKQIFGNKGDAFSNEERDLRRPMSDEDKDIKYWQPLATKNANDIYFRNKEDNDLRYWKPFTTKDVNGDELRVGVLHIGPGATKPDEVKVSIPELSAKSLGLKDLIVPYDSINVPTLTYQGVNINSQNGATKAINDVDIAISSVGTIRTCMGVLVSRMERQVEDLESNNIGLNDYVTKVKDTDFAKESTTFAASQIQMQPAVSILAQSNSRVG

SEQ ID NO: 87979 - protein, 301 aa, Unknown
  Obtained from environmental sample
  DOMAIN (11)...(124): Response regulator receiver domain
  misc_feature (1)..(301): Xaa is any amino acid
LDNLMEIDKDFTILAVSNNYTGLDLLSSILSPYYTIKTTSSRSEALATLNTGSINLIILGSAMYEHEDNNFLKEIKSHEDTMRIPVILIGNFDKPELEETAFAFGAVDYISKPFRAPIVKVRVNNQRLIVKQIKAIEDLGLLDHLTGITNRRGFDNRINLEWLRAIRDSSCLSMAILDIDHFKVYNDEYGHAQGDVLLRTLAQKITSMLRRPGDFVARWGGEEFVLMMPNTTQKGATEHAEEIRKSVQEMEVPNLPSATVSIGVASVFPSINSSITEIFDMADKALYQAKNTGRNKVCFFT

SEQ ID NO: 87980 - protein, 508 aa, Unknown
  Obtained from environmental sample
  misc_feature (1)..(508): Xaa is any amino acid
MTCLQIPLDKLLREGFNNGHGYIRPPKGIKTAASLAAIILQSNQNDMHGGQSFAYFDRDMAAYVEIEKKRQEKQIRGNLKELGLSELVNEEKIKALVYGLTKEETFQAMEGFIYNLNTMHSRAGAQVPFSSINLGTDTSDAGRMVTECFLLAYEKGLGRGESPLFPNVCFKLKEDVNFEEGDPNYDLFQLSMRVACKRLFPAYSFQDSSFNKPYRDEEVAYMGCRTRVMSNCNGAEVTNSRGNLSFTTINLPRLGIRAERDLALFWKLLDEVIDLTIEQLITRYNVQKNLKVRDFPFLMGQKLYLDSEELSANDTIEKAIRHGTLSIGFIGLAECLTALIGRHHGEGADAQALGLAIVSHMRRRCDEATKKHKLNFSLLATPAEQLSGKFTKLDVKQYGIIPGVTDKEWYTNSFHVPVEYQITAQEKIEKEGVYHKYCNAGHISYVELAAAPEDNIEAYESLIKAMAEADMGYAAINFPIDICHDCGLNGVIPGDTCPKCGGKDITRV

SEQ ID NO: 87981 - protein, 158 aa, Unknown
  Obtained from environmental sample
  misc_feature (1)..(158): Xaa is any amino acid
MKICEKIEMLPVIHGAEMFAREARRLCSENKYDCIAVDISPVFQDDLAEAVDELPLISALIVHGHDFNYGFHDGGAFSVGVDIDDNEINNNIDGADYTGINHDPDKSDFSVDDYGDGYDDVCDNGLPSCRYIPIDPCDAMIEGVRQARQRRIPFRCVD

SEQ ID NO: 87982 - protein, 671 aa, Unknown
  Obtained from environmental sample
  DOMAIN (407)...(629): Methyl-accepting chemotaxis protein (MCP) signaling domain
  misc_feature (1)..(671): Xaa is any amino acid
EVIRTLAAIMGDFQSTEPLERRDRYDDVLLAALRSQPNIVRIAAVYKPNAIDGMDSRFIGRVGSTATGQYSMTWARDTGEIAASANLDIQGTMDYLNGPNARKDRVEDPTPLKVNGKDTFVFRLGVPIINNQTSEVVGSVTCLLTIDGAQPMVERTIKGKEAIVAMSIYTNTGFIIGSYVPERIGKNLRDVDSIYGNYINDAYQAVVQGKDFQCNSYSAVLKTNVSIDLTSFQIGQSHVMWTIMIGASEEYILKDVKDMTYFTIILTLIALVLSTVIVYFTLHSTTKPIVTVAATLKDISEGEGDLTRHIDVNTKDEIGDLAHYFNKTLEKIKKLVLIIKKEAAGLHEIGNDLASNMTETAAAVNQINANIQSIKGRVINQGASVTETNATMEQVINNINKLNGHVENQSRNVSQASSAIEEMVANISSVTNTLINNSANVKTLREASDVGKNGLQEVSADIQEISRESEGLMEINAVMENIASQTNLLSMNAAIEAAHAGEAGKGFAVVADEIRKLAESSSEQSKTIGDVLKKIKSSMDKITKSTENVLTRFEAIDTGVKTVAEQEEIIRQAMEEQGEGSKQLLQGTGNLNEITKKVKAGSGEMLNGSKEVINESENLEKATQEITNGMNEMATGAEQVNIAVNNVNEISNKNREGIDTLIREVSRFKVE

SEQ ID NO: 87983 - protein, 468 aa, Unknown
  Obtained from environmental sample
  misc_feature (1)..(468): Xaa is any amino acid
DGLSDADRFSKTFLKTVNCKSVDLPLAVLAVLPEKLRETDGEIQAYYFVENDIARVVDISREKAYGIAVDIGTTTVALWLVDLENKKILAARNAYNDQVECGLDVISRINYAKKSLSELRSRILKTINKLIEELIAVASKDAGVSPDRILSVSLAGNTTMIHLLLGIVPEYIRLFPYTPAVFMPQVYTAAQVGINVCENAPVFFAPAVGSYVGGDITSGLLCTDLAADSGELILFIDIGTNGEIVLGNGEFIFACACSAGPAFEGGGIKHGIRAREGAIERVAIDETGRPHIQTIGGSPPAGICGSGIISAIAELFRKGIIDSAGKFAEKNGEYALCDGITICETDIDNFIRAKGAIFSACQTLLASVGLSFKDVDRFYVAGGFGSFLDLEDARTIGLLPRLSDEKFSFLGNTSVIGAYLTLVSEERRAKEHELAGKITYVDLSSERQYMDHYTAALFLPHTDRKLFE

SEQ ID NO: 87984 - protein, 300 aa, Unknown
  Obtained from environmental sample
  DOMAIN (15)...(262): Pyruvate phosphate dikinase, PEP/pyruvate binding domain
  misc_feature (1)..(300): Xaa is any amino acid
ITTYPTLHNFGLAKNTIKGFASQVGEDFATHEVLFMVRGILQIEERIRELEAKTNEQEEIAGKLKILANMLGIKGPSNELHQEEKPVPIDKSAVEYMDEYAKYFPKGFFDDAEEQIILTLSEISKMLQMDEQNDHDTALLVQPMVYGNYGKDSCSGDFFSRNVVTGEKKLQGNFFHGKFNETDAVGQEINKIDSAHLKELEKIAWTLEDKFKEIRQVRFTVENGKLWLIEQRQVMQKSTQSDIKLLLDLQKRKIVDSQYVVKAIDPLRLNEVLHPVINTPSVKGMKSWKGGIAGAPGAAI

SEQ ID NO: 87985 - protein, 269 aa, Unknown
  Obtained from environmental sample
  misc_feature (1)..(269): Xaa is any amino acid
MKIQTRLRFLALGIVLVSLISCQADTNKTNTDDMSFSVTFNAGEGGGAVPAAQQVSPNGTVTLPGVGSMTAPSSKQFAGWKTDEWLYNEGKEFTVTKNTVFTAVWIASSPTRAYPSIRYVPASNPNSTAAHVLGLWLPDSGVGPFPVVIYVTGGAFMMSGNGQPPGYYAQARAKGYAVASIQHRVNNNGGKFPNQTLDVLAAIRFLRANAATYNLDPNRFVITGHSAGAYQSNMVAVLSNSPDGLSILDPDNVLDTLGNPEFQPSSGGG

SEQ ID NO: 87986 - protein, 505 aa, Unknown
  Obtained from environmental sample
  DOMAIN (14)...(64): Clp amino terminal domain
  misc_feature (1)..(505): Xaa is any amino acid
MRISSHVQAIIDAAYNEAKMRSHEYVTPEHILYAALAFEEVQGVLYSCGADLAQIKSGMENFFEQKVPSSAAAEPAKTVGFHSIIERAIIQSKSAQKDRIDVADILVSLYDEKRCYSAYYLRKAGVKRFELLQVLSHSHGNEGGKDNDASDDDQADGQKSKQSKKTALERYAIDLTELARNNKLEPVIGREEELDRTIQVLCRRLKNNPIHVGDSGVGKTAITEGLAQRIIAGNVPPTLQGFSIFSLDMGALLAGTKYRGDFEERVKRVVEEILKKEKAILFIDEIHTLVGAGSVSGSALDASNLLKPALTSGKLRCIGSTTHEDYGKFFEKDRALSRRFQKIDINEPSQEDAVKIISGLKTKYEDYHKVHYSDDAVEGAVRLSAQYITERRLPDKAIDVIDEAGSYARIEAYMKEEKEFAELFGKKADEFTSSEKVHTVQGGSVEKIEIGLPLIETVVSKIARIPERSVGGSEKDRLRLLEDRIKERIFGQDQAVNAVVKAVKR

SEQ ID NO: 87987 - protein, 277 aa, Unknown
  Obtained from environmental sample
  DOMAIN (72)...(271): FliP family
  misc_feature (1)..(277): Xaa is any amino acid
MRRRIIFSALLLLALVPQAAYTQATLFPGMATEGTMGIPDPPSMTPVPFIDLTIRNPESGQEVAFSLQLLLLLTALALAPSIFILMTSFLRIAIVLDFIKRALSLQQVPPNQVLMGIALFMTIFIMWPTFTIIYENSFRPLAAGELSVGGAYREAEAPLRIFMYSQMQGSKNNSTENIRLFMAMRGLDRPDTLADVPTYVNIPAFILNELTIAFKIGIFLFIPFIVIDMVVASALMSMGMIMLPPVMISMPFKLILFILIDGWGLLTNQLVQSFLQR

SEQ ID NO: 87988 - protein, 54 aa, Unknown
  Obtained from environmental sample
  DOMAIN (19)...(42): 4Fe-4S binding domain
  misc_feature (1)..(54): Xaa is any amino acid
IKEFAKKAYAEIGKVPWRPYKNASACIECGVCETKCPQGIHIREQLKETHKALA

SEQ ID NO: 87989 - protein, 79 aa, Unknown
  Obtained from environmental sample
  misc_feature (1)..(79): Xaa is any amino acid
MKTISIILGLLICSGPALAVEPEATGAPPELRAWTDWVLHGREEALCPPDHDRQPRCAWPVSLALDLTAQGGCFTAVFD

SEQ ID NO: 87990 - protein, 221 aa, Unknown
  Obtained from environmental sample
  DOMAIN (78)...(196): Phosphoribosyl transferase domain
  misc_feature (1)..(221): Xaa is any amino acid
LNSGGFSFNLGHFWSREEYQLGIVIKSGIMYLDIVLRFNIWFSMNKKKLAIEIYKKAHLTGDFLLRSGQRSNEYFDKYLFEADPKLLVAIIKQMKTLIPKNTELLAGLEMGGIPLVTALSIETGMPSAFVRKAAKEYGTCKIAEGGEISGKKICVIEDVVTTGGQIIKSVQEIRNRGGIVENVLCAIQRNPEASEILAKEGLTLKPVLTMEYIKEAAGKAK

SEQ ID NO: 87991 - protein, 376 aa, Unknown
  Obtained from environmental sample
  DOMAIN (74)...(353): Branched-chain amino acid transport system / permease component
  misc_feature (1)..(376): Xaa is any amino acid
MLKLKKVKPEKLLEVFTGSDALISVAVVVLGFLAATLIIILIGRNPAGMYEAILQVITGIFRSRNNVWGWNPRYIGEWLVASIPLTLCGLSMGFAARAGLFNIGAEGQCIAGLTAAQFIALFFPRIPVLHWVIAVTAAIAAGAAWGGIVGFFKARFKVSEVVATIMMNYIALYFHRIFTLRIPGSNTYKTPDFPATATLASPLLASMTNGSRLNYSLWLTLAAIVFYWVIMEKTRLGYSLRATGLNRDAALYGGINVNVSITAAMGIAGAFAGLAGAAVSLGIFSYGRVLSGMEGYGFDGIAVALVGNSTAWGTALAGLLFGMLKSAQSLMQNRQIPKEITAIIMGLVVVFISLRAGVKLLIDWQLKEKARRPRSE

SEQ ID NO: 87992 - protein, 47 aa, Unknown
  Obtained from environmental sample
  misc_feature (1)..(47): Xaa is any amino acid
LVSFELDEIMGLCDRIAAISKGRIIGILPAAEADERRIGAMMGGIHA

SEQ ID NO: 87993 - protein, 305 aa, Unknown
  Obtained from environmental sample
  DOMAIN (5)...(179): Glycosyl transferase family 2
  misc_feature (1)..(305): Xaa is any amino acid
MSLVSIVIVNWNGAEVLPECLRSLLSLNYKPIEIVIVDNGSTDDSVEIAREICGGDVKIVRLGKNVGFAAGVNIGVENASGEFIATLNNDMAAEPSWLDQPMALLKDKAVGIVSCRQMNYYDRSKVDGLYHCITKEMTLMPFGAGREYCDAELFSKQGYVLSANGGSAIIRAEIFKNLGGYDAEFFGYMEETDFCLRAFLRGWRCAYAPDAVVYHKDGFTFKKNMGRQYYFRERNRVWFIYKNIPAWDIFKRLPYILIMELRVIRVFCVRAKNPFLYLKARFDAFRGLGRYLRIRKENVRLFKEK

SEQ ID NO: 87994 - protein, 153 aa, Unknown
  Obtained from environmental sample
  DOMAIN (35)...(153): Domain of unknown function (DUF323)
  misc_feature (1)..(153): Xaa is any amino acid
MKNKLWVIVILTAFTLSATSCSAQSGGGGTTTSPTGIVMVSIPAGTFIMGSPTSETNRESNETQHSVTLSGFKMSKYQVTQEQYQAVMGSNPSVFSSNPQNLETQGKRPVERVSWYDALVFCNKLSIKEGLTPAYSISGKTNPAEWGTVPTSR

SEQ ID NO: 87995 - protein, 51 aa, Unknown
  Obtained from environmental sample
  misc_feature (1)..(51): Xaa is any amino acid
AGGTLNAARSLLLEGGAEVPEIFGVLGLPFLNYNKVLDPTPVSTLIDYHAE

SEQ ID NO: 87996 - protein, 56 aa, Unknown
  Obtained from environmental sample
  misc_feature (1)..(56): Xaa is any amino acid
EVEARIIALACGEAPKGYARWTLRLLAAKCVELRYSDTMSHMTISTLLKKRNLSLT

SEQ ID NO: 87997 - protein, 301 aa, Unknown
  Obtained from environmental sample
  misc_feature (1)..(301): Xaa is any amino acid
MNKIASIKLPIIALAMVFTISCSSDSEDSEKKQGSGEENLSSSNEQGSSSSSVQSSSSGISHSCPFPTCYECNESSGLCKGYFHTDYPDYPDWPRGCVGLVAPEYDFYYPLPPDGEPLPPDNRRFCVPELDKNSSSSYVQSSSSSINNCTPTSLNASGCITQEIGPHFIDARDGEIYEYVEIGTQTWMKKNLNYDVPNNDTDVCYGKDPANCTKYGRLYNWETARSACPNGWYLPSDEEWQTLVGFAGGSNIAGKKLRAKSGWNNDEGKSGNGTDVYGFSALPGGFCYDVGACSWVGSGGY

SEQ ID NO: 87998 - protein, 565 aa, Unknown
  Obtained from environmental sample
  DOMAIN (287)...(530): Methyl-accepting chemotaxis protein (MCP) signaling domain
  misc_feature (1)..(565): Xaa is any amino acid
MSDPAPFKNMGKDTYAVRIVVPILNKRLNEVVGAVGCQLDIGMIQPRVEQTIKDFEEVTSMVIYSDNGFILGNYLPEFIGKQIDAETQYGPYLNDVKDVIKNSQEWEGTAYDPELKTNMVMAVANIPIGVSPTTWSVMVGSTEAYILKDVNAMRNFVIMLAAIALAAAVGLIYLVLNRTTKPIVKLADTLKDISEGEGDLTHTISVNSKDEIGDLAMYFNKTLEKIRNMIIHIKDEADGLSGIGNDLASNMTETAAAVNQITANIQSIKGRVINQSASVTQTNATMEQVISNINKLNSHVEDQSSNISKASSAIEEMVANVGSVTQTLVRNVDNVNTLKEASEVGRSGLQGVVADIKGIALESEDLLKINAVMKNIASQTNLLSMNAAIEAAHAGEAGNGFAVVADEIRKLAENSSEQSKTIGAVLKKIKGSIDKITHSTETVLNEFEAIDLSVKTVVEQEDNIRNAMEEQGQGSRQILDGVSNVNEITRQVKGGSEEMLEGSKEVINESHNLETVTQEITGGMNEMASGAEQVNIAVHHVNEICAKNREMIGSLMQEVSRFKVA

SEQ ID NO: 87999 - protein, 199 aa, Unknown
  Obtained from environmental sample
  DOMAIN (37)...(199): IPP transferase
  misc_feature (1)..(199): Xaa is any amino acid
MKPLVFVLFGPTASGKTALLRQLFSDKRVEIISADSMQVYRGMDIGTAKPMPEERAKTPHHLIDIRNPDEQFNAGDFVRLAEKACHAALVHGALPVVSGGTGFYIKNLVMGLSEAPPSDKAIRLVLKKELALKGSSSLMEELAKADPVSAARIHINDEYRLLRALEVFRLSGRPLSSYASPWNLPPSAGTTGKSPFRFL

SEQ ID NO: 88000 - protein, 491 aa, Unknown
  Obtained from environmental sample
  DOMAIN (192)...(350): DEAD/DEAH box helicase
  misc_feature (1)..(491): Xaa is any amino acid
MADNPLIVQGDRTLLLDVHAEKAEQARAAIIPFAELEKSPEHIHTYRITPLSLWNAASAGFSPNDIAKALAEYSRYSVPSGIIESFSDTMSRYGKIRMTAAPEPAADNQDMLFLEIADKAVLAEVESIKLLEKYLKKTEKGFLLKLVDRGTVKQALIRQGWPVRDEAPLVSGDSLEITLRGKCLSGKPFAPRDYQVEAAHAVLGDGRPGTGYGVVALPCGSGKTIVGMVIMSLLKTNTLILTTNVAAVHQWIEELADKTEISREQIAEYSGDSKSVAPVTIATYQIITWRPGRDADFPHFRLFRERHWGLIIYDEVHLLPAPVFRVTAELQAVRRLGLTATLVREDGAEDAVFSLVGPKRYDVPWKELEGKGWIAEAVCTEIRIDLPEELKIPYAIASQREKYRIASENPLKEEIVAQLLENHSDDQILVIGQYLSQLDSLAKLLKVPLITGKTPNAQRERIYNDFKRGEIRIIVVSRGCQLCHRSAGRFN

SEQ ID NO: 88001 - protein, 181 aa, Unknown
  Obtained from environmental sample
  DOMAIN (6)...(172): Glycosyl transferase family 2
  misc_feature (1)..(181): Xaa is any amino acid
MCNSLLVVIPTYNEIENIEPLVKEVISNAPNAHILVIDDNSPDGTAAAVEKIAAAQPALHILKRSGKMGGASAFLEGFSWGITNGFDILLAMDADFSHDPKYIPVMIKEIENADLVIGSRNVTGGGIENRSLFRNILTKCGSLYCRVLLKCPIKDFTGGYNMWRKSTLEKIKLQEVVAEVI

SEQ ID NO: 88002 - protein, 302 aa, Unknown
  Obtained from environmental sample
  misc_feature (1)..(302): Xaa is any amino acid
MNLFNKTGFAAARSRALFILGRCAKYGWIDSTEYTQSTAELKEFAVPPKDIRDEASIHAALKYTRMLHSAVGRSSINGKDINDNSINGKNIKGNGINNVSINDIDETDIGDSVVSHGLVVSSIDIDLQRHAQRELADHLDQLKARDVENGAVIVLDKNNRQVLAYVGSGGYFSFNNGMLDYAAIKRSTGSLMKPFIYAQGMEELGYTAATVLKDINYDFGEGARSFIPVNSDRQYQGPILYKYALANSRNIPAVQLMKELGVNKVYGRLGALNLAEDDGRSDYYGLGLSIGGLYCGLTSIAR

SEQ ID NO: 88003 - protein, 484 aa, Unknown
  Obtained from environmental sample
  misc_feature (1)..(484): Xaa is any amino acid
IVFGADLYGIKDTNEENRINSILYKDNGRFNNFYPVTGYDNIREDIQNELKTNGLVFQEVRQSEYKLNAEEPDDMISLYMGMDSRTPIFVTTDLAAHTNHLVFDKLLQYCEEEYFFPKLVTVIDEYINVIEQKKEQIPDAVYDTSILYFQTAKALLALAPKRVVNGESFVYKKVNSANVLSYYPGQVVQEIVQINNASGFGQSAVFPGMDEDYSQYKVRGHYTKNGVLGAYFRALMWFGRINFTLGGENNEAKEAAKKIAPVALLITDITDNSPQIKKLWQSLFDPITELIGASDDISFYELAPLWNRIKGAGFVQWYNDPAKLETFVSKNYKELRAPVISGFSLFEGPHDGGDMPEDRLPPAGWRLFGQRYTMDSEIHNFASSPRLYGRMMVSGLDIMKVFGSKTADRLLKESEYSSQPTLENVLNSLQQSLMKVKDDFWFSTYYSNILYQIKTQALFENGAGFYFTEKPGWNLKAMNSAHGT

SEQ ID NO: 88004 - protein, 509 aa, Unknown
  Obtained from environmental sample
  misc_feature (1)..(509): Xaa is any amino acid
MKQDYSQYKVRGHYDKNGVLGAYFRALMWFGRINFNLGGEDSNVREIAKQYAPVALFITDITESSPEIKKIWQSLFDPITELIGISDDISFYELAPLWNKIKGAGFAGWYKNSAKLETFISKEYKELRTPVVSGYALFEENEGIADVGKKGELLPPVGWRLFGQRYTLDSDIHTKVSAPRVEFRTMVQGLDIMKVFGSKTADRLLKESDYPKYPGDKKPGFEKVLNSIQQNMAKTKDDFWFSTYYSNILFQIKTLALFENGAGFYFTEKPGWNLKAMNSAHGTWAELRHDTILYVKQSYAEMSGGGPDITFRTKPLPSPIHYIEPNVPFWITSAIGIQKLYAVLDKYNFLDGKSAQVLAGLHDIFVKALEISKQEAEDKEISDADLAWIKNVPYQLSHLVIALLSSGSTWVDDPDSLRMALVADVFTNAESRIVLETAVGIPYRLYIPLNDKQGGKRIVIGYGFSYYEFTHPMSDRLNNTQWKAVVYKENPDMKNYLPFWMQGKVSPAK

SEQ ID NO: 88005 - protein, 444 aa, Unknown
  Obtained from environmental sample
  DOMAIN (141)...(207): Elongation factor Tu domain 2
  misc_feature (1)..(444): Xaa is any amino acid
MKAIYFDGDQGTDLRYAEIPSHLKADAEKHREELIDEVSVFSDELAEKFLSGEKIPEDLLRAAIHKGTLAEAFVPVMIGSAYKFKGIQPLLDAVNDFLPNPTEVKNYAYDIDNNEEQRELSPDEKSPTVALGFKLEDGQYGQLTYVRVYQGALKKGEELTNTRSRKRFKVGRLVRMHADSMEDINEGSPGDIVALFGIDCASGDTFCGGGLNYAMTSMFVPNPVISLAISPKDKKSADQMAKALNRFTKEDPTFQTYVDPESNQTIIKGMGELHLEVYIERMRREYKCELDTGMPQVAYRETITQKAEFNYTHKKQTGGAGQFGRVAGYMESYTEGDYEFVDMIKGGSIPTEYVPSCDKGFKEAIKKGSLIGFPIVNIRCVINDGQSHPVDSSDIAFQSAAIGAFREAYNKAKPCILEPIMKVSVEGPTEFQGNIFGSITKDAV

SEQ ID NO: 88006 - protein, 729 aa, Unknown
  Obtained from environmental sample
  DOMAIN (234)...(397): Alpha-2-macroglobulin family N-terminal region
  misc_feature (1)..(729): Xaa is any amino acid
VVPGGTEGAWRYWNFGPESDGERSYVGEGEGTLGPDGKTGISGETGGEGIEGAAYRYRLETSVQDAARQEISSRASVLVHPASFYIAARLDSGTIKTAATGGGAGAASTSSAFFLSAGQPATLSWALVSPNGDLAQNQSGDLSIQLVRHEWKQARQQGSGGRVNLIWERVEEIAAQRNVKISAGNNSGVFNFTPDKSGLWELRLSGRDQKQRIAGTRSHFYVTGSGWVRWGLDDVDAISLTTDRPSYAPGETAKIMVRSPLEKGKYLLTLEREKVISQKIIELNGSALTIDIPIEDSYVPIIYAALSSYTVRSSAAVNNSYYEPDLDKPKGIFGVTPIYIDNESRHYQIEIDTGRNTYRAAEEAQVKIKVLLNGRPAANTEVSFLAVDRGVVDLIDYHVPDPLASFYAPWHFPLGVRGADSRSLLIDPVTYNISDLQGGDSDDDGKGDDAARGFSDDMKERKDWRPTAVFEPYLVTGQDGTVTVKFKLPDSLTSYRCTALAVGVNNFGIKEQDLRVSAPLTAIAALPRKLRWRDTGTVSLILTNLENTAVEASVTLGSDSFADADAVIEIDGETSKTVKVLPGASQEVSFKVAAVSTGLARLTFTLNSPEVNERIIRTLLVDRPSLTETVTTIGNLSPDNPFAEEGFVLPSLVPEGTGNISVSLSASRLAALKEAVRYLLDYPYGCIEQRTARLLPIVAFGEYLDTFALDSPLRNFSPWNPQKLVEDEL

SEQ ID NO: 88007 - protein, 498 aa, Unknown
  Obtained from environmental sample
  misc_feature (1)..(498): Xaa is any amino acid
GTVSLILTNLENAAVEAGVTLASSSESSAGADAVIEVDGADSKTVKVLPGASQEVTFKVAAIGTGLAQLTFTLRSPEVNERIIKTLLVDRPSLTETVTTIGNLGPEKLFFEEGMILPSLVPEGTGNVSVSLSASRLATLKEAVRYLLDYPYGCIEQRTARLLPITAFGEYLDTFNLDSPLAAFGGRPDIIDPAGSTRGLSAWDPKKLVEKELAELARFQLADGSFPYWPGGSYGSLFVSIRMAHIAALAKAKGMKVPDSLDTRKLLAYIGIETNNVKNNVNFMDPFLKGYSLWVRTMYNEKISSEITAFLKRGDELGISGWAFAGLAALEMGQKDLAVSAGDRVRRFIRPGTRSLDLTDTYERQGNYWGYDIDRYALALMLFHSLNSQGDDMTTRLATSLIERQRRGVWNNTASSFWAALAFGMLGDSESSEWKTADGSPLTVKTSLAGAPLFNAEFKTYGGVPVSYNGHFTEKPIIDLARDTVLPLRIERSGPGRLY

SEQ ID NO: 88008 - protein, 425 aa, Unknown
  Obtained from environmental sample
  DOMAIN (1)...(161): ATPase family associated with various cellular activities (AAA)
  misc_feature (1)..(425): Xaa is any amino acid
MSGSDFVEMFVGVGASRVRDLSETGKKNAPCILFIDEIDAVGRQRGAGLGGGHDEREQTLNQLLVEMDGFAPNEGVILVAATNRPDVLDKALLRPGRFDRQVVVGLPDLVGREAILRVHLEKRKVPLDKEVNVKDIAKGTPGLAGADLENLVNEAALMAARFGNPTVTQLDFEEARDKLWMGAERKSLLMSEEDRRMTACHEAGHALINLLCKNADPLHKLTIIPRGRALGVTLSLPEKDKVSMSKEAAEDQIAILMAGRLAQMMVFNKQDTGASNDIARATELARKMVTEWGFCDKLGPIAYSKNNDEIFLGREISKPKEMSEKTAEMIDDAVNDIIQTQVNRVSEILLENRDKLDALSEALFEHEVLNREEIDKVIAGQSLASTQKSRQYQQRKERETETQKKVEPPPEPNLDEKGSKIDKEA

SEQ ID NO: 88009 - protein, 335 aa, Unknown
  Obtained from environmental sample
  DOMAIN (130)...(335): Methyl-accepting chemotaxis protein (MCP) signaling domain
  misc_feature (1)..(335): Xaa is any amino acid
VYFTLNSTTKPIVKVAETLKDISEGEGDLTRSIVVRSKDEVGDLANCFNKTLEKIKGLIIIIKNEGQSLSSIGNDLASNMTETAAAINEITANIQSIKGRVINQSASVTETNATMEQVIININKLNGHVEQQSQNVSQASSAIEEMVANISSVTNTLINNSANVKTLQEASEVGRTGLQEVASDIQEISRESEGLLEINAVMENIASQTNLLSMNAAIEAAHAGEAGKGFAVVADEIRKLAESSSEQSKTIGTVLKKIAESIKKITESTDNVLKRFEAIDSGVKTVSQQEENVRNAMEEQGQGSKQVLQSVGDLNDLTRQVKSGSEEMLSGSQEV

SEQ ID NO: 88010 - protein, 563 aa, Unknown
  Obtained from environmental sample
  DOMAIN (12)...(75): Putative carbohydrate binding domain
  misc_feature (1)..(563): Xaa is any amino acid
MSNKSPEFAKNATFGRFDDSAREYVITDPQTPYPWINYLGNQDFFSLISNTAGGYCFYKDARLRRITRYRYNSVPVDTNGRYFYINDGGDVWSPGWKPVKADVSNYSCRHGMGYTVISGARNGITAEALFFVPLNFNGEVHRVKLTNTSKGAKKFTLFSMVEFCLWNAQDDSTNFQRNFSIGEVEIDGSRIYHKTEYRERRNHYAVWAVNVPVEGFDTDRQAFLGLYNGFDHPQVVFEGKARNSVASGWAPIGSHHIKTELGPGESGTFVFVLGYCENPEDQKWERVVPGGNHGIINKKPANTLLAKYGTAEAADKAFAALNEYWKNLLGRFTVEAEDKKMARMAGVWNQYQCMVTFNMSRSASYFESGIGRGMGFRDSNQDLLGFVHLVPERARMRILDIAATQFPDGSAYHQYQPLTKRGNNEIGSGFNDDPLWLICGVAAYIKETGDYSILDEKVPFDNDESLADTLFVHLKRSFDYTVTHKGPHGLPLIGRADWNDCLNLNCFSKTPGESFQTTANFESGVAESVLIAAIFAFTGPDYVEICKRTKRNDEAQYAEKARR

SEQ ID NO: 88011 - protein, 689 aa, Unknown
  Obtained from environmental sample
  misc_feature (1)..(689): Xaa is any amino acid
MTSRVQENMNRVRDESAFVEATGKRISEVKNKLAEFEKELVNAGKKCEKDLEDIEKKFEKENADSLEKAADAVMAGVKSTVSDLRATEEVIERKVEEHRLAVIKIEEARAANLARDTDYVDKLLAKAVEQAGKRADKMEEAAVAKLKEQAEERILKLKTAEEERLRSFQESAKARILEVQALVKSIREDWRSERSDWESKDKAVRDERKKDLEVFASMFDASKKQIEEFSAQVNSIITSQKALLLKESEEVKQTLVKNIREEWQTERNEWETKDKAIRDERKKDMEVFAAMFNASKKQIEDFSGRVNELISSQEAMFLKVSEETKQALVKNFQDEWRAERSEWETKDKAIRDERKKDMEVFAAMFNASKKQTEDFSTRVNEIIKSQEAMFLKVSEETKQALVKNVQEEWRAERNEWETKDKAIRDERKKDMEVFAAMLNASKKQIDDFSTRINEIIGSQEALLLKAAEEMKQKALEVNAAKLEEYHRAQDIEFRRLEALADDSRKLDTELRHYIQELIGQLKEEFSGYQAEAEELRKAETENFSLTAARLNEEMTQIEKDLADLKATTHENMTGELKTFENEFLADLTKRNNDIGLRITEWQGDLEKRLSMISENSETALRKLEHDQAEEMKKTLAAMDARLASELERLKSKTGAFEEGIMGQIKAADDSVSSFKEQLDRGLEDTRKEA

SEQ ID NO: 88012 - protein, 286 aa, Unknown
  Obtained from environmental sample
  misc_feature (1)..(286): Xaa is any amino acid
ILDGEGRTLILRGVNLGGSSKNPFGPADGLPGGPLGWGLRPESLKNPAEVSFVGRPFPLNEAESHFERLSRAGFTFLRFIITWEALEHNGPGQYDEAFLAYLRKILLIAEEKGISVFLDPHQDVWSRWTGGDGAPAWTLEKLGIDLEKLDTTGAALTRQRYAEFHGGAAFPRMAWPGNYNRYAAATMFSLFFGGKIFAPGLNIDGENVQDWLQSRYIAAFRHCYRRLKNCAAIAGWGVMNEPHNGFIGHGDLTQAENPVLPAGPRPSPWDAIRAAFRLRDNSARIQ

SEQ ID NO: 88013 - protein, 302 aa, Unknown
  Obtained from environmental sample
  DOMAIN (8)...(197): Domain of unknown function DUF21
  misc_feature (1)..(302): Xaa is any amino acid
LDGDGVTAIIVYMIVAFILSAFFSVIKIIFASVEKCGVSADDERLRYYVSKVGEILRNRAALSDTVTVGKTLCNVSFAVLSLKLHAIFAFDLYGDSLPPQALWIVPIVFSFVVLVLFAHYIPRAFALRFYRGALRPAYYIYSLLSWLLRPLSWLFSAVHSAALRMLKYNVKLSFLSEEDKARITSDNNVSEALDEEDREMIRGIFDLSETTVDEIMVPRINVIAAESHSDLQSILKLIMEVGHSRIPIYKDTIDQITGILYVKDIFPWISEHAPADWNLDTIVKKCHYVPMGKKVKELMKES

SEQ ID NO: 88014 - protein, 925 aa, Unknown
  Obtained from environmental sample
  misc_feature (1)..(925): Xaa is any amino acid
MNTGVPGRVVTTTAGGTGPVTAAMTAFSNRNATITGGAASEETPTAIAITGAGGTSGSIYVPQKAGTETSWNAAYVREIDQATGQPANKMLWSPVKSLNYDVKWQFTLDSTKLPDGPLTLHYVVEDEAGNASYYTQPAITVKNRYPEITKLTLYTDNNGKGAAFTKDDTIEYDLNDYRAKMFYNYTDTADNNPVNGIRKSDTTGYLNSGFISKNRYIGFKVETEKGNRDLNFRLQYVTRQRLILNKATLDDMVKDKAANDPTKINLYTIAWHGDYSNAKWKALGVPVDNPMLGTHFVFNPVNTVDPSKDFDTDAAAGTAEVWKYTQVASVKKGDFTPTGQPTDDAVVFGPDNPGVPDVPANKFDFSGNTYFNTNPLLGISELMGSHPDYDDTTPDNPKTTAFFLIRVWDTVNPPPNNASEAWVNEQLYDALVVGMNVYLNDKTPPTVRLYDLNPYTETAVIEGNKEQTRKDAANPQAIGSNIVRGGLYNDGSARAMVRSGFIDPRGSSTALDPKNGVYFQDVTPSSPWQLIDGAEPPASNLKVEGDAVGTGTTPDKVSGKIILRGLAWDDQLVKTITLDLNGASTPILQLDETSPAGSATRGKMVATAGNENKAFVVEELHWKTGHSVEWAYIWDTSAISPGNATVTVSATDRNGPLSSGAAITVDDETSDPSTSKKFHSKVTVTIVPYITGFERDAKFVTKRSLQGWYSFYQGETSIKVKGYNFGTGGTNSISLNGIDVGTVTVNSATERTFSIPGGGASGAINMTANSVAAYNNYTDIANVIDYIKTRSWNREFSAYTPGSDLWINRHYAHIWRTTVTDGSSPNTYIGTSTSSSGLDHPGMALEYTGSGAPLHGTWGVYGNANSYYGTNTGISNALHSGTPGEPFITPDISIFSGGGTDAANIGYTFQADGKAQILVRARVTT

SEQ ID NO: 88015 - protein, 168 aa, Unknown
  Obtained from environmental sample
  misc_feature (1)..(168): Xaa is any amino acid
LSYGKTTGNTRCFCSGGQGRWVKYPLSFAEFLNACGEALLWKEVCASNPDKPLFEPFHEKCLEYLKKFLLLGGMPAVVVKYTENKNILECQKILNDLIISLKSDFSKYKKRVPNLHILTAFEAVVNQSGNRFNYSKVEQLNYRQLKDSLELLQKAWIGYSCCAFFFKW

SEQ ID NO: 88016 - protein, 85 aa, Unknown
  Obtained from environmental sample
  misc_feature (1)..(85): Xaa is any amino acid
MTYEIYFSADFDENIEKFSASEKKVIYNKLDILKDNLDHPSLRTEKLFKGTKNEIRSSSVSMGVRLIWKLEENIIYIKDVGGHDI

SEQ ID NO: 88017 - protein, 498 aa, Unknown
  Obtained from environmental sample
  DOMAIN (329)...(458): HD domain
  misc_feature (1)..(498): Xaa is any amino acid
MSSTPELVVDEEKIKKAIQSGLPLTITTYTHPKEIEIYIEQVIDSFLKHMNQTKLKDYIVYCVQELVVNAKKANTKRVYFAERGLDINNDGDYLLGMRDFKEDTIGNIAHYLQLQKEKGLYIKIILQVKRNTINIEIRNNVSANKLEQLRIQDKMARSRQFNTLEDALSQVLDDSEGAGLGLVILVLMLRKIGLDDDAFTIKTKNNCTIASISIPLDKTMIENMSALSAEIVENVNSLPQFPENVLLIQKLINDPASDMPMIARQISMDPALTADLLKIVNSAQYMLSKKTDNISDAVKMIGIKGIKNLLYSYGTQKILGDDTVEKKRLWEHSYKTAFYAFNLVKNFKNVSGLLDDVYIGGMLHDMGKIVFSNVHPDLLNKIKGFCGEKSLPISAFEDLSAGMNHAELGALIAEKWNFPDKLVAAIRYHHDPDAAPFDCKNMVDTVYLANMFCEYENKNISYDQLEQGPLDNYGLKHQKQFDSLLQRLSAGFTKEGQF

SEQ ID NO: 88018 - protein, 287 aa, Unknown
  Obtained from environmental sample
  DOMAIN (1)...(267): Bacterial extracellular solute-binding protein, family 7
  misc_feature (1)..(287): Xaa is any amino acid
MASDWEKATNNSVRVVVSHDGREGDEAKMISSLYSNAIQVGVFTSAGMADICPAVMNLSIPFMIKNETELDLVLNDMLPLISNRVKKDFVVLAWSKGGWVYIFSKEKVLTPDDLRKQRLSTSPELRDMNTVFRTMGFQLVETDFTNMGTKLASNAINAIYIIPAGVAPLGLHKNLSHMLDVPIAPILGAIVMNRVTWNKISSENQQKIVEATKKIALEFDASVLKTEANAITAMGKDGLTINKPNQAQQDMWSNEVKNTMPSLVGSIFDRDLFNRLNNILEKARSGK

SEQ ID NO: 88019 - protein, 370 aa, Unknown
  Obtained from environmental sample
  DOMAIN (152)...(337): ATPase family associated with various cellular activities (AAA)
  misc_feature (1)..(370): Xaa is any amino acid
MSYGLNEDDIVLLCLFCHLYSENGDDHIRFHDFYYLYDDKTEAKYVKRDLSDGSHILIENKYIEFVNNNGFVNNEAWKLSDMAKKELLCELNIEKKSFHKNIIFHNTIQSKKLFYNEKESESIQKLISLLKEENYRKVQGRLSENGMRKGFACLFSGTPGTGKTETAYQIARETGRNIMMIDISNTKSCWFGESEKKIKTIFRNYRHAVDNSKLAPILLLNEADAVIGKRKVYSGSRGSVDQTENAIQNIILQEIENLVGILIATTNLTQNMDNAFERRFLYKIEFTKPCLEARQSIWQSMMPSLSAAETEKLASRYDLSGGQIENIARKAEVDFVINGGCVSMDALSRHCSEEIAGQFNTSKRIGFANE

SEQ ID NO: 88020 - protein, 344 aa, Unknown
  Obtained from environmental sample
  misc_feature (1)..(344): Xaa is any amino acid
MSDLGITGLYDIMDAMSKDKKPRRKTMPKAALARLCFIDEQIASGNYPSTAWLAENCGNASLSTIGRDISFMKNILNAPIKYDMRKRGFYYSKPKYRVPLGFYGGDELLAMGMVKALLVMYKDTPIYDTAYNQLKNITTPVDSKGNSDWYENRIVVPPPPSTPVEPDMWEAIITALRENRILAFDSKDNGDRTYRNYRFCPYQLLFDNGLWYLYGQELDKNNSRIFALSSMKNVLLAKGTFRLPKNFDYRDIFGSSCFGVSAGVGMKKYKFKIAFDGASADWVKERKWADDQEITETDNGVIITFTSSHFDKVVEWMLSRGCQACPLEPKGLVDLWQINIKGLK

SEQ ID NO: 88021 - protein, 96 aa, Unknown
  Obtained from environmental sample
  misc_feature (1)..(96): Xaa is any amino acid
LKKRAAFFVALRYLWGRANEGGRYLRGAAAGIAVSLVPIIVTLIVADGMIRGITDRYIELGTGHLQVFGAFTGEYEGIIEEIKDYEGVKGVWPEIR

SEQ ID NO: 88022 - protein, 129 aa, Unknown
  Obtained from environmental sample
  DOMAIN (17)...(122): Protein of unknown function (DUF1312)
  misc_feature (1)..(129): Xaa is any amino acid
MTKTKGEIPVKLWDMVIILLALCMTGFSFFSAYIKPQNSPYVMIEGQNQKWIFPLDAEETVNVRGPLGTTVVRIYGSQAWVESSPCDNKICVGAGHLNSNGEFAACFPNNVLVVIEGNDAPGKIDGVSR

SEQ ID NO: 88023 - protein, 133 aa, Unknown
  Obtained from environmental sample
  misc_feature (1)..(133): Xaa is any amino acid
MFSGSAELAKIALRNLARHKVKTVLTVLAITVSSAFYIFVDSWIAGMSIESRRNIVNYEMGAAKIQTKLYFEKKDELPSYENFANWEIYKEILDKAGYYAAPRFVFSGTLYSEGASAPVTFNAVDPMRISGFA

SEQ ID NO: 88024 - protein, 408 aa, Unknown
  Obtained from environmental sample
  DOMAIN (132)...(348): ATPase family associated with various cellular activities (AAA)
  misc_feature (1)..(408): Xaa is any amino acid
LPDKAIDVIDEAGSYARIEAYMKEEKEFAELFGNKNGEFSAEPTGREAKAHTVQEGSVEKIEIGLPLIETVVSKIARIPERSVGGNEKDRLRLLEDRIKERIFGQDQAVNAVVKAVKRSRAGFRDDNKPVANFLFVGPTGVGKTELARSLAETMGITMHRFDMSEYQEKHTVSRLVGAPPGYVGYEEGGLLTDAIRKQPHAVVLLDEIEKAHSDIYNILLQIMDYATLTDNNGRKADFRHVILIMTSNAGARDIGKSLIGFGERIEDETVVDDAVEKIFTPEFRNRLDAIVRFGHLSKEIMTSIVNKELKTFRAQLAEKKVTLEVSEACVNQLAIEGYSRESGARNVGRLIEDRIKSFFVDEVLFGRLESGGHASADYVDGEYIIEIVDSSRREEDETELGVCQASSN

SEQ ID NO: 88025 - protein, 479 aa, Unknown
  Obtained from environmental sample
  DOMAIN (99)...(328): Type III restriction enzyme, res subunit
  misc_feature (1)..(479): Xaa is any amino acid
MAKIIDQLIINSPYEEPKEHWSFNPDTQTFDRVQGRRSAGYFVAGQGGNQYNDQGEFISLPLVNEIRKRVKLWRNNNYQGITSVTRKLIEHWYLNDVRRFPFFFCQLDAIETIIWLAEAPETEKNGLDIQGDGGAFNRICTKLCTGGGKTTVMAMLIAWQICNKVSYPQDKRFSKNVFIVAPGLTVKERLQVLLTGGGNNYYIEFNVVPASLLDKLYQGKVVINNWQTLAWDSVEDLTKKKSVDKRGPKSDEAYAREVLGDIANSQNILVINDEAHHAWRRNPEIKEKMTKEYKEAEKEATIWVSGLDRIHNARKILTCYDFSATPFAPSGKKNDSEALFTWIVSDFGLNDGIESGLVKTPRIVVRDDNTPDAKNFRSKLYHIYADNDVKDNINQSAKPEIPLPDLVIQAYNLLGADWLETYTAWKKDGSDVPPVMITVANRTETAARASPFFIRNRRKRIIQTRICEYFWHTIFIFTA

SEQ ID NO: 88026 - protein, 296 aa, Unknown
  Obtained from environmental sample
  DOMAIN (1)...(83): Homoserine dehydrogenase, NAD binding domain
  misc_feature (1)..(296): Xaa is any amino acid
RRGTCSLQAKGYKGFTDANELLEDDTISVICELAGGYELPFKWITKAIEHGKHVVTANKALLAKHGSEIFPIAGEKRCHILFEAAVGGGIPIIRTLQEALVGNKINSLSCIINGTCNYILTRMTAEGLSFEEVLKDAQRLGFAEANPSFDIDGIDAAHKTAILASLCSGRFVDFEKIHITGISGITAQDIKFVDELGGVVRLLGLYNKLGDSVDVRVHPCIVPSEHLLASVKYVLNAVYLQCDNLGPTLQTGAGAGRLPTASAVVADLVSLARSSETGHIEPLPMGWFQKENSATL

SEQ ID NO: 88027 - protein, 95 aa, Unknown
  Obtained from environmental sample
  misc_feature (1)..(95): Xaa is any amino acid
IILADTKFEFGEIDGKTVLIDEILTPDSSRYWSAEKYQEGQNQESFDKQYIRDWLETLDWNKEYPGPEVPPNVVKNTVDKYVEIFVRLTGRQPEI

SEQ ID NO: 88028 - protein, 350 aa, Unknown
  Obtained from environmental sample
  DOMAIN (183)...(343): Glycosyl transferases group 1
  misc_feature (1)..(350): Xaa is any amino acid
MSYKKKVLINGDFLCRRLTGIERYAYEITRRLDNLCAKDEIAIVIPSFVENIPNYKNLEIIRLEKKSKSNIRWQMFTLQGFLLTHRKYTILEFGNCCLPLAPGIVFLHDIYCEFFPEDFVSRRDRFSRLYSRIQYRFIARLAKRIATVSEYSKKEISETFKIDPSKINVIYSSADHIRDIASDSSIFDKFPALAEKPFYFSLGSLSKRKNIKWILEYAVKHPELNFAISGTSLSTVKVNELDNGIPKNIILLGYLDDSKVKALMTRCKAFILPSYYEGFGLTPLEALLCGAQIIIARAASLPEIYGNTAHYIDPFNADVDLDALLREPVEKPDAILAKYSYDTSAEKYII

SEQ ID NO: 88029 - protein, 307 aa, Unknown
  Obtained from environmental sample
  DOMAIN (17)...(301): Omptin family
  misc_feature (1)..(307): Xaa is any amino acid
MKNIAVLSVLVIILSVNSYAERNYCFSLGPQFGFVFGQAREIVYSLPEDTKNEFLSELIWDMKPVFYYGIQADFSRIDPMKAPGFFSSLSFKYGIPADSGVMEDRDWLWHANSDLTSFSSHTNKTDIFIQLDAAVGASFPTNNILFKLFIGGSWMRFAFTGRDGYGIYNDFYPKEQNFSGDTVISYQQDWLLLAMGFSAGTNFYPFSFDMSFKISPLTYCAAIDNHIKRDVIFRDFTGLGLFLEPSFNMSFSVKPLELSLGINYRNIGKTRGESYINANNSGFNLDSHEAGAGLSMLDSRFIVSIRL

SEQ ID NO: 88030 - protein, 104 aa, Unknown
  Obtained from environmental sample
  misc_feature (1)..(104): Xaa is any amino acid
NNLDWEGVYKGTIPSAGGSGINVTMKLSKEQSFEMSYEYIDKGSESFTWTGNFKWDDTGNIIILDTKDSPNYYKVGENKLIQMDMQGKPIKSKFADDYVLKKVL

SEQ ID NO: 88031 - protein, 263 aa, Unknown
  Obtained from environmental sample
  DOMAIN (5)...(232): CobQ/CobB/MinD/ParA nucleotide binding domain
  misc_feature (1)..(263): Xaa is any amino acid
MARTIAICNQKGGVGKTTTAVNLAVCLAALEKKTLLIDIDPQANTSQSTGINETLDEDIYEALILTENLEQATVERLSRIIKPVNPEFKLNCLSILPSSPGLAKLEMELVNAVNRERRLQRVIKTVEVNYEYIIIDAPPSLNLLTINTLTAANSVVVPVQCEYFSLQGVAELLNTIKLVQSNLNQNLKIEGALLTMYDTRNSLSKQVAEEVRGNFPGRVFNSIIPRNVKLAEAPSHGKPILLYDIQSAGSQAYMKLAEEIWRL

SEQ ID NO: 88032 - protein, 90 aa, Unknown
  Obtained from environmental sample
  misc_feature (1)..(90): Xaa is any amino acid
NAPVEWGIYRNIPFAILGFIIIIIWFRMTKKTNDRVFRFLWLAVLLSFAFYIPVVLWADTYPIIGMLMLPKTCAYVWIVWMGFRSKGKNA

SEQ ID NO: 88033 - protein, 88 aa, Unknown
  Obtained from environmental sample
  misc_feature (1)..(88): Xaa is any amino acid
MSANPARILGLEERGRIAKGLRADLVIADTGANWIVEPERFKSRGKCSPFAGRTLRGKILMTLNAGKIVYGGDGVSKGDGVSKGGVIV

SEQ ID NO: 88034 - protein, 288 aa, Unknown
  Obtained from environmental sample
  misc_feature (1)..(288): Xaa is any amino acid
DEKIALTGDELDNILNTANFTEELGSDEGIGNQLSLDTPPVEQADIISEKSDESVDINFDDELPELSEAPKVEDKSESAPDEFISMDLTTDLEESPELAALREEGASPITTVPEDTSYLEEDLLASGEIDDLSGAVTDEPDLSAVMENPVSEPSIDNISIDLEMEEPALESTVPDGFVPETEETMEIPAAGIPDLPSGENDDLSFADFPFEDTAPKEDVSSDEAIPVGDSTPAPAYNAEESTGIPSNLKQELKIVLSYMDQLLESLPEDKIEEFAKSEYFDTYKKLLK

SEQ ID NO: 88035 - protein, 288 aa, Unknown
  Obtained from environmental sample
  misc_feature (1)..(288): Xaa is any amino acid
DSDSRVIEQLRQEPDMGLDQRRDMVDLKEREADEASQQAAITRDAVREEEERIAREREAAQQQQQQAEAEQRQIAQERQQPGADQQALDAREQEAQRQEQEAQQALEQLDQDQEAVEAQKQEAESQEAFAEQKASEAQEDRQQIADDQQAIIRQEAPPAQSAGVLGFSLLNPDQYLGRLVKLDPTTGAENRRSPITTVNGRTVILVNSRIFAIAGENRGDGAIRIVEINPDTLEMLKQGDDDISPDSLLWINGQDLYAITGTPDNCILPGHLDLVKQASSAIAVNPHA

SEQ ID NO: 88036 - protein, 292 aa, Unknown
  Obtained from environmental sample
  DOMAIN (27)...(292): Beta-eliminating lyase
  misc_feature (1)..(292): Xaa is any amino acid
MKERRVYVDYNATTPLRSEVKDAIVSDLDIYGNASSLHTSGRQARARVEEARRAVGLLLGADPASIIFTSGGSESNNAVFQTMRQLQSDRSEFITTQIEHPCVLNSAEFTKKQGFKVHFIPVDEYGKIKMEALKAALSEKTLLVSVMMANNEIGTIQDVKEITRLAKEAGAYCHTDAVQALGKIPVNVKDLGVDYLTVSAHKIYGPKGIGALYIKKGAPFLPLIHGGHQEEGLRAGTYNNLGILGFGKAAELAMRDLDEYRKKTSTLRVKLKDGLSNKNPDIKFHGHPVDVL

SEQ ID NO: 88037 - protein, 264 aa, Unknown
  Obtained from environmental sample
  misc_feature (1)..(264): Xaa is any amino acid
MVNLDLYSIEVRERRLRSVISYNGTAQDLAEKSKTKSLSIEERSFGQCSDCSQGCAQVLSYTVRGAAVVDHSPIGCSAPAPTLLTVNVSNRARGSEPQSVNVLSTNITEEDTVYGGIEKLNKTVREAKRRFNPTAIFVQSSCAAGIIGDDIESATDNLQKELGIPVIPVFCEGFKSRIWSTGFDASFHGILRKIVKEPRKKQGDLVTVFNFEGTDTFTSLLAPLGLRVNYVVPLAGIEQLEQLSEAACTAHICETLATYPAKAL

SEQ ID NO: 88038 - protein, 293 aa, Unknown
  Obtained from environmental sample
  misc_feature (1)..(293): Xaa is any amino acid
MRKLILTTAAVAAAIGLAGCGRTPTSESVPETPNTLTDSRDGQTYRTVKIGNQTWMAENMNYRTKRGSWLYDGLCESDSLSYYKTYGRAFDKKYGRVYDWKRAKKVCPAGWKLPDTADWNMLVKTVGGKMAAKKLKAKNSWNNWEEGSDTNGTDDFGFSALPGGGCVPNGYFEIMDDFGRWWTATKYTNVPEAGEWRRMNNFAYFRGMNEFDDMVMPGVGYSYRDKITELIDEMSTGYSVRCVQKSRTERRDNMRRRVRTKAAANRLNKYQPITYDTLTDERDGKTYKTIVIG

SEQ ID NO: 88039 - protein, 225 aa, Unknown
  Obtained from environmental sample
  DOMAIN (77)...(111): Gram-negative bacterial tonB protein
  misc_feature (1)..(225): Xaa is any amino acid
MQIKKPFKHIALIAAITAILAPRPALSQNAAAPAVTATSEAVIDLSDDAPIELMEEIEYLDPEGALEKMPALTRFVEAKYPDSLIKSGIEGAVLLELLVSETGAVDSAAVVRPLHPALDASALTAARQFKFSPAQAKGGEFVAVMLQYEYRFSLRDVITAPKSYVNLSGTVVERGTRRPVADALVVLQFVDTLSDTALSVPFSLYMEQINNIEGQSWEDSRLAVT

SEQ ID NO: 88040 - protein, 319 aa, Unknown
  Obtained from environmental sample
  DOMAIN (199)...(231): Ankyrin repeat
  misc_feature (1)..(319): Xaa is any amino acid
MDTAIILACQNNEKKQIETLLQKSREDLNYQDILGNTALHYLCMGDNVDIELVEILIVAGAKVEAENNQGVTPLHVAAAHGTIPLVKLLLEKGAFINAEDIEEKTPLIYAINGGQEGIAEYLISTGADKYSRTTKGLSPMDFAKAAEMDTLFPFFDSRFPWVDEKGNSSLHNAALQNSIGTVESLLSTDKSGIDVRNNDGFTPLLISISRLNFAISDILLQFGANPNLPRLKDGDAPLHIAAENGFNWLGKSLLDHGANINIRNQEGLTPLMLAIQGQHREFISMLIRRGAALGISDHKGKSARDYAWECGYVELGHLL

SEQ ID NO: 88041 - protein, 113 aa, Unknown
  Obtained from environmental sample
  misc_feature (1)..(113): Xaa is any amino acid
MELETERLFIKLLTLSQLKLWVNDISMLEIELDCKCDKGPIDEFFSNIINNQIKIIKNDPENYVYHSFWFIIRKADKRAVGSIDYKNIPNEKKEVEIGYGLEKQFEHNGYMTE

SEQ ID NO: 88042 - protein, 81 aa, Unknown
  Obtained from environmental sample
  misc_feature (1)..(81): Xaa is any amino acid
MDTITVCMGSSCFGKGNSSNAGFITGFIEKHNLQDSIEVSGCLCSGACARGPNIKINDKLISGISEQTVADIIEKELGLKL

SEQ ID NO: 88043 - protein, 560 aa, Unknown
  Obtained from environmental sample
  DOMAIN (407)...(438): Putative Fe-S cluster
  misc_feature (1)..(560): Xaa is any amino acid
MTAPALNAAKKAPVYTELAKCQDCYKCIRKCPVKSIKVEKGQASILFDRCIYCGRCVVNCSARAKHYRHDTDKVKLLLADGRKTIVSLAPSFVSEFTDWKPEELIAALKKLGFAAVSETALGADFLSARIARDLAPLAASRAATGKPPLMISSACPAIVDYIQLYAPILAPYISPHASPLLTHARFLRSHYESEGGEKIAVVFIGPCIAKKHEADLRNTEIDAAITFTELRRWLDKEGVTPQTISFSMSHSAVADCKFEPRRSAKGAFFPLEGGEIKAFSAYVAEAAKAERGYIHTISASGFPAVRRILEGFDPAALDEPVFLELLACPSGCVTGPGMSGAVPGVIRHTRLWDYARSADDTLDADTLSRLPLVDADYPTSILMDAPHTEQEISEALLGVGKYSLAGRLNCSSCGYDTCRDFAIGLLDGRAEKSMCASYMRELANKTANGLIKAIPNGVVIVDRDLKIIDCNIQFARLMGSEIEELFAISPGLEGADLRKVSPFPQYFQTIIDLSGPELAQADVREGSKIFHLTVFAVEKGVTAAGVVEDITAPRVRIETT

SEQ ID NO: 88044 - protein, 244 aa, Unknown
  Obtained from environmental sample
  DOMAIN (38)...(135): S1 RNA binding domain
  misc_feature (1)..(244): Xaa is any amino acid
MIKKILFNATSAEKRAALLENDKVVELVVERPDYFRLVGNIYRGKVVSILPGLQAAFVDIGLDKCAFLHASDVDPSLLLEEDEMMDRFAGRGARNAKSRKVPRIPIEKVLTKGQEILVQVAKEPIRTKGAKVTTQISLAGRFLVLVPDTDFIGVSKKTSDSARRSKLKKLISQIKPPGIGFIVRTNGLKVSETEFVNEIHILLDAWRKTQEEALSGSGTKLVHRELGITTRVIRDLFSEDVTEV

SEQ ID NO: 88045 - protein, 1081 aa, Unknown
  Obtained from environmental sample
  misc_feature (1)..(1081): Xaa is any amino acid
ENIDGDGIPRIGVVEKYVTYEIDLDIDASQYIDKTARVVSENGWRFYRIPLKDVLDGISVIKDSTGAPDWAKARGMRLVWYDFDERTLTSENELIIAGVELSGNYWEPSAGSEAKVDATSISNYEDIVYYNSVYGSIVKPKSGEVTPEEKSLRLNFYKLESNETVTVRRNQVGNPQNISGYDSMTIKVYSMASYGEDLKFVFRFGSDDSTYYEYAAPINWGTGWKTLAFSLQEFSDLKLAADKEGKPIDTANGRLRVVAPAGKRPNFTAVTFMAIGVARGSAGPAESEIWVNELIATGGRVLAGFAARVNIATQWADFLTLGAGVSFTGGDFKTMTDETLGGADRSELSANLNAVMKLDKFMPEEWGVSIPVGGSISGALSRPTVKPQSDIRLLNDEGDPDGFLDMANDAFSMMLGGEPGGGRTRAQRFETFASTRNAYTSFEKTSESKNPLVGFTLDRIKTDVSYNQTASYTGKGPHEHPDSADYIKTDTTITYAGALHYDLSPRDPPSWTSYAPFEGVKWVPAIHQKYTLNLLPSTINFDVAEIQHRTEKRNDPRLNVYDFTTRTFDMRHGMNVEYSPVDPLLTLGYALRLDRDLANLPTDDWDLMMDSTFANIFGLNTTEGEKWDTYGVLYGERGRTQSASAKLTPQFVKWMTHSAEYSADYTGLATRRDNDSTRYLNASVSTALKFRTSLLLNDLFKPAKAKTAAPKDTTNGKDSTSKAPSIGLWTLIGNGVSKINMRTINFEYDAATDLKNGFLSSTYLADTAGMSNYDFIRYQMGLRRGINDYLFGTLGEEALGQMQYRLLTGVENDLYRNDQSKGSWAARFSTAFSIPDPFKVDITGVSFGWGREFNGQPDTTYIDTVVILPEVRAGANTKALTKLSLVKKYFTDLSASSSFNFKNSRKESKDRTDTTITIDLQPLLSLEGKLVKWPSLTANYRFGTTNTTVNAGGKDAESGTTERLSTENTNRNSHTLTMVYAFTGAGSLKEIRLRKWTIPIQGKTTIGLGVNWENSVIRTNKIGNDEDVVTKESNFNYSPYIDYIFTKNIKGQARYLGSHKNQDGKRTLNQRFELTAEVTFQ

SEQ ID NO: 88046 - protein, 1491 aa, Unknown
  Obtained from environmental sample
  misc_feature (1)..(1491): Xaa is any amino acid
VSQSGGSPFTSSNPAILKNNGKMFSDTTAIDFEKRQLTFTRQDKDGNIVQSYHYGELNDYINDSKAHSFYEEWYNKLTEQAKQELGEPPAPKLQWELSVHYPPWAQRLLGNDPPKFAFECNLRLTVAYDYTRVIVDKDTTVDFIPLDFEPEYEVAIHGSVGRLISVNISHSRKNGFDLSEDPLKNFKVEYKESFEGELEDEIVQEIVAGYTGFDMPGTNLSGYSEKHDGLFGIKARAKLGPLMLTTVLSQAQGEAMTRELGGKNDPNAMTALRDNEFIKNRYFFLDNVYKDYNNKVYSITNPERNAPRPPKITEFQAFVSIQCNETSNSTVRRYRADINGSDVCFRMLTENQDYTVDVDRGFVRFEYTVKEEEIVAIAMTTLDGTLNRGTIVPISAANDSRQNLWMLKPNNLDELTDANNPLFGLMWRNVYYLPELQDAKLDLFYLDPARGDTIRHVNSSLISNVMGLTDEQGRARIENVEIFKTDKQELVIPPWGIGMNGNEPFANPALGDMANDMIYRLGLRNTAMRDYVPKFGILTNGVMKRSTYDDLGWNIMKGTVTVKTNSGTLLTEGEDYELDYEMGVIDLISTRAKSAESILITYQRESDFVLEKKVFAGLRGEVRLPFISDNSFMAASVLYQSAATTAGDLPQLGNEPFSKLHLSFNTSLDFQPEWMTKAVNAIPLIKTEGESSAKLDFEIVHSRMNPNTSVDKGAYIDDFERTKDGYALSMRHPVWHQSHYPFKYSGGVEAIADSMLNKLRIPVWDFYWYTPNAYDDTRKINRLSVWRRDPNNSRYVASDTYIDVLRLNATPASRDHPLEVQDRFRNSYASITTSFGRSGLNMENHRYLELVINPKGSGALRGKGKLMIQIGTFSHDQVMDGGPPNGRFDLEDSTYQNKPAQLSLYDKGLNGRDVADKFYVIPNSSSDATGWDTLSQSQNTDLLVTPRGRENPSGDLFRKYDKDNLSTFRFVNGTWGNSAYDDENIDADGIPRIGITETYYTYEINLDIDTSRYMDKTSRVVEENGWRYYRIPLKEILDGISVTKDSALGGAPNWAKVRGMRLVWYDFDERVLTSENELIIAGIELSGNYWEPSVGSEAKVEATSISSYEDMSYYNSVYGTIVKPKAGEVTPEEKSLRLNFFNMESGDTVTVRKMQGGNPQNISGYDSVSIMVYSMASYGEDLKFVFRFGSDDSTYYEYAAPLDKGFGWKRFVFSLQDLSDLKLSADQENKPVNASAGRLRVVAPANKRPNFTAITFMAIGAVCGSGGPREGEIWVNELIATGGRVLSGLAARVNLATQWADFLTFGAGISFTDGDFKTMTDATLGGADRSELSANINAVMKLDKFMPEDWGVSIPVGGSVSGALSRPVVKPQSDIKLLNDDGIPDGFLDMADDAFKMMLGGEPGGDRTRAQRFETFAATRNAYTSFEKTSESKNPLIGFTLDRIKTDVSYNQTSSYTGKGPQEDPDSADYIKTDTTVTYTGTLRYDLSPRD

SEQ ID NO: 88047 - protein, 359 aa, Unknown
  Obtained from environmental sample
  DOMAIN (9)...(359): Chorismate synthase
  misc_feature (1)..(359): Xaa is any amino acid
MSSQYGKKLRISIFGQSHSPAIGVCIDGLPAGIKINTDELRAFLKRRAPGQSDISTARAEDDVPEILSGLVEGVTCGAPLAIIIRNEDARSSDYRELRDIPRPSHADFSAHIKYGGFQDVAGGGHFSGRLTAPICAAGGICLQILRDIGVFVGAHILRIGDAGDDPFNPIYISSADFEAIRDNPLPVLRREAGEAMRQQIQDARDKGDSVGGVIECAAIGLPAGLGDPIFDGIENRVAAIVFGIPAVKGIEFGSGFAGAARRGSENNDGLYMDGGAVRTRTNNSGGILGGITNGMPVVFRAAIKPTPSIGLKQESVSLSGAENTMIQVQGRHDPCIVPRAVPCVEAAAAIALYDAWLDR

SEQ ID NO: 88048 - protein, 437 aa, Unknown
  Obtained from environmental sample
  DOMAIN (17)...(227): 3'-5' exonuclease
  misc_feature (1)..(437): Xaa is any amino acid
MLRNPLFGARKKFEPRIRAINSIAQLRGLVETIGKKGEAAIDVVTTGNHPRVAQLKGIVLAVDSSEAFYARIDGGSGAKRGNGTAVAMNLFDGLNRQGAADESGSVDDCESLDRSEALKILAGVLESPQIGKIGHDLKHLSMALRGEGITLRGLAFDAMLAAYVIDPGKRRYDLAELVGEHLCVDIKTVGDWRDGGGFIDPLADSAPTADAACAALLLRDKLLPIMDERGCANLFRDIEISLEAVLADMEWHGMLIDTALLSRLSSEYTSEIERITRGIYAFAGQEFNLNSPKQLAEILFDKLGLRSRKKTKSGSQSTSVEVLESLAADTPIVMSILDYREKQKLLSTYIDAIPAQVLPQTGRVHTSFNQAITATGRLSSTNPNLQNIPIRTESGRKIREAFIAPQGYMLASADYSQIELRVLAHFSGDPSLVQALQ

SEQ ID NO: 88049 - protein, 487 aa, Unknown
  Obtained from environmental sample
  DOMAIN (76)...(487): Glycosyl hydrolases family 38 C-terminal domain
  misc_feature (1)..(487): Xaa is any amino acid
SLAYWEKGTPYPHERLLSNWKLLLTNQFHDIIPGSSIGRVYDEAKETYKSIEADLADLSKATLQELSGSKDAAVSGGIRLYNDLGWEREDPVSFPAELIKEASALKVCGDNSETIYPVQCYINLDGKETAVSCPRIPPLGWITLSAAELKHDSPTFTFKGNSLKTPFYKAGFDEAGRIKSLFDILRDRELVAPGGVLNGFISAQDVPILWEAWDIDSDWTRYITGETRLLSTEVAASGPVCFRIRRKYKIGEASLLSQDTVFYATHPRIDFETLVDWREKQRLLKVQFDTAVNTAQIRCEVQFGHLLRSTHKNLPQDRARFEFCAHKWVSLEEEGGGLALLNDCKYGHDAEGGRVRLTLLRSPIAPDPDADTGEHRFTYALLPFTGPFGKSALVRSGYELNDPARVEPAFGSSVALDSADSSESAGPAEYSLFITEGKSVITETIKAPEASAADNVEKRLVIRLYESLGGPAKTVLRLTGLSCQPSK

SEQ ID NO: 88050 - protein, 263 aa, Unknown
  Obtained from environmental sample
  misc_feature (1)..(263): Xaa is any amino acid
GKLTGESGVLLVNYNAGAGKLKLCKDEGNLSAQNACLWGEPAVKKDNISVVIKEISRVTMLHGVNLFAVELTEPTHVSINAATPAAAMVSTDDKIGAYQEFWEALRWDIPLPAGRHIIGIKPLTSGSLFGTPLTVGLYPILQLTEDKPLQMQIMASQNRLVKFELQKKNSIGIGLSSQSQTVEAALLDAKGKQIAVGSQIFKELDKGAYYALLSVPFGSTQNGVSVTVRLFGQNNPPTDPPAERIKRIIKDDQSESSAAQASR

SEQ ID NO: 88051 - protein, 375 aa, Unknown
  Obtained from environmental sample
  misc_feature (1)..(375): Xaa is any amino acid
ATPRQYVGKEIKIIDANEYHDRKDVVTATLLSAANGEVYKIGNEIYLGHPGIKVLPELPGNLISRPTLSWIYRSKAAREYNIEVSYLTYGMGWNADYVLSVADGKTAGGLSGWVTVNNQSGAAYADAKLKLVAGEVNRVRPEAAFAAPRAAKMSMMAMADNAAGFTESGMFEYHVYDLGRPVTVKENQTKQISLLEAQGVNVVKEYVTTPSGPNYFLYNSINEGPVKQPVVAYLSFKNTKENNLAIPLPAGTVRIYTADAKGSQQFIGEDRINHTPKDEEIRLKVGEAFDIVAERTQVDFAQKTSKVTETEWKVTLRNRKEEDVTVRIQENAMGQWEILDPSHKFTKVSATMFRFDVPVAKGQEVAVKYKIRVKG

SEQ ID NO: 88052 - protein, 789 aa, Unknown
  Obtained from environmental sample
  misc_feature (1)..(789): Xaa is any amino acid
DLKLAADVEGKPIDTADGRLRVVAPAGKRPNFTAVTFMAIGVSRGPYGPEESEIWVNELIATGGRVLSGFAARVNIATQWADFLTLGAGINFTGGDFKMMTDEAIGGADRSELSANVNAVMKLDKFLPDDWGVSIPVGGSVSGALSRPTVKPQSDIRLLNDNGDPDGFLDMADDAFRMMLGGEQGGSRTRAQRFETFSSTRNAYTSFEKTSESKNPFIDFTLDRIKTDISYNQTASYTGKGPHEHPDSADYIKTDTTVTYTGALRYDLSPRDPPTWTSYAPFAEVEWIPEIYKNYTLNMLPSTINFDLAEIQHRTEIRNDHKLNVYDFTTRTFDMRHGMRVEYSPIDPLLSLSYSIRFDRDLSNLPTDDWNLMMDSTLANIFGLNSTEGEKWDTYGVLYGERGRTQSASAKLSPQFVSWMTHSAEYSADYTGLAARRDNDSTRYLNANVSTGLKLRTSLLLSELFKPAKEKEPANKDTTDNAKDMTAKAPKAGYFAFIGNGINKISLRSINFEYDVSTDLKNSFLSSTYLADTAGMSNYDFIRYQMGMRRGMSDYLFGTLGEESLGWMQYRAQAGVENDLYRNDQSKGSWAARFSTAFSIPDPFKIDFTGVSFGWGREFYGQPDSTYIDTTVVLPELRAGANTKALTKISLIKKYFSDLGASSSFSFKNSRKESKERTDTTITMELQPLIGLEGKLIRWPSLTSNYRFGVTTTTVNAGGKDSTGNTGRLSTESTVRNSHTLTLAYAFTGAGKLKEIKLRKWVIPIQGKTTMGLGINWETSERTNKIGDD

SEQ ID NO: 88053 - protein, 115 aa, Unknown
  Obtained from environmental sample
  DOMAIN (26)...(79): Helix-turn-helix
  misc_feature (1)..(115): Xaa is any amino acid
VEMSNFINPVYAKADAEILAELGNMLKQRRIAANLTQNELAKATGISKDQISVIELTGKTSLATLVAVSRKLGLLQQLLTVYKIPELTPLQKYEIERKTAKMQKKRKRVKKEQLK

SEQ ID NO: 88054 - protein, 286 aa, Unknown
  Obtained from environmental sample
  misc_feature (1)..(286): Xaa is any amino acid
NKYIWRLRYGQKRKQRRNSAVSAEWHIEIRCVLENETVWLTQKAMAELFNVGVPAINKHLKNIFIEGELNEEVVISKMEITTQHGAIAEKTQNKETNFYNLDAIISVGYRVNSKNATLFRIWATNVLKNYLLKGYAVHQQIEGIKKLSANHETRLIEVEKKVDFFVKSSLPPLEGIFYEGQIFDAYNFACDLIKSAKKSIVLIDNYIDESVLLLLSKRSAKVSAKIYTAQISRQLQLDIQKHASQYPPITVDKFSKSHDRFLLIDDCTYHIGASLKDLGKKLVCLL

SEQ ID NO: 88055 - protein, 152 aa, Unknown
  Obtained from environmental sample
  DOMAIN (41)...(137): Peptidase family M23
  misc_feature (1)..(152): Xaa is any amino acid
MLNSQSALLTEIPSIWPIKNGLGHISMFFGQNINPFSGQYYIHKGIDISTYRSGDPIVATADGQVVTIEYTEDFGNYVIIRHKHGYYTRYAHMLSARVRLGQRVQQGEVIGYIGNTGLSTGPHLHYEIHIGSDVVDPYKYMNIRSNIAKQGR

SEQ ID NO: 88056 - protein, 379 aa, Unknown
  Obtained from environmental sample
  DOMAIN (1)...(363): FHIPEP family
  misc_feature (1)..(379): Xaa is any amino acid
GVNQKKAVIFKEQAVKAREQKDEKAADFPPVVPLDALSLELGYGLVPLVEKEKGAELLERVMGVRSQSAYDLGLVIPKVRIIDNSMLGPSEYCFKIKGVDSGRGKIRLGNYLCINPGTVTNEIEGEKTIDPAFGIPAIWIDQERRDEAERAGYTVVDPPSIIATHLTEIIRHHAADILGLQDTQVILDTLRKDYPAVVDEALREGKGLRVTEIQKVLHGLLRERVSIRNLVSILEAIADYAPISKNIWFLTEKARQALASQICDQYADEDKHLRVLTVDPAIEQKIIDAKYETATGIVCALDPNTQKLWITAVAKAVKAVKEKGWMPVILCSEQARFLIKNSTDRELPDLAVLSVPEIVSGVIPEAIGMIRLEDNTTEQ

SEQ ID NO: 88057 - protein, 558 aa, Unknown
  Obtained from environmental sample
  DOMAIN (3)...(104): ATP cone domain
  misc_feature (1)..(558): Xaa is any amino acid
LIKHVVKRSGEIERYDRAKISNAVKKAFSAVETGKNIEDLQTRIEKITSRVEVLIREMMSLRHPNSIPAIEEIQDLVETTLIEEKETKVAKAYILYRARHEAMRDARKLMLDIDSTMDGYLKQSDWRVNENANVNYSLGGLILHNSGSITANYWLKNIYSEEIATAHRNADFHIHDLSMFSGYCAGWSLRQLIIEGLGGVTDKITSKPAKHLSTLMQQAVNFLGCLQNEWAGAQAFSSFDTYIAPFVKADHLSDREIKQCLQSFIFGVNTPSRWGSQAPFTNITLDWTCPADLKEKKALVGGEEGSFCYGDCQEEMNRVNRIFIELMLEGDAEGRGFQYPIPTYNITSDFDWESDNARLLFEMTSRYGTPYFQNFVNSDLNPSDVRSMCCRLQLDKRELRKRGGGLFGSDELTGSIGVVTINLPRIGYLAKDEEDFYRRIERLMVLAKDSLRIKRKIVSRLLEGGLFPYTRRYLKNLDNHFSTIGLVGMNECLLNFLGREFNIATERGRSFALNVLGFMRNKLADFQEETGELFTLKPPPPNLPLTGLPGTTKRNTRA

SEQ ID NO: 88058 - protein, 411 aa, Unknown
  Obtained from environmental sample
  DOMAIN (234)...(398): Transposase DDE domain
  misc_feature (1)..(411): Xaa is any amino acid
MLENDITQGNPGSAFGRQDTPSVEQIVRAAIYKEMKNLDYRALEYAQEDSRICEKFVKINPLRPYSFQVWQKYISRISEEKLEKFMIAMNKIAISEGLEDVREFRQDTTVIETDIHYPTNNSLVWDCIKECERLLSLLKEEVETLEFEEYRKKAKKIHFKINVEKNEEKRVKLFKKQLEMFTNSIKQVSNIVKKKKEYGGTTKSDGIIAALGNLIPVMEKVYKMTERREIMNEKVPVGEKIFSIYERHTDIIVKGGREAKFGHKVNLGSGRSKLILTCEIVDGNPNDHELYEGTIKKLKKDYGKMPDSSTADGGFASKANIEYSQKVGIINVVFNKIRGSMQNIASSKWVENKLKRWRSGIEAIISNLKRGFQIRRCTWKGIAHYGQKVFWSVIGYNLRVMTGAILQSMTL

SEQ ID NO: 88059 - protein, 390 aa, Unknown
  Obtained from environmental sample
  misc_feature (1)..(390): Xaa is any amino acid
MNEPHYGFIGQKDLNIAEDPMIPVGIRPSPWQTILAASGCQIEVPVYGIMSMGKRILRYETFNAEKISLFKEGFSCPWKQAGVWDNGGAPKLLKSNYFSLYQNRPAVFTDDFLKPFIIKYINAMKEANEQNSFFIEGPPFSTKAESHPSWNKADPDKVINAFHWYDGFSLFTKSFRSWFNLNPDTKKIIIGKKNVREYFKKCLAKGIKITREKMGNVPCFLGEFGLAFDLNNRGGFKKGDYSLHEEALSMYYDAVDANLLHSTIWNYSASNSNKYGDSWNDEDLSIFSEGIERAAAGWKRPYPMATAGEPLYFTWNRKRKKFVYRFNANREITAPSIIYLPAEFLGAKPKIEAITYDKKNLRWDYLHEEQRLLVYNDGFYGEVILKVGLN

SEQ ID NO: 88060 - protein, 485 aa, Unknown
  Obtained from environmental sample
  DOMAIN (292)...(429): AIR synthase related protein, C-terminal domain
  misc_feature (1)..(485): Xaa is any amino acid
MSPLEIWCNEAQERYVLAISSESLSVFSELCKRERCPFAVVGEAIAEQNLLLSDTHFKNNPIDIPISLLLGNPPKMKRRDNGGSGEWRVESGEYSQLSTLNSQLKNVAQRVLSHPAVADKGFLITIGDRSVTGMIVREQMVGKWQVPVADCAVTTSTLDSITGEAFSIGERTPLALLNSGAAARMAVAEAITNIAAAKISDISKIRLSANWMANPATKGEGAALYEAVKAVGMDFCPKLGIAIPVGKDSMSMSASWESEGKKKTVTSPVSLIVSAFAPCEDVCKSLTPELQNVENTILVLADLGEGKNRMGGSIAGEVYNQFGGEPPDAAPELLKQFFKAIQTLNAQNKILAYHDRSDGGLFATVAEMAFAGHVGVKLEIEEQIPLLFNEELGAVLQIKENDFEDARKLFPFKKIGKLSDDFHLTTSSYRQSLSELRKIWSRTSYEIAKLRDNPECARQEYEWKCEEKDVGINVSGELRVESGEY

SEQ ID NO: 88061 - protein, 69 aa, Unknown
  Obtained from environmental sample
  DOMAIN (3)...(67): ThiS family
  misc_feature (1)..(69): Xaa is any amino acid
MKLTVTGNVKEYAEGLTVAKLIELERVEMPLYVTVSINDEFIASNSFEKTELRDGDSVEFLYFMGGGQR

SEQ ID NO: 88062 - protein, 344 aa, Unknown
  Obtained from environmental sample
  DOMAIN (267)...(339): SirA-like protein
  misc_feature (1)..(344): Xaa is any amino acid
VRLKVVGGNLTAEQLVAIAEISKKYGDGYVHLTSRQGVEIPFIKLADVEAIKTELETGGVNTGVCGPRVRTVTACQGSAICPSGCIDTYPLAVEISNRYFGQELPHKFKFGITGCMNNCLKAEENDLGIKGGYSVELVKEKCTLCGVCVKACREGAITKTSEGLAIDKSKCNYCGRCAKSCPFDAWKGESGYILSFGGTFGNLIAKGEQFLPIIRNKEVLFKITDAALNFFAKYAKPSERFRVCIDRAGWDNFKKKWRIFAMADYTIDETVDITDVVCPVTFVKAKVALEELIDGQVLSIRLNDGEPVQNVPRSIKEEGHQIIKLIDNGDGTYNLIVRKTTLED

SEQ ID NO: 88063 - protein, 506 aa, Unknown
  Obtained from environmental sample
  DOMAIN (117)...(379): Peptidase M16C associated
  misc_feature (1)..(506): Xaa is any amino acid
GRFDSSAAGTEKKTEALVIEELRRLVTEGIPKGEIEAALLFIEFSQREIKRSGGPFSLVWMRRSLRAWLHGSRPWESLLLVPSIDKIKQKLAEDSRYFESLIQKYLLDNPHRALVTVEPQEDFLPKQEARLAEKLARAEQGFSEADRQLIIDKARALEKIQSEGDSPEALATIPHLSRKDLSPEPEIIPRRIEDLTGLPALCHDIYTNGISYIDLAFPLDILSREDYQWIPFFTRAVNSVGLPGMDYAEVSSLLARTVGGFNVITHTGSAAGSGSPIIKTPAGKFDIIGRDWIIYRLKCLDEKTAASLDLALRLISEADFSDLKRIHDLVMEMKNGARSSLAPNGHHYASSRANRFASASLQTDETWNGITQFLFVHRLAEMDTAEIAARLNNLRDAIASGGLIANLAGSADALKSNGGLIAQRFKNFGPPKKRAAVKTAAVTVSGPEVFASPSLQVGFAAMALQAAKFDTLEQVAETVLAHQLSTGALWENIRMKGGAYGASRAQ

SEQ ID NO: 88064 - protein, 478 aa, Unknown
  Obtained from environmental sample
  DOMAIN (168)...(350): Radical SAM superfamily
  misc_feature (1)..(478): Xaa is any amino acid
LKDIVLTTINAKWTHPSLALRLLKANLGTLEPQCEIIEFALRQPLCEKTAPLLAMRPKILGISVSIWNHLAAIELLEALEKEWAHTERPIVVLGGPEISYLPDDADIFKYADHIIRGEGEFVFSALCENILQNENKTINAWTQGSLAEIKTAYHLYTDEDIAQKLIYVESTRGCPFECDFCLSAVKSKESDSAVREFPLEPFLADMDTLVNRGVKTFKFLDRTFNANINRAVKICEFFLKKLEERKRAGYAPFVVHFEMVPSLITPALCETLALFPPDTLRLEIGIQTLNPEVSARIHRPGWQNRSINPEKELETLRFLRKKTNAIIHADLIAGLPGETLESFGKGFDRLWQAVSDNSDNAQKQEIKSPRVEIQLGILKQLPGAPISRHNETFGMRYNGKPPYEIEETSSISAVDLQRLKNFAAFWERLVNRGLLPVESESVFEKFIALSDSLLAHFGKNWGIDKAELIKKAVQNFTY

SEQ ID NO: 88065 - protein, 73 aa, Unknown
  Obtained from environmental sample
  misc_feature (1)..(73): Xaa is any amino acid
MNDKGAVGAHIYIDDTPDNVISLRKQDCKTIVFTNSTNRKLPGLRADNWLEVEKLVMEACEEWKTGTVGLSFN

SEQ ID NO: 88066 - protein, 377 aa, Unknown
  Obtained from environmental sample
  DOMAIN (177)...(266): Elongation factor G C-terminus
  misc_feature (1)..(377): Xaa is any amino acid
MSNQSEYEVETVGLFKLGLVETNELSAGAVGYFIAGIKTVSDVRVGDTVTGAENPCEKPLKGFREVKPVVFSSIYPVDTNDYEELRTSLEKLKLNDASLIYEKDSSVALGFGFRCGFLGLLHLEVIQERLEREFDQSVIFTAPSVKYKVHVRGAGGSVEELMVDNPTDFPDEGRIETAEEPYIRAAVITPKEFLGNIMSLCMEKRGIQTNMTYLDERRVELVYDMPLSEVLFDFYDRLKSTSRGYASFDYDITGYKPTELVKLDILLNGKAVDALAQLVFKNNAYDRARIVCERLVDEIPRQQFKIPIQGAIGSQIIARETVNPLRKDVLAKCYGGDITRKRKLLEKQKEGKKRMRMVGDVELPQSAFLAVLKTKDE

SEQ ID NO: 88067 - protein, 699 aa, Unknown
  Obtained from environmental sample
  DOMAIN (385)...(699): Surface antigen
  misc_feature (1)..(699): Xaa is any amino acid
VRRVYKLGHFRKVDFFVDEESDSSVSLKLTVEEFPLVDKIEFFGNKKIKKKELEEKKLLRIYAPLSDAHLYKSKQTILDMYAEKGYLLAEVDAQVIPTSVPGNAIVKYDIKEGPRVRVKSIVFHGNRDVTAKWLSRRFKTKENRWWRSGDFNYDLYRSHLDTLIMQYNDRGLLDAAIERDTVWHSEDKRDIFIEITVNEGRKYFAGDVAFSGNSIIDSDTLALRVALTKGRPFRKSQFDMTRYMLETTYREEGYLWVRVDDKRSYRGENADTIDLLFEISEGRPAIIRKIDIRGNSKTWEKVIRREISLMPGQRYRQSLMAASQQNIMRLNYFQSAMPDILPNDDGTIDLIFDIVEKDNIGQLTVGAAYSDQDKLTGTFSTAIPNFRGAGQELKLEVQYGGYRKLGMVSFTEPWSFDTPLWLTGTLFADQQIYSYSSGDYDTTTSYGFRVGVGRSRLSWPDNKFRFQSIYQLSHERTSRAPAEIGDMKIIETGIMSKLRLNVERYDLDMPLFPNEGSRLTVTPEVAGLGGDYRYFKGTVSYENYFRLPAKLVFGSDVKLGVITGLGELKISRDDLFTGGGAYGDAIIRGYSDWAFGGYRRWSVGDGISMFAMNMSLRYPVIDQQIYLGIFADMGNTWPSISGIDLGDLYRGVGGGVRINLPMIGVMGVDIGYGLDPLDKSNIKGKPSGISWHIIMNKGF

SEQ ID NO: 88068 - protein, 340 aa, Unknown
  Obtained from environmental sample
  DOMAIN (5)...(69): Heavy-metal-associated domain
  misc_feature (1)..(340): Xaa is any amino acid
MNTETLSVGGMTCAACSARVERALRKLEGIESAAVNLATEKATVVYNPQTVRLSAIKEAIINAGYQVIETSKNTLDEDKLRKEKEIKILWTKFIVAASLGLPLLYIAMAPMIKWVSLPFPKAIAPMHSPLIYGLVELALVMPIIIAGYRFYTVGFKNLLRRSPNMDSLIAVGTTAAVVYSVYNLFRIAGGDHHAVDALYFETAGVIIALILLGKSLEAVSKGRTSEAIKKLMGLAPKTAIIFENGEEKEIPIKEVMPGDIIVVKPGAKIPVDGLVTAGQSAVDESMLTGESMPVDKKPGDPVYAATINSNGVIRFRAEKVGDETALAQIIKLGEDAQSSK

SEQ ID NO: 88069 - protein, 304 aa, Unknown
  Obtained from environmental sample
  misc_feature (1)..(304): Xaa is any amino acid
ALHAGRLVSYTAVGVFVGALGSAITLSGRFQGVVQLIAGVFMVIMGINMLGLFPVLRRFIPQMPKLFAKKTDGQKTAHSPLIVGFLNGFMPCGPLQAMQVYALSTGSPVKGGISMFLFCAGTIPLMFALGAASSALSGAKGQTFSRRVMQAGAILVAALGLVMFSNGWSLSAFTDSPDKTASVKTADAPMENRKNISPPESKQLTPVIENGVQIVNSTLRPNRYPAITVQQGIPVRWTIKAPPGSITGCNYCVILYEYGIEHIFQQGDNVIEFTPAKAGKFRYSCWMGMIKSTITVLAESGKEG

SEQ ID NO: 88070 - protein, 97 aa, Unknown
  Obtained from environmental sample
  misc_feature (1)..(97): Xaa is any amino acid
FWRLIGVCVVLLSNIIVIKISAFYLSLLFFTGQVFSGILIDVVISQTFSLRNMIGGIFVAVGLSVNLVLDRKTSLSSFNNNPENQHAKRSNPGVNGE

SEQ ID NO: 88071 - protein, 397 aa, Unknown
  Obtained from environmental sample
  DOMAIN (14)...(387): Nucleoside H+ symporter
  misc_feature (1)..(397): Xaa is any amino acid
MTIKPNDGRSFIPTYALTFTAFAVITPYLSIMVRDLGYRPVWVGILLGIFEGSAIAGPFLFGYWADKTGNFRSPIIVSCILPALTAIPIVLWIHPVISAILLAVLAFGFRSTSSLLDAITTVRIGKSGDYGKIRAFGSISFIIFVLFLQWTPFLTPNSAKNIAFWIVITSLAAIIYLFILPRSSFAAIEHEHEKNINTEKKIPFLSVYFIGGFAIIFLCRFAMSSVYTFFPLYLTETLNWNAVGLMFSLSSASEVPFMFLSVFLIRRFGALPLLALSAGGIALRLLLWALFPYKPIVIAAQLLHSLCYGVYHPAAVQFISSVFPAKKRGIGMPVYLALGSGLPALLGNMAGGVIVESIGYRPLFAIYAGIAALGVLIFGVIVKRRKTGFSIQNKINT

SEQ ID NO: 88072 - protein, 325 aa, Unknown
  Obtained from environmental sample
  DOMAIN (4)...(292): Phosphomannose isomerase type I
  misc_feature (1)..(325): Xaa is any amino acid
MTRIHRLQNQIKHYDWGSAKLIPDLLGIKDNDPQKPYAEMWMGTHPSAPSYAPDSGVNLKEISGELPFLLKLIAVEKPLSIQVHPDKKQAEEGFKRENEEGIAIDSPLRNYKDQNAKNELICALTPFTLIAGFMEPNKIYASLGGDSLHEQWELVRKLESLYPQDAGAYSPLFLNVISLQPGQGLFIPAGTPHAYISGFGVELMTSSDNVIRGGLTSKHVDVDELKRIAKPVPFVPQIITPCGEPLTCYPLHGENFSLYHIHGGEKTVFFPQSGHSICIVMEGELKIENQIFKKGESFYLPSCGKDALLLEGNFSLFAACVTDAK

SEQ ID NO: 88073 - protein, 298 aa, Unknown
  Obtained from environmental sample
  DOMAIN (75)...(279): Glycosyl hydrolase family 3 N terminal domain
  misc_feature (1)..(298): Xaa is any amino acid
NHRFKRDPLENRIDSVMKLMNLAEKIAQMTQPELKIGFGNGVSTPNNGTSYLYGSVLNGGDGYSSTFLNNVTTTLNTWQRVKIPTSYGKDAVHGNAGVKGYTVFPHNIGLGATRDSALVRRIGEAPAKELWTAGIDLNFSPAISVVRDTRWGRSYESYGETAELAVQMGAAMVRGLQGERFNAPWRVTATAKHYVGDGGTTDGKDRGNTDITDDQLRAVHLPGYEAVVEQGVLSVMASFSQVRTVHQHIDSTRLTGWLKTELGFDGYIISDWQGIANSNQPGVTSPDGYGPGANPGPT

SEQ ID NO: 88074 - protein, 244 aa, Unknown
  Obtained from environmental sample
  DOMAIN (28)...(144): HD domain
  misc_feature (1)..(244): Xaa is any amino acid
MATVRMDSLIKSIAAALDIVEGGLLGASTNHGKRIAVLCAKMGKALQKSDEEITAMAVCAMLHDNALTEYILSEQIGGYHDPAMKKHCEFGQRNVDALHFKTNVKDFILYHHERADGSGPFGIREGEGPLEAEIITIADSIDAAHHLQRLVPEELPTIREIIVNESGKRYSRKAAEVMLEILDWPAVLSLNDRVIKQTASEILSPWTVDIETDTIFGLAGFAAKIIDYKSVFTQKHSTQIANKA

SEQ ID NO: 88075 - protein, 68 aa, Unknown
  Obtained from environmental sample
  misc_feature (1)..(68): Xaa is any amino acid
MRTDTVLKVEAIDLLLRTFGVLETERFITSIKSNNFDYTEWHKNLWKDKSINEIHNMAVEFEKEKLKN

SEQ ID NO: 88076 - protein, 406 aa, Unknown
  Obtained from environmental sample
  DOMAIN (361)...(406): Bacterial regulatory helix-turn-helix proteins, AraC family
  misc_feature (1)..(406): Xaa is any amino acid
MNRKNVQTATPQTVASPIVGKRISISGNDEIEPMLVKALNVLGVYDEAMSISSMVLDKTGQVLKTADYKKQMRFCELCKKYFHNPTPVLVRTGIWEGSIYPCELLHAEASVTSRSTGETQIYACAAGFAYWNSPLFRTGHYAGALSAGQVLMCGHNEAVERFHSLCNDRIAAEKFGMMLKEVTEKKHQEIQAMARLLGLCAAEISEKEKDLDKTIRRMAWLKELPRGMKEQGKAKTTITSSVQEKAGTEEILEKERLLLAAFQRGDSETGTKTINELMHCTLSRYPHDFELIRFRAIEILVLLSRASDSTAPLEINNRILTQILESRTTEELIKNLTRAAGHMADKIFSFRGMRHSSVLRKAQRFIWENYSRKINLEEISKAAGLSAPYFSTIFNEEMGEKLSRYL

SEQ ID NO: 88077 - protein, 257 aa, Unknown
  Obtained from environmental sample
  DOMAIN (99)...(254): Uracil DNA glycosylase superfamily
  misc_feature (1)..(257): Xaa is any amino acid
LLLCLHHENGKNNQQPRSEGTRYVGSDKNGFYAGIIPSQTIHSEVTSNALKLARESVQKVLNPPANKKYASGDSLEAVAADVGACKACGLAATRKNTVPGEGSIYPLVMVIGEGPGADEDSAGRPFVGRAGQLLDKMLESINLTRGKNCYIANMVKCRPPGNRNPETAEISACYPLLERQIILLKPVFILCAGNVATQNLLKTSKGITSMRGQFVEFKIGELTIPVLPTYHPSALLRDETLKRPAWEDLKLLKSRLC

SEQ ID NO: 88078 - protein, 321 aa, Unknown
  Obtained from environmental sample
  DOMAIN (204)...(319): Thiamine pyrophosphate enzyme, C-terminal TPP binding domain
  misc_feature (1)..(321): Xaa is any amino acid
LISAAYFYNKLVEKGVGFFSGVPDSLLKDFCAYITDNADENNHIIAVNEGAAVALACGYHLASGRLPLVYMQNSGIGNAVNPLLSLADSEVYRMPLALVIGWRGEPGMHDEPQHIKQGKVTLALLESMGIPYAVLEKTEDAVNSQIETCFKTIAETNAPYALVIRKDTFAPYTLQKEEEHNAIMTREEAIEEIASVLGGIIVSSTGMISRELYELRDKAGAGHERDFLTVGSMGHASSIALSIALQKPELQVACLDGDGAALMHMGSFAAIGTQKPHNYCHIVLNNGAHDSVGGQPTIAPFIDMPAVARACGYTQVYQVKT

SEQ ID NO: 88079 - protein, 379 aa, Unknown
  Obtained from environmental sample
  DOMAIN (299)...(369): ACT domain
  misc_feature (1)..(379): Xaa is any amino acid
MKIDELNLEIDNVDDKLLKLFEERMEIALEIEKDRKENSLAVIDTEHERKILYRICEKARPEFSGYAKVLFSSIFEICHSHQKAQSHYDSAVKKLLEDAVQHKSDSFPSRAVVACQGVEGAFSQAACDKLFSPADITYFNNFEGVFQALDGGLCRYGVLPLENSSAGSVNEVYDLMNRYRFFIVRSIKLPITHTLLAAPGAKMDDIKEVFSHEQAIRQCNRFLKSWKNVKVTECANTAMAAMQAANSGRTDAAVISSRDCAELYGLQALSFNIQNTDNNYTRFICISKKPEIYPGAHKTSLMLALKHKPGSLYHVLAKFYAHGINMNKLESRPISGQAFEFLFYFDIDTPVISDELKQVLAELEQETDMFNYLGTYQEI

SEQ ID NO: 88080 - protein, 196 aa, Unknown
  Obtained from environmental sample
  misc_feature (1)..(196): Xaa is any amino acid
MDRKRLFIKRETSNIERPEIVNWAAGNGYDTLVFSLGDKYFRSKSGKYIKLIKKYSLNIEAGGSDLPLLMPKKLFFFHRELFRMEHGRRKSSPHFCPTNPKTTFIISENAQIMFTNVIKALTVPRVFHLLPDKGMENIWCACPACRAFSPYEQYIIAVNSAADILVKIDPDARLAYYNFTEGLGAPHPHEGESQGV

SEQ ID NO: 88081 - protein, 476 aa, Unknown
  Obtained from environmental sample
  misc_feature (1)..(476): Xaa is any amino acid
MNQEKITSLHSKYNPCGEAERYIDSLSLNEKIRFFILIEPGLGYMVAPLKRRAPDAKVIALHVENPAEVTSTLAPTAQPDSQWHPEAGVSVQEFLEAEIPDSEASEIRLLEWRPALNVYGRSYLALLEEAATFIKRSDANARTTKAFGPRWFKNFVKNLSIIKTALNPINRDSSLVSQPFLVTGAGPSLEDAIQIIRQTIKNEMAHTAFFILASSSSVAALESNDLVPDLAISTDGSNWARLHLYNSFRSNSRKKAYPLALSLTAAIPSQCDSLPLLVICDGSLWQTLILQEMRIPYITLPQRGTVTAAALDLAFALSSGRIYIAGMDLENRDMRSHARPYSFDILIEEKAIRTDPEYSQTYRRSSLLKAGGSYGIYASWFKKQLSLYPRPLFPIGKNNSVFDPSKATFPRTGEQGGATLEFQTVPLSFNTSPREKAIEVLKNGLKDPALSDALQKELKTLIPEFNECFLSQDLYG

SEQ ID NO: 88082 - protein, 257 aa, Unknown
  Obtained from environmental sample
  misc_feature (1)..(257): Xaa is any amino acid
MDNDKESLFDKNIHALSKSNPALYYKLSKIVAKESRYKFIESRTGEIIPNWIDSQGIAHPLHSMMDPKREAKRLIETIQSESFIVILGLGAGFYAEEALKREETCYVLIVEYDLAALAELLRQMDYTCLFNDLRFTLAVDLNGEEIQKLFLSLYQPVLFGSIKVIPLRARTSFDSESFIIAAKAIEGAIDQASSDYSVQASFGKRWFSNITRNLKSAGEVKGSIPNIRRAAVCAAGPSLSLQIPEIQKKRKEKFLIA

SEQ ID NO: 88083 - protein, 212 aa, Unknown
  Obtained from environmental sample
  misc_feature (1)..(212): Xaa is any amino acid
VVAENVDAADDAVHIYIGSKVAPGGYAWVFPRGGGAANIGVVVGRNHIKGVNIKKLLGDFLAKNYPKAEIKTYFAGCIPCGYRRGNLALPGLIKCGDAANATNPISRAGIVEALMSGGLAGSAAFDMLSAKDIKQTKKICIDYEKAWLEKRGARHLKLAKSKDSLAKVPDEDYNIAAKTLSGLSSDKVSMAKIFGLSLSRFPRIVWAMRHLM

SEQ ID NO: 88084 - protein, 116 aa, Unknown
  Obtained from environmental sample
  DOMAIN (10)...(113): Thioredoxin
  misc_feature (1)..(116): Xaa is any amino acid
MTNDPNTKDSLLELTDQNFADSVLSNPNPVVVDFWAPWCGPCKMLTPIIHELAADYAGSVAVGKLNIDDSPAVAAKYGIETIPTLLFFSKGGIVGRQVGLLAKAPLKAKIDDAFKV

SEQ ID NO: 88085 - protein, 86 aa, Unknown
  Obtained from environmental sample
  misc_feature (1)..(86): Xaa is any amino acid
LLGGVNTRSIDADSIAQFAAGIDCVVNIIPWNPVAGLELDGKPLREPEKKETLDFLKKLENHGLKTTMRFHKGRGIMGACGQLGAL

SEQ ID NO: 88086 - protein, 155 aa, Unknown
  Obtained from environmental sample
  misc_feature (1)..(155): Xaa is any amino acid
SRIHIGAGASLISCPRRATAAVVSPVRLKTLGPTAAIILEQGVELSGVSIAARSQTIRIGAYTMIAPGCVLADSDFHALQPPERRRNDPGYERDAGIDIGEYVWIGMRCCILKGVRIGRGSIVAAGSVVTRDLPENCLAAGVPARVVKQWTERTA

SEQ ID NO: 88087 - protein, 117 aa, Unknown
  Obtained from environmental sample
  misc_feature (1)..(117): Xaa is any amino acid
MVFLADLHIHSRFSRATGKRLNAPLLAAWAAVKGIAVLGTGDFTHPLWRAELREALIPDEASGLYRLKDPAQAARLLPQFAALVERPPQPLFMLQAEISSIYKSGGQVRKVHNLVYL

SEQ ID NO: 88088 - protein, 285 aa, Unknown
  Obtained from environmental sample
  DOMAIN (1)...(121): Aspartate/ornithine carbamoyltransferase, carbamoyl-P binding domain
  misc_feature (1)..(285): Xaa is any amino acid
MQVKTEAKKGKKLKRFDGKTLAMLFEKRSTRTRCAFETAFGEEGGHPVFLSPADIHLGVKEELKDTARVLGRMFSAIQFRGFKQETVETLAQYSGVPVYNGLTDLYHPTQALADFLTLQENFGEVKGRILCYVGDGRNNVARSLMIICAKLGTNFTVITPPELNADSELLQKCDTLAKTSGARIKVTPDISAVVGADALYTDVWTSMGEEDQKEERVRLLSPYQVNQKLMNMTGKSDTIFLHCLPAVKGEEVTADVIEGPQSRAWDEAENRKHTIKAVMLATLVK

SEQ ID NO: 88089 - protein, 406 aa, Unknown
  Obtained from environmental sample
  DOMAIN (57)...(215): DEAD/DEAH box helicase
  misc_feature (1)..(406): Xaa is any amino acid
VKKDDDFLLELIHRGSVKRELIRAGWPVQDDAPLSKGEDLQITLRGSCLSGRPFTPRDYQVTAAHSVTGSGGPGSGYGVVVLPCGSGKTIVGMYIMSLLKTNTLILTTNVAAVHQWIEELLDKTDLTKEQIAEYTGDSKAVAPVTVATYQIIAWRPDKDADFPHFKLFRERQWGLVIYDEVHLLPAPVFRVTAELQAIRRLGLTATLIREDGEEDAVFSLVGPKRYDVPWKDLEDKGWIAEAFCTEIRLDMPENLKIPYAAAQPREKYRLAAENPLKQNVVLQLVENHPDDQIMVIGQYLTQLNALAKLLNAPIITGKTSNADRERIYSGFKKGDLRLIVVSKVANFAIDLPDASMAIQVSGSFGSRQEEAQRLGRILRPKERNAWFFSLVSSYTVEEEFAANRQK

SEQ ID NO: 88090 - protein, 500 aa, Unknown
  Obtained from environmental sample
  misc_feature (1)..(500): Xaa is any amino acid
AGLRGEVRLPFISDNSFMAASILYQSAATTAGDIPQLGNEPFSKLHLSFNTSLDFEPEWMTKAVNFIPLVKTEEESSAKVDFEVVHSRMNPNTSVEKGAYIEDFERTKDGYTLSTRHQLWHPSHYPFKYANPKDISDSMLTALRIPAWDFYWFTPNAYDDARKINRFDVWTRDPNNNRYSSSDTYIDVLRLQATPASRDHPVDVQDRFKNSYASITTSFGRSGLNMENHRYIEIVVNPKGVESKLEHKKGKLMIQIGTFSHDQVMDGGPPNGRFDLEDPTYQNKPAQLSMYDKGLNGRDAADKFYMIPNADATGWQTLFRNDPLLVSPRGFDNPSGDLFRKYDKDNLNNFRFVNGTWGNSTYDDENIDGDGMPRIGIKEKYYSYEIDLDNKNSWYIDKSSRVVEKNGWRFYRIPLKDVLDVIEGVRKDSAFGGAPDWAKVRGMRLVWYDFDTTYLTRENELLIAGIELSGSYWEPSAGSEAKIEATSISNYEDMSYYHSV

SEQ ID NO: 88091 - protein, 190 aa, Unknown
  Obtained from environmental sample
  DOMAIN (129)...(184): ANTAR domain
  misc_feature (1)..(190): Xaa is any amino acid
MKSALIVSCVEKETAFFTELLSAASIHHIVSIKSVESAQKLILQEDFDLVIVNAPLRDESGESFARYIASRGIAQVILLVKNESVDSVSAAYEGDGVFVISKPVDKTFFLAALSLAKSTQNRIKRILNENVQLKQKIEDIRIIDRAKCILISIMKMTEQEAHKYIEKQAMDIRSTKRIVAEGILKLYENY

SEQ ID NO: 88092 - protein, 408 aa, Unknown
  Obtained from environmental sample
  DOMAIN (144)...(233): Pyridine nucleotide-disulphide oxidoreductase
  misc_feature (1)..(408): Xaa is any amino acid
LKYVIIGNSAAGIGAVEGIRSIDKQGEITIITDESHHTYSRPLISYLLLGKVTKENMKYRDDNFYKDNKCTLLFDTVAEKIDAAEKNVILKDGKKIPYDKLLVATGSSAFVPPFQGLETVKNKFTFMSLNDALKLDAVLNKDKRVLIVGAGLIGLKCAEGIHERVRHLTVLDLAPRILSSILDEEGAKLVQNHLESKDVEFRLSANIKNFKPNSAVMDNGETIDFDILVLAVGVRPNTALLNGIAKVDKGIAINDKSETSAPDIYAAGDCTQTNDISSGQSKIMALLPNAYMQGECAGINMAGGEKIFDKAIPMNAIGFFGLHIITAGNYAGDVHAETGNGNYRRLFYGDNKLNGYILIGNVEKAGIYTSLIRERTPLDTIDFALVCEKPGLMAFRKEERMVKLGGAS

SEQ ID NO: 88093 - protein, 117 aa, Unknown
  Obtained from environmental sample
  DOMAIN (92)...(115): 4Fe-4S binding domain
  misc_feature (1)..(117): Xaa is any amino acid
TDIGTAMTKASLCMLGCTAANPTISTLKNFREEYMEHIVDKKCRSGKCKHLVRFTIDPEKCIGCGACAKKCPADCITVEEASRYPDKKRPPYIVDQAKCLKCGECMKNCKFGAIKKG

SEQ ID NO: 88094 - protein, 560 aa, Unknown
  Obtained from environmental sample
  DOMAIN (4)...(68): 2Fe-2S iron-sulfur cluster binding domain
  misc_feature (1)..(560): Xaa is any amino acid
MVNITINGKTVEVEDGTTILEAAKKVNVKIPNLCYNPDLPPWASCGICIVRLAGSPKMLRACTTACENNMNIITHDPEIIAVRRTVLELILSNHPNDCLQCPRNGSCELQTLADEFGIRELPFKHISNGLPIDDSNPAIVLNPEKCIRCGRCVRVCQDVQNVWAIEFLGRGIKGRIASAADASLGESPCIKCGQCAAHCPVGAIYERDDTVKVWAALQNPDCHPVVQIAPAVRVALAEEFGLEPGTVFTKKIYAALRRLGFKTVFDTNFSADLTIMEEGTELVKRLTEKKSDIPLITSCCPAWVDYMEKYYADMIPNFSTAKSPQQMMGAMIKAYWAGKAAVDPEKIFSVSVMPCTAKKWETHRNDDMKSAAKFLGKELGEAIGWDVDISITTRELARMIKQAGIEILKLKDEEADNPLGPYTGAGTIFGTTGGVMEAAVRSAYFLVTKKELGDVNFKPARGLEGVKEAEVDFGVELPNGLGKKIRIAVAHQMGNIEAVLNKIRAARDAGKETPYHFVEVMACRGGCIAGGGQPYGCTDEIRKQRASGLYADDEKSQYRC

SEQ ID NO: 88095 - protein, 377 aa, Unknown
  Obtained from environmental sample
  misc_feature (1)..(377): Xaa is any amino acid
MKIKIKLSLIMIAIMAIVAGGITVIELMQASAISLRLSLRGLNYLAREQAQYWQGREEGYIKQLTGIADIMGEFEMLPVQDRRDLYDNMLKATLNNNPNFARIFSIWKPNAMDGMDSRYIDRPGSTPTGQYAMTLGRDTGPIEVKPNLVINEINAWMDGPNALKTRVENPTPFKNNGKDTFIIRIGVPITRSTSSEVVGHLCALIDIAPMQAEVEKTIKSHEEISAMVLYSGNGMIMGHLVPDRVGKMLSDVDTIYGDYIKEADKAVREGREFQCSSYSPVLKADMKITMIPYRIGDSGMYWTVMIATSEAYIMKEINRITRFTIILTAIVIIVASVIVYSIFDFSTKPLEWVTWEIPGGMNEMANGTDQTSGKQCQ

SEQ ID NO: 88096 - protein, 743 aa, Unknown
  Obtained from environmental sample
  DOMAIN (62)...(206): GAF domain
  misc_feature (1)..(743): Xaa is any amino acid
MVACAVGNTLVRVSYGDEYVVAAYTRDLREYEQMMKGLEQRDIMLQTVNQVAHILLKSETDEFSKNLWRCMGMMAGAVNIDRVYIWKNHTMEGKLYCTQLYEWSEGAEPQQGSDLTINVSYDENFQRWKEVLQAGQCINGLVRDLPPEEQAWLSAQGIISILVVPVFLRDEFWGFVGFDDCHRERMFTDNEETILRSGSLLVANSLLRNEMNVNLLVSAARLESALEKAEAASRAKSNFLSNMSHEIRTPMNAIIGMTTIGKSAPTLKRKNYCFLKIEDASNHLLGVINDILDMSKIEANKFELAPVEFNLEKMLRRVVNVINFRVDEKHQELSVNIDHSIPRALIGDDQRIAQVITNLLGNAVKFTPEQGTINLTVRLAEKVNDVCTLQISVTDTGIGITLEQQKRLFRSFEQAESSTTRKYGGSGLGLAISKNIVEMMNGSIWVESEQGKGSTFTFTIQLTPGKEEKQDHLLDVNLKDIRILTVDDDPDILSFFKEVTQRFGITCDTAASGEQALDLIRQKGDYNIYFIDWKMPNIDGIQLTREIKARKPDNSIVTMISAAEWSTIAKEAKVAGVDDFLSKPLFPSTIAEVINECLGVEQAEKTQKADINGIFEGRRILLAEDVEINREIVQTLLEPTKVDIDCAENGEQAVRMFSESPQKYDMIFMDVQMPIMDGYEATRSIRALNIPEAKTIPIVAMTANVFKEDIERCLEAGMDGHVGKPIDFDEVFGKMQSYFDKAE

SEQ ID NO: 88097 - protein, 372 aa, Unknown
  Obtained from environmental sample
  misc_feature (1)..(372): Xaa is any amino acid
MRDTIKCIFRTKNPTPYSRLPIPFFTLLIAHCSLLIGCYTLKQGTTMLGYLSRAVPLESLLKSENSGADGSEAEKNRRFVERIQDIRRYAKEELGLNMGKNYTRYVKIDRDYLAAVVSACAADSFTRHEWKYPVVGVMPYKGFFKVEDARKERTKLEKKGLDVWIRGVDAFSTLGWFRDPLYSYMRDYPPDRLADLIIHESVHATVYLKGQAQFNEELAEFVGSEGARLYIISRYGADSAEYRNMLADQADNKRYVSFIQELIRELNELYESGRSGEEKLSEKEKIISAAKERFTAEYEKIFSGEGYRGFLEMPVNNAYLELYRLYYTEDSYIAGLFANSGKTLPEFIAAAKSIPKKGNGRETLAQALQNNK

SEQ ID NO: 88098 - protein, 366 aa, Unknown
  Obtained from environmental sample
  misc_feature (1)..(366): Xaa is any amino acid
MAFNLRTVPPQGDISVPYYIFAPNGNGNRDTLPIRVTTEGNDEWNMVISSSNNTAVRSWNWTGRAPAVSIVWDGKDEAGNVVNDGTYNITLSSTDDAGNSTRKNVNNIIVDANVPKIFLTASAQAIAPKPGETEAMRFNIMATPAEGITFWKLELRDENDELIKSFPSPSGGSGPLPAVLPWNGANERNAIIEGRITPTLTVNYAKGDIVNVSAPPVTVDISGPILGFFSQPEFFSPDNDGVDDELFITLSARDASPIAEWSLEIHETEGTKQLFYRIGGRGSPADRIIWDGRSNWGELVQSASDYEYTYSARDTLGNSSTITGKISTDVLVIRDGDILRILIPSITFRANYADFIGIPQERQETN

SEQ ID NO: 88099 - protein, 255 aa, Unknown
  Obtained from environmental sample
  DOMAIN (184)...(219): UvrB/uvrC motif
  misc_feature (1)..(255): Xaa is any amino acid
MKNSKDEIIYIGKAKLLNKRVRSYFDGREKSDHRAATLMVAHIKDIEWIITESEAEALILEANLIAKHQPYYNIRQKDDKHYPYLMLTMQEKFPRLRITRHTKDDKNLYYGPFTSSYYIRTILDLVPRIFHLRECGYKLPQEKIRPCLNFHIGRCKAPCAEMVSEKEYMKGVMSAKMLLEGKNNEILADIEDEMHNASAEMRFEEAGKLRDQIRAVHNAFAKQKADKANQADLSLDVIAICRAKELATVVIIEYR

SEQ ID NO: 88100 - protein, 130 aa, Unknown
  Obtained from environmental sample
  DOMAIN (4)...(121): HEPN domain
  misc_feature (1)..(130): Xaa is any amino acid
MARYEEWIKRAKSSLELAQAEIIHYIYYEDLCYQSQQAVEKALKGLLIYYGVEPEFTHNIEILLNKVKESTDIPENIKETAQLTNYAVQTRYPGEYDEITQEEYEESIKIAKDCLHWVEKKMSASGNLPR

SEQ ID NO: 88101 - protein, 252 aa, Unknown
  Obtained from environmental sample
  misc_feature (1)..(252): Xaa is any amino acid
MNIGINASALSAQKGGASFYILNIVKALAQTDTDDKYFIFTTKAAKDQFSDLPSNFTVVPCAPSKTIFRLFWEQSSLPLIICGKFKIKVLFSPNYTAPLIRFGFSSVVTIHDLSFFPLSKYYPRSRRFFKQIIHLSVKFSDKVIAVSEFTKNDILKYIGKKYENKIRVIYEAADVKFLNKPTIEQIANTKKRYKISKEYILFIGFSEPRKNLERLLSAYSMIKDNIDHDLVIVGGHGWWYEQTYLKVNDLGI

SEQ ID NO: 88102 - protein, 350 aa, Unknown
  Obtained from environmental sample
  DOMAIN (8)...(262): NmrA-like family
  misc_feature (1)..(350): Xaa is any amino acid
MPNKNPNILVTGATGFIGQHLTRKLLDVNGVRSVRAVSKDDSGSKLYFFRDDEVDSRKADISDRESISGIMDGIDVVYHLAAISRNDLSKTWEDFYAVNVQGTVNLLEEAKSAGVKRFVFASTVEAAGFGDGVSPRVETDAPNPVNNYGKSKLSAERQVLSGAWPMECTVLRLPMIYGPGTFLIVPKLFGMVRRGFYPMIGGGSAKMEFCYVDNAVDGIILAGEKREAAGELFYISDERSYSIREVVSTIAESSGKRVFFIGIPVFAANFLGLCWEIAAKILPFPPIISKYSRKPFFSRETVFWTTRDVNTVSTEKIRRVLGYSPAVNIKEGTRRTAEWLNENLFRKTAE

SEQ ID NO: 88103 - protein, 451 aa, Unknown
  Obtained from environmental sample
  DOMAIN (14)...(50): Sigma-70 factor, region 1.2
  misc_feature (1)..(451): Xaa is any amino acid
SRAASNDKETSLVDDPIRLYLREIGKEHLLTAEQEIDLSKKMEEGENIIKSVIKRSGMIIPEFFQIAQKAFAKKDMKELNFSKKEITEYMTECRRLNQFYKDTLRTIHGDLKNYIDLKNHLISKDMDYLEDKDCSTIRKRIMRALKNIHIHPDEILAFSEKFLQASRKIKKYVKEQERLQKHLKVVSLKELRTLGRYLTIKDERERVEAELGLPSDEIKEKIKLVQVTQKKLRTLEAEFEETTDNINDMAGEIQRGRVMMKNAKDRLIKANLRLVVSIAKKYTNRGLHFFDLVQEGNIGLIKAVEKFEYQKGFKFSTYATWWIRQAITRSISDQARTIRVPVHMIEQINKVVRESRQLLQSLGREPTDEEIAEKLGWTALRVKSVKNVAREPISLETPIGEEEDSLLGDFIEDKDVENPANQTAFTLLQEQLEGVLKTLPAREQEVLKMRF

SEQ ID NO: 88104 - protein, 431 aa, Unknown
  Obtained from environmental sample
  misc_feature (1)..(431): Xaa is any amino acid
ALTYLRVYNNQLTTLDVSNNTALTWLEVDGNQLTTLDVSNNTKLTTLGINGNYPELDLSKYPALTRLSVFNNDQTALDFSKYTALTGLSVYNNSNLTELDVSNNTALTNLFVYNNNQLTELDVSNNTALTNLSAYGNQLTELDVSNNIALRTLNAGGNRLTTLDVSNNIALTDLSAYGNQLTTLDVSGLTVLMDLRVYNNQLTTLDVSKNTRLQVLIASDNQLTELDVSGLTSLNYLQVQNNYMANETAVTGFTKTWDGTNRIFWKQNIATPPANPTNLTATYGQTLANVVPALSGGWAWQEPTTTPVGNAGTQTHLAKYTPDPDKYNNDPIENLPLTITVAKATPTPPTTPGTLTATVGQTLADVSLATHSGWSWMNTAELVGEVGERTHKAKFTPTDVLNYNVLENIDVKVAVSANSPIIPQLATNNIR

SEQ ID NO: 88105 - protein, 438 aa, Unknown
  Obtained from environmental sample
  misc_feature (1)..(438): Xaa is any amino acid
LKSYAGKAGTIYKSGIPNEGNAVGYGYAGKTGATGKSGIPNGGNAVRYGKRAGKAAATVKSGIPNGGNAVPYGYAGKAGATSESLLPNAGNAVRYGKRAGKTAATVKSVIPNGGNAVRYGKRAGKTAATVKSVIPNASNAVRYGYTGKIGAITKSINPNGGNFACRGKGYAGKVGATGKSTSTIKTTSFNTDYAVRYGYLGKSGAITKSASLYGGNAVGYGYDGHLGTTVKSELPYGGKFASGFKDYASQVFAVTKSAKTIIIITIFNYGYAVRYGYAGKAGTISKSGRSYGSGFASGGKDYAGQVFAATKTGNAFNAVPYGYAGKVGVRVKIKPVQVGNAVPYGYAGKPRAAGKSVIPNTGDAIRYGYAGKSGTAKSVIPNASNAVRYGYADKAGAIVKSLIPYTGNAVRYVYAGNVCVVHKSAIPDFGNAVGDSYT

SEQ ID NO: 88106 - protein, 86 aa, Unknown
  Obtained from environmental sample
  misc_feature (1)..(86): Xaa is any amino acid
EAGPEAILPLTRMPNGNLGVQTAGGGANVTVNIINNSNAEVRQEESTDAEGNKQIDVMIGQFVNNHITAGKADRAMSRFGIRPVGV

SEQ ID NO: 88107 - protein, 485 aa, Unknown
  Obtained from environmental sample
  misc_feature (1)..(485): Xaa is any amino acid
MELVITASGRPESTSALSKIILPLNNGSITPEDAGRLYSASAKKESVFVYNGKEAVALEVFRRPGADPLRLSREIQKTAKEAASLFSRDAQIEIVSDASPSLLSQINGLLISAALGVLAVFCVLLFFIRRLKYSLLAALSIPVSAAAGICLLSITGRSLNSMSLSGLAMGIGLVSDISVIILDLLNRSFEKKDIVPTTTPPESEEIGNKVFSISGSSAASTLTTALVFLPVIILPGPLGSLFGDTAVAIVTSVAAGWFYAQFCLPSLYRLFFAFNTRSTVIRDGSLEKKYSRFLLHLLRYPVKVFAAAALVVVIGLLLIFLRPVVFINPDEAEEVWVSVNYPSGILLETAGITGKEISRIVSGLPSVKTVYGRAGAEEEDTSGRAGIDYRKEDFTLRCALKKGIKPEKALAEIRAVMENFNQQPFSVYFPKDKTEVLLGLSSMRTFAINGKDREELLERVEIAQDALKAAQTEVNFRPMGKRPEL

SEQ ID NO: 88108 - protein, 64 aa, Unknown
  Obtained from environmental sample
  misc_feature (1)..(64): Xaa is any amino acid
VFTQGNPDPTLFQSYFDYTKNMFQLLEFDVQPVQVIAGMRNGQAHDRKDLNALMNAIGSSLVLE

SEQ ID NO: 88109 - protein, 254 aa, Unknown
  Obtained from environmental sample
  DOMAIN (29)...(143): Oxidoreductase family, C-terminal alpha/beta domain
  misc_feature (1)..(254): Xaa is any amino acid
VNDRRRKNNKRKLAVCFQNRFNTPVQKLRTALEAGRFGKILHGMIQIRWSRNEAYYAEAPWRGTWEQDGGTLMNQCTHGIDLLQWMMGEDAVRVQAQTRRFMRPIEAEDFGAAIVEFKSGAVGIIEGTADIFPANINETLSIFGEKGSVVIGGLAVNKLEIWRFADADSAGDTEDKVLNPNEKDPPTVYGFGHTALFKDFIDSIESDREPLVSGESGKKALEVILAIYKSQKTNKPVDLPCDFSTLDMKGIFDK

SEQ ID NO: 88110 - protein, 337 aa, Unknown
  Obtained from environmental sample
  DOMAIN (134)...(219): Cache domain
  misc_feature (1)..(337): Xaa is any amino acid
MKLSIRVPLLITAVVLITSAAIIVSVNLLVTRNMEASVINGMVGNSKINAELLDARMEVLRNQLWEIANRARTRTMNWEDVVKANFEPDVDRIDSLDMGLVFPDGTTHYVRDDAVANLGDRAYVKKAFAGNTTISDVLISRVTNKPVVMLAAPVFKDESKDAPVLGVVVARKEGSKFLSSLVNHILTNYKTEYGFLVNSEGTIEAHPDMELVNKQSNPIKEAETDPTQKPLADMIAKVIEEKTGSAQYTNNGKEMVCAFTPLPGYDWILIQNVEKSEVMAPVVHIRNTMLIIGLICGALGAIVAIFAGRSITKPLTDMTKIVKYTGSGDLNQARHIK

SEQ ID NO: 88111 - protein, 349 aa, Unknown
  Obtained from environmental sample
  DOMAIN (259)...(326): Oligopeptide/dipeptide transporter, C-terminal region
  misc_feature (1)..(349): Xaa is any amino acid
MSDASVSVTSVSVNRSENKDVILKLSDLRKHFSPHTNLLEMFGGKVKNPIKAVDGVSFEIRRGEIFGLIGESGSGKTTIGKLVMKLLDPTGGAIYFNGEDVTKTSSERTQSYRRQVQMIFQDPYASMNPRFKVRDVLEEPLVIHKIPGSMAEHEQMIIKALNEVKLNPPEDFIGRYPHMLSGGQRQRVATARTLILNPMLLVADEPVSMIDLSTRAEILHMMRDVQRDLGLSYLYITHDLSTARYFTDRIAVMYLGRIMELGNADDLIDRPMHPYTRALIEAVPEPETGKVGLIKNLPIHGEIPSPANIPPGCRFHTRCPLAKAECSGGEEPELHDLGNGHFHACRLTD

SEQ ID NO: 88112 - protein, 239 aa, Unknown
  Obtained from environmental sample
  DOMAIN (34)...(238): Binding-protein-dependent transport system inner membrane component
  misc_feature (1)..(239): Xaa is any amino acid
DVVDPKLYITGRVSGALGTDTLKRDIFSGVIAGLKWALFIGFVTSVIAVFIGVMYGIVSAYFAGFTDTVMSFLFELFVSIPILPILIVMSAIFKPNIWIIIATLIVFSWVGPVKTVRSMAMQIKEETYIEAAKALGSGKWRVIFKHMAPLLLPYSFASMALSVPGFIVFEASLSLLGLGDPTIVSWGQILHDAQSSGATLNGLWWWIVPPGLFIAIMGMTFAFLGFAMDKILHPKLRTR

SEQ ID NO: 88113 - protein, 478 aa, Unknown
  Obtained from environmental sample
  misc_feature (1)..(478): Xaa is any amino acid
YALDVTEKTDYYLWWNKRINGDGTKTLEIDVYAYDENYELFSLFFFYDNAWLYYVKYTAVYTGTVYLKVRARSIDNPIGTYSIVYSTGSTRPAGGSDYTVVFNNNGGNGTVSSITAHSGNAIILPGGYELTKGDYFFVGWTDPSGNFYNAGSYYTVTENVILYAKWGSEALGGDVNPIPLAPGEWVNGEITESTTNKELYYSFNVTQGTVYYIWWNEKGNDSGDGNKTLDINVNAYLNGMLLYSFSERSTAWNLPQSFTAASTGTVKLKVTPSSSNSIGTFAIAYNTSFAYNVAFNNNGGSGTVTTIMAAPGSVIKLPDGSGIKRNRYLFSGWNTRLTGYGTDYSVGADYTVTGNVTLYVKWADSYTVTFDLNGGTGVVPDSVSAVYGTVITLPSGDGFSKSGYAFGYWTDPDGYYIAGSSYTVTKNVTMKANWLNNTVTFNINGGTGQTPSSVTKIRGESIILPNGGGFTKSRYAFG

SEQ ID NO: 88114 - protein, 377 aa, Unknown
  Obtained from environmental sample
  DOMAIN (42)...(234): ATP-dependent protease La (LON) domain
  misc_feature (1)..(377): Xaa is any amino acid
VKRGGNAKKTTGLSSFLSGLKRVNAGWLSEGGGRLTKEIFTLLPLHELVLYPHTVVPIFITAHDGIAAVDEALRRDNRLFAACLKKRDQTYPEGEEPWPVGTVVRVIQHLRLPDNTYRVVLQGEYRGRIIGIEQRVDYSLVKIEPIDSGFFSNPPLPEDVALMRAVQRSFAQYAELSKKIGSETLLAVERTESPERLANLICNSMQLKPEKKIELLAISGAAERLVAILETLERENEIYGIQKNISGKVRSRMEKHQREYYLHEQLKEINKELGKDKTEDEFGEMEKQIAQKNPPAEVLAKAGKEISRLRKLQPLSPEAGVLRGYLEWITDLPWSNYSVDSGDLEEAQKILDEDHYNMRKAKDRIVELSPCASFERR

SEQ ID NO: 88115 - protein, 286 aa, Unknown
  Obtained from environmental sample
  misc_feature (1)..(286): Xaa is any amino acid
VVLCLLVLLVLAGGTVFAGGSSSGGASSTASQTRTPVGQYPIETDVTLTYWVQLHNNISPNYTNLGDTPFYKELLKRTGVKVSFEHPPSNAVNEAYNVMVASGDLPDIIEYNFTTLPGGPPEKAISDGVITRLNDVIDKWAPNLKAVLKAKPDWDKWVKTDEGSYYVFPFIRGDPKLLYTQGLMIRRDWLDDLGLQIPQTIQDWHDVLVAFRDRKGATAPFTMTWSNRGRMFMPGFNILNEFYISADDKRVHYGPMEPGYRRWLETMAQWYKEGLLDKDIMTVTAA

SEQ ID NO: 88116 - protein, 232 aa, Unknown
  Obtained from environmental sample
  DOMAIN (22)...(232): Glycoprotease family
  misc_feature (1)..(232): Xaa is any amino acid
MNLLAVDTATEKLSIALASNKDVWLFEADAGLRHSELVMEIIDMLFKKAALKPEDLSGIVCMGGPGSFTGLRIGFSLAKGLALALGCPFAAIPTLDCIARPLSSLKGLAVPVLDAKRSSFFCALYRDGARICADMDAGPSAIATVIADAASTGQAKQVLLFGPGAEMLYGKLTQLPQSPLADINILVGKGLRWGNAQTLLEIALETDIFANSVTDFSAGPEYIRKSDAEEKK

SEQ ID NO: 88117 - protein, 87 aa, Unknown
  Obtained from environmental sample
  misc_feature (1)..(87): Xaa is any amino acid
MKIVAIKDVVRKDVPIYYRLLYTGVAVIELAKGAANYRIDFTIEIKPTGQKEISVTFLDNLEYPLLPVIKELKALINKMHEDELLPD

SEQ ID NO: 88118 - protein, 523 aa, Unknown
  Obtained from environmental sample
  DOMAIN (1)...(70): Histidine kinase-, DNA gyrase B-, and HSP90-like ATPase
  misc_feature (1)..(523): Xaa is any amino acid
ADTGKGIKQKDQAKLFDEFVQVDTRKNRNIEGTGLGLAITKRLCIAMGGDITVESEYGKGSTFTATIPQTIESEAPIAMVEEPEKKNVLVYEGRTIYAQAVCWSLNNMKIPHTMVTNFDDFKEALYQKEWFYIFSGYGLHDKIKPLLEQVNTAFRGGKIPPLALMVEWGTEAYLHGVRFVSIPVQSLSIANILNGKADSKGYNESSGIIRYAFPSARLLVVDDIATNLKVAEGLLAPYRTTVDTCLSGLQAIEMVQQNNYDIVFMDHMMPEMDGIEAVSVIRAMEDERYKTMPIIALTANVISGMRELFISRGFNDLLAKPIDVFKLDEILDRWIPEKKKKQGTGNGDRYSTSDSPVPSPLLPVPGVDVQRGIAMTGGTLEGYRLVLSTFSEDAEHRLPMLQKAPEAEALAVFTTQAHALKSASASIGAAEVSAQAATLEAAGKAGDLELIGKKLPAFAECLAELVKNINTALKETIPHESSGLSPVIPARLLQELEAALKAQDISDIDRILGETHEEPLDSK

SEQ ID NO: 88119 - protein, 370 aa, Unknown
  Obtained from environmental sample
  misc_feature (1)..(370): Xaa is any amino acid
MYCYYPLDKGWPARASTLVQPGKAGFAWDYAYDDYFPYQGGLGGNTNGEPFASMRDVRRHGQDVILTLTVDCAVSDEHLVQIAKDLIPFGRLMLRINHEATGTWFAFNKRYTYQQVADFYVRFHNIVKQHAPHISTILCIGGALKTKSGKLDYEDEFAQAIAETDIWSSDTYLSLHWGWPFDIAEPGGKSHKRSTNKTILEGLCFDFERFVARAGKPKPFVLSEINADGDVNGPYEQAEQLVDFYRRIPKEAPDITGVTFYQFRDRGRLGLEMEDPNNSNVGIAQPFLEDYKKIMADIYYSPKMEQGEELAFPAKLRWGSSEDADGITIPIDFEGNPVFCEVMFTDPGDAERLNAMMEINGKWFYKKPGR

SEQ ID NO: 88120 - protein, 77 aa, Unknown
  Obtained from environmental sample
  misc_feature (1)..(77): Xaa is any amino acid
MLDIKNIKITPEMLAQIAELDEFKGTWTGYKQLRPEQLKTLKKVATIESIGSSNRIESNKLSDMEIEKLLSHIDKKS

SEQ ID NO: 88121 - protein, 268 aa, Unknown
  Obtained from environmental sample
  DOMAIN (196)...(263): ACT domain
  misc_feature (1)..(268): Xaa is any amino acid
VAKNENGDITTLGRGGSDLTATMIAAACKAVEAQVWKDVDGILTADPRIVKEAKPVEAVTYEEASELAYFGAQVLHPRAMQPCIVTGTPVRVKNSYNITAVGTRIVPALDKKSVPVRAITSRHAVTLVDIVSTRMLGQYGFLAEVFSTFARHRVSVDMVATSEVSVSLTLDAAHDLTAIKKELSRIASVEIKTGKAIVTIVGNVKRSSEILAKAFKTCQLIGVPVQMISQGASKVNISFIVNDSEAVEVVKALHLDFFADQKNQKGQK

SEQ ID NO: 88122 - protein, 133 aa, Unknown
  Obtained from environmental sample
  misc_feature (1)..(133): Xaa is any amino acid
EFQQGVAVSQVLGSIKAIIQDGHFVADVVVVDGYDFSNTSAEDFAAFKAFAEELQVSVWFSATTHRDDPRRDANGVPAVLSPYMDKTAILILMEPMVGYVHLHLVKDHEIFPAPDSLHLKLDPQVMLIAEEPA

SEQ ID NO: 88123 - protein, 403 aa, Unknown
  Obtained from environmental sample
  misc_feature (1)..(403): Xaa is any amino acid
DGKFEAWKGNREQGAGSSDSKKSDKRQSAPVKKDQKTVSKEQPWEEFKGYVERLVGLVGYLNASDKTPSERMLKELALRIKERQLVAAAALGYGLLSALRPIIGRADGSLAANLAFEHWDLDRKLKEQFRIFGANDDEVWRLGEICKAVLRRTGEDNSAVINDTIVNKKAAAFDAGRFAASLFINNHSHEDFRRLIGVNVFNDVTWFNKEAFESALFYGKLFFVLESDSAYTHSCPDRTARIAEVTETMKKAEIDSGYRLDNFIQLLSGDEAPQAAMPEASKPQASAPQVPQLKKPAAVKKPVETKKPTLKKEAPEAKTTATKKPAPKKEAPATKTTTAKKPAPAVKKPAATKKPTLKKEAPEAKTTAVKKSAPKKESPATKITAAKKTAPKKTIKGKKRNET

SEQ ID NO: 88124 - protein, 55 aa, Unknown
  Obtained from environmental sample
  misc_feature (1)..(55): Xaa is any amino acid
GFGTTSDWVAVSVGGSHSLALKKDGSLWAWGDNEKGQLGDGTYTAKNVPVRVDSK

SEQ ID NO: 88125 - protein, 258 aa, Unknown
  Obtained from environmental sample
  misc_feature (1)..(258): Xaa is any amino acid
MRVFLSVYPGFTLAIPMDAVASMMLYNQETEKIVQYDPKSRCTFISLPWLFNMRDLEVPHGVIMREWNSKENKVVLLTAEVKSVIEIPDEEFSSIPKALGDLRFSKIFSGIKFSDKPVLLLNVDQLLQIIQNERWVLDKKTSPPEQPVPAVTSETSPPAASKVIEEPPVSPTVTNEVIEVCEVVEVCEVIEEPSTSPTVTSEPSSPATSEIIEEPPVSPAVTTEPSPTAASEVIEEPQVSPAVTSEPSPSVTNEVIEV

SEQ ID NO: 88126 - protein, 526 aa, Unknown
  Obtained from environmental sample
  DOMAIN (8)...(423): Glycosyl hydrolase family 57
  misc_feature (1)..(526): Xaa is any amino acid
MEFRYAISLVLEAHLPFVREYQKENDLSQAGEESRFFEYVSETLLPLLEALHRLESDHIQFRLALAISPILIHLLTDDHLQKKYLSYIDKQIEFGRQEIERTANNDELNKLAQHYYNTIVDRRIAYTERYEKNILKALDSYRRKGKLEILASCATHAFLPFISHNGESLQAQMEIPIPAYRRHFAGVPQGFWLPELGWSSALESYLRDYNFSYTIVDSHGLLFGNPQPEKGTFYPVKTPNGTYILARDLYAVREIEKSAVDEIYRNNDRDVGYDLPPETVKPFLSAEGERHRTGYKYWQRSNKNYNPQAAVGRAAEYAKTFMDNTIARLEEASKHMEEAPLSLYANNAGFFGNLWHEGFQFIETLFRLAHEHKELKFICPSEYIFKQDFTKIQIVSPEFSSSGVNGYAETWLDVSNDWIYRHLARSMERMTELAERFPDDTGLKERALNQAAREILLAQSSDWPALLFRQDSTEYACNQAGNALRNFTTIYEALGSNYISTEWLTTLERRHNIFPGINYRVFRRKK

SEQ ID NO: 88127 - protein, 382 aa, Unknown
  Obtained from environmental sample
  DOMAIN (232)...(380): RNA polymerase Rpb1, domain 5
  misc_feature (1)..(382): Xaa is any amino acid
MSPDRLGQGRVFSGTEEVLHAMAAKQVDIHAKIKVRHNGKIIETTPGRVVFNTVVPEGIEFVNELLNKKRVQQLVERVYNAAGTKTTCKFLDEIKALGYEYATRAGITFGAEDLVIPDEKKEIIDKSQEEVTRIRKQYDRGIITEGERYNKLIDLWTHTTSQIADKMHERLAGDKNGFNPVYIMMDSQARGSKDQIKQLAGMRGLMQKPQKKITGAVGEIIENPIISNFKDGLTVLEYFISTHGARKGLADTALKTADAGYLTRRLVDVVQDVVVYEEDCGTPKGIYIGALKEGDEVMESLSARLLGRVTQEDVYHPVTEELICPVNTLIDGELAHKIEEAEIESVFIRSVFTCDADFGVCQYCYGRNLATGKLVDIGEAVG

SEQ ID NO: 88128 - protein, 464 aa, Unknown
  Obtained from environmental sample
  misc_feature (1)..(464): Xaa is any amino acid
LQNWAREINSGNEAVACYVTIERCQRLPEPERCMPNICVAIQEHAVFSELPVPVLETSEPNSMVSNILADWSKKTAPKPLVLLFDEVDALEGDAMISFLRQLRGGFMNRGIGKFPVSVALVGMRDLKDYITLAKDGVQPSPLSPFNIKTDSILLGNFIQDDVKKLFAQRTEETGQQITDEALEYVWEQSQGQPWIINSLFERVTMRILRRDNYSTVMREHLEQAREQMILARETHLDSLAVRIQEPAIRKVIESLITGTPDPELTSSEGFRICTDLGLVKKERNTPIVANPIYREVLARQLTYSAQDAIPEPEWQWEKPDGSIDMDALLREFQVFWRRNSEMWEQKMNYTEAFPHLLLMAFLQRVLNGGGHIEREYAAGRGRMDLAVEYNNKIYIIEIKLIHYYNTPQEIREEGLEQIIKYRDKINSSAPSYLVLFDRRPEAKEKLWEEKLTWQSERGITVVGC

SEQ ID NO: 88129 - protein, 753 aa, Unknown
  Obtained from environmental sample
  DOMAIN (599)...(723): Anticodon-binding domain
  misc_feature (1)..(753): Xaa is any amino acid
MKGYNVLHPMGFDAYGLPAENYAIKTGTHPAVTTAANVNRFRAQIKALGFSYDWDREVDTSVEDYYRWTQWIFLKLFEKGLAYEAESPINWCPSCKTGLANEEVKDGLCERCGEKVTRKRIRQWILKITAYAERLLADLDLLDWPEPVKLMQRNWIGRSEGANVVFKVDKSTLKDNEDLSFEIYTTRPDTLFGVTYMVLSPEHPLVEKLTTPEQKQAVASYIEDAAKKSDLERTDLAKEKTGVFSGAYAINPVNDEKIPIWIADYVLISYGTGAIMAVPAHDERDWEFAKEFNLPIIEVVASEKPQAGKDYSGEPAECTVADGYSVNSGAFTGLPTEESKKRITEWLEEKGIGKHAVNYKLRDWVFSRQRYWGEPIPIVHCEKCGIVPLSENDLPLRLPQVKSYKPTGTGESPLAAITDWVSTVCPKCGGKAKRETNTMPQWAGSSWYYIRYLDPKNDKVFAAKDKVDYWLPVDLYIGGVEHAVLHLLYSRFWHKVLYDLGLVNTVEPFQRLVNQGMILGEDNQKMSKSRGNVINPDDIIKEYGADSLRVYEMFMGPLEVSKPWNMAGVTGVSRFLERLWAISDKPVSEATPGSEQAGGAELQKLLHRTIEKVTKDTSTLNFNTAISAMMIYSTELAKLTEIPRAMWEPFVIMAGAYAPHLGEELWEKLGHKESVSLSQWPSFDPALTVFDEVTIVVQVGGKIREKFTAAAGTAKEELEKTALTLPGTQKWLEGQTIAKVITVPDKLVNIVLK

SEQ ID NO: 88130 - protein, 415 aa, Unknown
  Obtained from environmental sample
  DOMAIN (55)...(174): Region found in RelA / SpoT proteins
  misc_feature (1)..(415): Xaa is any amino acid
MIEENINENITTPEKNQLQKEYDQYAQIRHSIANDIKLQVDDILASLDSRPVVSGRIKNFNSFFSKYIRLLKEGVKKPQITDLLGVRVICPFIEDLVAAEDLIKRNFTVVEREMKGHYTFQEFCYESTHLLIIIPQVLIDKYGNPGIDIAEIQIRTILQDAWAEVEHELVYKAEFSPFDEPMKRKLAAINASLSLADMIFQEIRSYQRKYSKEMGKRRESFFQKIEESTDHLLFDAENVKTAPPIIENDNSQITTDYNESIDDLLVKALSAHNNNQFNEAISQYTRILELKPNDNILSIIYKHRGMANFACSCYNEAIDDFSNSLELDNQSYKAAYYRGVVYSVIKQYLKAIDDYTLSLSINPYQSFCLFRRGQAYYHIGDYPQALADCENSLALEPNNKSALKFKELLQNKLRM

SEQ ID NO: 88131 - protein, 319 aa, Unknown
  Obtained from environmental sample
  DOMAIN (184)...(290): GTPase of unknown function
  misc_feature (1)..(319): Xaa is any amino acid
MFHGGLVLRGSRNIFTVRPNTEQSGQHAIECRIKGKVLKISEDHYNPIAPGDLVKIEINPAQPGTGMIVGLEERKNFFSRFNQKGNCPQLLAANVDMVLCMTSRQSPPFRPRFLDRVLLQADSAGIQAAIVCNKIDLDGDDYTDDRLDADERLEDFTRIGFEVAFISTKTGEGLDDLRHRLEGKRSVLIGQSGVGKSSLINALMPEINLRTGTINEKYDRGNHTTTLSAMVEIDSGTWIIDTPGIRRFIPNGVGADELILNMREFAPLAGKCSYGLSCSHRSEPGCKIMEAVSAGVIHEDRYNSFLRIHDELSGKNDAD

SEQ ID NO: 88132 - protein, 572 aa, Unknown
  Obtained from environmental sample
  DOMAIN (296)...(521): MutS domain V
  misc_feature (1)..(572): Xaa is any amino acid
MQTEKSILLQKTLKLLEFNTILERVASRSMSEEASLIIREESPCGEPAAVAKIKKQVQSICLRLGSGDNDPRRYLPSIGFLLPKLKVEGIALELDEACAIGLFLERGEELRKWLSHESMPADMLGEIQGATPSVCGELASEIFRVIDKEGKLRDLPELRQIRQRISRLKAALDACVSRYLANEETRNMLQSTLPSQRDGRTVLAVKANFRGRVRGIVHEVSSSGQTVFIEPEDVVEKNNDILVETRNLEAEIKKILLDLTKQISGHGEEIKSFHLTVLKMEVLMAKARYSLESSGVFTPSDGSGFALVQARHPLLENAVPIDLPMDKGEGTRALIITGPNTGGKTVVLKTAGLLAMMNQIGLAIPAAGGSVLPVFDGVFADIGDEQSISQSLSTFSAHITNVAAIIAHSTENSLALLDELGSGTDPQEGGAIAMAVLDCLIEKKARLLITTHHGILKNYGYTRGEVENASVEFDSRTLSPTYRIITGIPGESRALEIAGRNGLPPEIIERAKSYLDDGRSDISEMIRGLKEKHRELDALEERMRLEEGCLRDERRKSDLKELRLRQKEFELK

SEQ ID NO: 88133 - protein, 418 aa, Unknown
  Obtained from environmental sample
  DOMAIN (1)...(366): Acetokinase family
  misc_feature (1)..(418): Xaa is any amino acid
VGIVEKVTIGGSFITHHAKGKEEVTFEHDCPTHTDAVELIIKTLTNKETGVISDMSVIKAVGHRVLHGGMKFTKSVIVDDAAMAAFNEVKDLGPLHNPANIMGIEAAQKVLPHVPHCAIMDTAWHQTMPPESFMYAVPKEWYEKYQVRRYGFHGTSFLYTAKRAAVLLGQDPFKTNVVICHIGNGASVNAVKDGCSFDTSMGITPLEGLVMGTRSGDIDAALPFYVMRKTGMSDSEIETALNKKSGLLGLTGKFADRRDIQAAAVNGDKQALLAQYIEAHRVKKYIGAYQAVLGRVDALVFTAGVGEFAWFMRNKILEGLEGIGIVYDPKKNELSHTRNTETIISKPESKIPIYIIPTDEELVMTEDAFALMKGTYDIHTKFTYSFQSKDYVNKGRAEGLVHDLAKNPAIEEIIARPK

SEQ ID NO: 88134 - protein, 402 aa, Unknown
  Obtained from environmental sample
  DOMAIN (69)...(106): PQQ enzyme repeat
  misc_feature (1)..(402): Xaa is any amino acid
MRQKLCLLACIVLLCGCSRNGDWVQFRGEGGRGVSSSRIAPPLGLRWKIKLQESGERIRSLNPPVVIGDTIYFGSDDGNFYALDVESGYMRWVFKSGAEINSIPYADKDKVYFGSKDGKLYALSRETGEEVWNFQTQSQINSQVQRYGDYIIFVGDADAIYFLSPDGKEQFSIYNPGWYNYTFLMADDIMYFATGPSVDQVGPFDINKREFLWFLPYHQINATWYSFCAIRGNLLYMGTAGIGYGTELSYYAINRNNGRIEWEQHCDGKMPLFNLENEYRYFLRNIDLLDFMAPIVWKNLVIFTGGDCAARAFDADNGVLRWERLFDTPVSSAPTLSAGRVYFGLLGDEIRKPQLVCISARDGRLLWQMETDGSILSAPVIAGKRIIFGTDENVFYVLEQVL

SEQ ID NO: 88135 - protein, 304 aa, Unknown
  Obtained from environmental sample
  DOMAIN (125)...(214): Transglutaminase-like superfamily
  misc_feature (1)..(304): Xaa is any amino acid
ASGCFHTHSGDPIKLVNTPSRNFSNFEKSSLEHYLELPLDKNDKETFSGWLNGALESWREGREDIIKNDRYFWEIFSERAENLEPVNEYLEKIIAILFNFSEYQYDLNQGKDHSIAALKEFLLDTKEGNCVEFSNTLALLGRLAGIPSRVVTGYLASENLQTNAHLKGIASLREKIPVLQQFPFNNLYMVTNLHSHSWTQFYIPDYGWLDFEATQFAMPPFGAGDFNTWDVVVPVLDQNRVFSNVRKFPWRAVLKTAGIMAVFALVCAYILRYGREALLFFNAHKGGRRGARSLYLLLLAPPAA

SEQ ID NO: 88136 - protein, 471 aa, Unknown
  Obtained from environmental sample
  DOMAIN (7)...(449): Amidase
  misc_feature (1)..(471): Xaa is any amino acid
KKISAVEAASAYIDVIEKNDSRYNAFLTVSKEKALARAQEIQSQIDSGGALSLLAGVPIAIKDNISTEGIETTCASKMLKGYTPVFNAAVIEKLEKAGMIVIGKVNMDEYAMGGSSETGAFGPVHNPWDISRVAGGSSGGSATAVIAGETPIALGSDTGGSIRQPCAFCGVTGIKPTYGSVSRYGLIAYASSLDQIGPIGQNIDDCAALLSIISGPDTRDSTCVIEKPFEFSEPKSKLDGVKIGLPRNYFGSGIDEEVKIAVLAVAKELEASGAIIEEFEMPLMDYLIPAYYIIACAEASSNLSRYDGLKYGYRSDNAGSLAEVYRLSRNEGFGLEVKRRIMLGSFVLSSGYYDAYYKKALQVRSLIKDSYTKLFTKYDMILSPVAPTTAYKIGDNIGDPMKMYMGDIYTVSINLAGLPSAALPCGFDSAGLPIGFQLIGDAFSEKKLINAARVFQNRTNYHLKKPVEVKA

SEQ ID NO: 88137 - protein, 58 aa, Unknown
  Obtained from environmental sample
  misc_feature (1)..(58): Xaa is any amino acid
VSDEVAEGDLLCEIIHPLEGNTIDWIESPTDGTVFFAYNKQLVMEHTDVFNIVPFSDA

SEQ ID NO: 88138 - protein, 653 aa, Unknown
  Obtained from environmental sample
  DOMAIN (434)...(552): Response regulator receiver domain
  misc_feature (1)..(653): Xaa is any amino acid
EFQGHILVVTIPGMYFSERVSDFVIWKTGHIFIDDSEGTVIANIRSEWVQQRVNFIRMGEADSHYAEMGKVIKKGVEGGTGIGRFSVAGIPRICAYRPISGSEEGWLLGVIAPLPESPVSGLDRGLLFVGFIGFLLSVLAAIIASYFIKKPFEKVAALKEEAEAHLRSKSDFLANMSHEIRTPLNVVISLTDLMLEDDHLDKHTAENLTKVSNAGSTLLSIVNDILDFSKIESGKLTLSPVEYYISSLLNDINTLVITRLGEKPIQFRLNINDDLPNKLLGDDLRVKQVLTNLLTNAIKYTREGSIELSVHCTREGNTVWMDAAVSDTGMGIPKDDIKNLFLDYYQVTANSNRHIEGTGLGLPITKRLVEMMDGKISVESEYGKGSKFSFRVRQGFVDDTVLGADVSDKLRNFCYSDEKKIVGKKLVRVNLSYARVLVVDDMDTNLDVAAGILGNYKMQVDCLSNGPAAIERIRGGTPVYNAVFMDHMMPGMDGIETADRIRALGTEYAKKIPIIALTANAIHGTDKMFYEHDFQAFITKPIDVMEMDAVLRKWVRDDKHEEVPVTEESSETDKKIESLVIEIPGVDTKKGLSLYAGSRKIYLPLLRSYTINTPKILDKLRSVSAETLPDYVIDVHGLKGTSAGIGAEAVREA

SEQ ID NO: 88139 - protein, 372 aa, Unknown
  Obtained from environmental sample
  DOMAIN (282)...(365): Hpt domain
  misc_feature (1)..(372): Xaa is any amino acid
MVTSQNEFAASLYSDEWYYVFSGYGLYKKIKPLMEQGDSVFRGGKRPHLALMVERGTEEYIPNVRFISVPIQSLSIANTLNGKNDQRDYFKSSGNSSVIRNTYPNARLLVVDDIDTNLKVAEGLLSPYKVKIDTCLSGAEAIELVKLNKYDLVFMDHMMPEMDGIEAAAAIRKLETKEALGKNGRQIPIIALTANAVVGMREMFIENGFNDYLSKPIDISKLDEILDRWLINNKENEGQDKLPDKDADSSLLIDHCSLPAIPNVDTAKGIAMLRGKVDTYMKVLVMFCKDVSERLPQLQKMPEADTLQAFVIQVHSLKSVSASIGAQEVSSYAAGLEAAGKAADMIFIREHLPDFTIQLSELVKNIHAAISM

SEQ ID NO: 88140 - protein, 448 aa, Unknown
  Obtained from environmental sample
  misc_feature (1)..(448): Xaa is any amino acid
DRRSVEVTVYNGNLGLVKEQRRVKTAAGEGELRFSDVAAQINPVTVHIKPLTDAKDFSVLEQNYEYDLISHAKLLDKYVGKEIKIIDANEYHDRKDVVTATLLSAANGEVYKIGNEIYLGHPGIKVLPELPGNLISRPTLSWIYRSKAAREYNIEVSYLTYGMGWNADYVLSVADGKTAGGISGWVTVNNQSGAEYAGAKLKLVAGEVNRVRPEAAFAAAPRMAKMSVQAMADNAAGFTESGMFEYHVYDLGRSVTVKENQTKQISLLEAQGVNVIKEYVTTPSGPNYFLYNSINEGAVKQPVVAYLSFKNTKENNLAVPLPAGTVRIYTADSKGSQQFIGEDRINHTPKDEEVRLKVGEAFDIVAERTQVDFAQKTSKVTETEWKVTLRNRKEEDVTVRVQENAMGQWDILEPSHKFTKVSATMFRFDVPVAKGQEVAVKYKIRVKG

SEQ ID NO: 88141 - protein, 339 aa, Unknown
  Obtained from environmental sample
  DOMAIN (172)...(227): Bacterial SH3 domain
  misc_feature (1)..(339): Xaa is any amino acid
INEWESTTGRRMTAQEQIRITGRTFKIRTHAEERAKQERAEKRQRIARILSPFAIVDSSSGDGSTFIFGALFGAIGLAVGYAIGGKVGSIGTVIGCLIGGGAGWGIGSNLIGERIHVYLGKLILYFALLIGLVIGGAYLLSSSANFISLFNKLKGKKTEQTQTLAITQQADITQNVNFRKGPSTNDEIIKQLKQGDTVTLTGEVSGGWSQITHNGETGWVSSEYLKKSAEKKPAEPKKAEPKTAETRSAALTAFPSEFAGTWRRNDYDNTLTFTEKKIKSSSQSYSWNFVSESNNAYTIQSDYSGTAHINIRLVNNSIVISGDSGGGEDNGTEHGETVS

SEQ ID NO: 88142 - protein, 429 aa, Unknown
  Obtained from environmental sample
  DOMAIN (5)...(427): Protein of unknown function (DUF1703)
  misc_feature (1)..(429): Xaa is any amino acid
MVGTDANKKPLPVDKSLFDRVIEDGCYYVDKTLFIKNLIDMRAEAVLCTRPRRFGKTLNQTMLKCFFEDTTQIGGRDTRPLFRGLKIEDAGEQYMEHQGKYPVISLTLKDVKRDTFEESYNQLKKLLAHEYKRHAYAVEKISDDSDRDLFKRLSSSTGSSDDYSTSLLFLCECLENCHGKKAIILLDEYDVPLENSWSCSPRFYDEMIAFIRPLFSSVLKDNPHLQFAVMTGCLRISKESIFTGLNNLQVISILDKYYSEYFGFTQAEMDNILEYYGLFEKRQIVRDWYNGYLFGNTEVYNPWSSVFVVDSWLADINEQPKPYWANTSGNDIVRRLVDIANVEMKADLETLMADKTISKPIHEDITYEEIDGDKNKDPDNFWNFLFFTGYLKKIGKGYQNENGESILDLSIPNLELKYIYHTKIQDWLR

SEQ ID NO: 88143 - protein, 508 aa, Unknown
  Obtained from environmental sample
  misc_feature (1)..(508): Xaa is any amino acid
MGQKGSKAAVVITAGFGETGEEGKKLQLEMIEVVKQYGITMVGPNCLGVLNPSHKLNASFGGAAGEPGGIALISQSGALLTAVQDIAAREQLGWSVLASIGNKASLDEVECLQGLKNDKNTKVITAYLENITRGRDFIREAEETSKEKPIVILKAGRTSAGAAAASSHTGSLAGADSTYAAAFDRVGVIRAESIEHLFDVAMAFSYMPLPKGDRVAVVTNAGGPGIMMSDAIEMAGLKIAHFDDATTKKLLETLPPAGSAHNPVDVLGDAKSEMYGKAMDIVIESPEVDSLIVVLTPQKMTDEDNVALKMVELSKKHKDKPIFACFMGSGSIQKGVKILRDNKIPQYGVPERAAKALLEMVKYGRYKARPARKINDFKVDKKVVADIIADYRKRGVHEIGEIQAKEAMRAYGFNVPSGQLAKDAKEAGSITEKMGYPVVMKISSPDILHKSDAGGVKVGLKSRAEVEEAFDKMMVVVKERKPGAKIDGVLLEKMIGGKDEQEVLIGMS

SEQ ID NO: 88144 - protein, 383 aa, Unknown
  Obtained from environmental sample
  DOMAIN (4)...(374): Aldehyde dehydrogenase family
  misc_feature (1)..(383): Xaa is any amino acid
MAGYLESDKARLKAENAKDLEAAKAKGLSAPMIDRLTLSDKALASMIRGLREVAALNSPVGEIYDERTRPNGLKICKMRVPIGVIGIIYEARPNVTVDAAAICLKSRNAVVLRGGSEAFSSNSALCDLFSKSLSEAGLPASALQFIPTTDRAAVELLLQKDAHVDLIIPRGGESLIRMVVEKSRIPVIKHYKGVCHVFVSANADIDKAVPIAINAKVQRPSVCNAMETLLLDAKLDQQKKMSIINALIDKGVTLFGDEESRKLSDKIEAVNEEALYNEYLDLRLSVITVDGVDGAINHINKYGSRHTDSIITESKTEAESFISRVDTASVMVNASTRFADGGEYGMGCEIGISTDKLHSRGPMGVDDLTTYKWIVRGNGQVRE

SEQ ID NO: 88145 - protein, 183 aa, Unknown
  Obtained from environmental sample
  misc_feature (1)..(183): Xaa is any amino acid
VFGIVVERGTFTDNRDNTVYKKVTIGNQTWMAENLNYQPSSGNYWCSANCATYGKLYDWETAKTVCPTGWHLPSRDEWGALAKAAGGTGNYGTGGTAGNALKSTGGWSYGGNGADTYGFSALPGGYRNSDGDFDDAGNYGFWWTVAENGSDDAYRRSMYYDGDSVDEDDYYESCGFSVRCVKD

SEQ ID NO: 88146 - protein, 279 aa, Unknown
  Obtained from environmental sample
  DOMAIN (156)...(279): Domain of unknown function (DUF323)
  misc_feature (1)..(279): Xaa is any amino acid
FTVEVINNGNAARITRYNGKNTELKIPPRIGNRSVTEIGDRAFTRKGLTSVVIPESVIFIGNFAFSDNPIGSVSIGANVYIANNAFESANYNAFSADFYNSQGRKAATYTNNWRIAGAPISPAVTTQLQQASVKTAQPAQVTNTQQPVVSTSIPPAGKSVVLINGGTIPTKEHITVSSFYMWKYEITQKEYKEVMKNNPSYKKGDKLPVEQVSWYEAIEFCNKLSSKEGLTPAYTINGEDVTWNRSANGYRLPTEAEWEYACRAETNTKFNTGDNITAI

SEQ ID NO: 88147 - protein, 58 aa, Unknown
  Obtained from environmental sample
  misc_feature (1)..(58): Xaa is any amino acid
LWMTQEAEGIQKLDKDVRGTFWRYMPFTQAVKEKLKNRNLIYQELYQRDQNRQMSDGY

SEQ ID NO: 88148 - protein, 258 aa, Unknown
  Obtained from environmental sample
  DOMAIN (1)...(241): AMP-binding enzyme
  misc_feature (1)..(258): Xaa is any amino acid
MYTSGTTGKPKVVIQRLTEFENDNRFILSKWGDEWLSRKVCATVSQHHIFGLLFNILLPFTAGVPFRRRRIETPEELENLRDTSYMLITVPAFLKRVAELKALEGGDWGLKNVWIYTSGGVLERDLAEKTHNFLGFWPLEVYGSTETSGIAWRISRNGLEWTPFDNATVWLNEEGCLVIRSPYIKAPEGFTTGDLAQILPDGRFLLKGRADSIVKIEQKRVSLAEVENRLLQSGLVRDVCVIAMDDRRQYLAAALVLN

SEQ ID NO: 88149 - protein, 167 aa, Unknown
  Obtained from environmental sample
  misc_feature (1)..(167): Xaa is any amino acid
ALQIDADGQHDAGRAGFFLEESAIHPDDMICSYPVYDDTVPASRRHGRIVANTWAKIVTLSPHIKESMLGFRVYPVKPVLSLYGNSRIDSRMGFDIEILVRLVWKNTPLIFQPVGVTYPADGISHFRPVRDNIRISWLFTRLCCGMIIRLPILLSRVIRHKHEKDRP

SEQ ID NO: 88150 - protein, 379 aa, Unknown
  Obtained from environmental sample
  DOMAIN (197)...(319): GTPase of unknown function
  misc_feature (1)..(379): Xaa is any amino acid
MAKQLHETKEKQKRALLVSLGDDSTGELQGLVKTLELEIAGQELVKVRERNPKFGMGSGKAGEIAGKAKELEVDCLVFDWDASPSQQRNWEDLAEIPVIDRQELIINIFAMRAVTREADLQVRLAELHYRLPRLTHKYIDLSRQRGGRYGTRGAGETKLETDRREIQKRIHKLEKEIEDVAKQRQVQRRQRERQGTPVCAIVGYTNAGKSSLFNALSGSAVLVENKLFATLDATTRRFEPTPGMGALLTDTVGFIRRLPHNLIKAFRSTLEEAAHASLLIHVLDAADPNIESCFGTTVSVLQELGAGEIPVITVLNKTDLLTDEAKTDAAHLDAAHIDTAQLDALLIRYPQSLGLSVKTGKGLDELKHRIAEKLSGSVM

SEQ ID NO: 88151 - protein, 135 aa, Unknown
  Obtained from environmental sample
  misc_feature (1)..(135): Xaa is any amino acid
MKNGKMIVRVFAAVLSLIAIIGMIGCGGKSDTAGAKFKFGKINIPGKDGALCGAPIHIAYEKGFFAEEGFDVTLIAADVETKKIGLNNGTIPMINGDFQFFPSIEEGVDVKVVDGLHKALHKICRPPRFRHQNRR

SEQ ID NO: 88152 - protein, 437 aa, Unknown
  Obtained from environmental sample
  DOMAIN (11)...(142): GTPase of unknown function
  misc_feature (1)..(437): Xaa is any amino acid
MTLASEIARRRTFAIISHPDAGKTTLTEKLLLYGGAIDRAGSVKGRERGAMAQSDWMSIEQERGISVTSAAMQFEYKGFAINLLDTPGHQDFSEDTYRAITAADSAVMLLDCAKGVEEQTKKLFRVASDRGLPIFTFINKLDRPGREPIELIDEVEELFGLSAVPMTWPIGSGPDFKGVYVRATGQIQVFEKTKAGQKAKLLGQGGLDDAEILELLTEAEHKRLKDDIDLMGAVLPAFDRDEFLAGKQSPMFFGSAINNFGVSEFLDEFLALAPGPGSRPQKGGGEIAPESAFTAFIFKVQANMNKAHRDRVAFARVVSGHFERGMDALHVREKKTLKLNYPHMFFGREREIVDEAFPGDILGLINPGMFRVGDVLSAQGEVAFHAVPRFSPEEFANVRLTDPGARKGFLKGIKEIAEEGVVQVFWPKGGAPLPILG

SEQ ID NO: 88153 - protein, 305 aa, Unknown
  Obtained from environmental sample
  DOMAIN (21)...(49): SecD/SecF GG Motif
  misc_feature (1)..(305): Xaa is any amino acid
GQRYKAYALSVLFLIGSFIAMIVGGGPRMGIDFAGGVIVQVQFQQPVQDEALKNSLDVGHLPGLATQRFGEGGRDYLLRFSLTDTPAQELREGVLGVLQTAFPGNAAEIVRLEMVGPKVGADLAQKAMEALYYAVLLIAVYISGRFEQRWLAAAAMTAALWGGVYVVSLFGVGTGALVLVALGITLAVSWRLKLNFAFGAVVGLLHDVFITLGLLSVLGKEIDLNVVAALLTLVGYSLNDTIIVYDRIRENLRKESPLDLGAVINNSVNQTLSRTLLTGGTTFVAVLALFLLGGGVIHDFALTML

SEQ ID NO: 88154 - protein, 278 aa, Unknown
  Obtained from environmental sample
  misc_feature (1)..(278): Xaa is any amino acid
RTDFAGETDVAIKDGKIARIAPDIDAADARELFALDGMTVTPGIIDPHVHVSAWLGGGIGHTMMARAGVTTALDMSGPGESVYDLVHSRGAGLNIATIEYVRPGHTVSSADPGDQEIAALLKKVLQQGSLGVKMLGGHYPLTPEATRRCIKMAAQHDAYIAFHAGTTNKGSSIEGFLEAVEIADGLPLHLAHINAYCRGLDKPPVEETEIAVKTLTDNPNILSESYLSPFNGTSAEIIDGAPGSNVTKRCLLTGGFTPDEKGMEEAILAGWAQVNYPY

SEQ ID NO: 88155 - protein, 334 aa, Unknown
  Obtained from environmental sample
  DOMAIN (1)...(334): Carbohydrate phosphorylase
  misc_feature (1)..(334): Xaa is any amino acid
GRHKQNGNNIADLGAKTAIHLNGSRCALAIPEMMRILVDREGMEWKEAWKMTQSIFSYSSSAVHREHVETWPVYKITQLLPRVMQVIFDINLEHLDLVRARGCNDLDTLRNLSLIEEGEVKRIRFADMAVLGSNSVSGMSMEHTEMLKKHLFSSYYNQYPDKFNCKTSGVSHRRWLYCANRPLAALISRPIGDGWVRRPEEISKLEFHATSPEILRGFGNVKSRAKSELCAVLREKLGVAMDPSMLFDVHCRPIHTSKRQVLHILYILHSYLKIKKGGGLDCRRTHIFAGKASPSDFLAKQIVHLINITAGIVNGDAAAREQMRVVFIPQFQRR

SEQ ID NO: 88156 - protein, 66 aa, Unknown
  Obtained from environmental sample
  misc_feature (1)..(66): Xaa is any amino acid
GSVEFSDEDDILHGRIIGINDHITYEGDSVKSLRMDFISAVDDYLCICEELGKEPERVYAVFDGKI

SEQ ID NO: 88157 - protein, 590 aa, Unknown
  Obtained from environmental sample
  DOMAIN (22)...(107): OB-fold nucleic acid binding domain
  misc_feature (1)..(590): Xaa is any amino acid
MEAMKRTADCGALRKGDNGKTVILNGWVHRKRNHGGIFFINLRDRYGVTQVTVDTEGKQELAGICDELRNEYVIAVEGQVSLRPDGMVNPGMETGEIEVTASKLVILNKAEVLPFQIDEESKASEETRLKYRYLDLRSSAMQKSIKMRSETTFAVREWMTSNGFYEIETPTFIKSTPEGARDYLVPSRLYPGKFYALPQSPQLYKQILMVAGFDKYFQIARCYRDEDSRGDRQPEFTQIDIEMSFVSRDDVLSVTEGMMCHVFKKVMNVDLPKNFKRLTWEDAMEFYGSDKPDTRFDMRLQDFSAYVQSSGFQAFKDALGSGGAVKALVVKGKADYSRKQIEELDTVAKIYKAKGMAWMKVTENGIEGGASKFFADNAALVIGGLDAKPGDLILMIADANKRTANTSLGAVRTKLGRDLGLCDPSHFEFVWIIDFPMFEYNEDEKKWEAAHHLFTLPQEKYHATLESDPGSVKGDLYDLVLNGYELASGSIRIHDSSMQKRVFEIVGIDPAQVEKKFGFLTEAFRYGAPPHGGIAPGLDRLVMIMAGVSSLKDVIAFPKNSFAVSPMDDCPSEVDQKQLDELRIKILPPK

SEQ ID NO: 88158 - protein, 210 aa, Unknown
  Obtained from environmental sample
  DOMAIN (1)...(86): Queuosine biosynthesis protein
  misc_feature (1)..(210): Xaa is any amino acid
FDRVVDDDWLDRYGHIPLPPYIKRQEDFSDSERYQTVYASACGSSAAPTAGLHFTNELLSQINAAGIENVFITLHVGLGTFLPVRSGNIEDHVMHRELFSIDEQAASKIESAKRAGRKVIAVGTTSVRTMESAWDSGTIKRGENATSIFIYPGYKFNTADALFTNFHTPESTLLMLVSAFAGRELILESYAEAIAQGYRFFSYGDAMLIV

SEQ ID NO: 88159 - protein, 225 aa, Unknown
  Obtained from environmental sample
  DOMAIN (92)...(217): Integral membrane protein DUF6
  misc_feature (1)..(225): Xaa is any amino acid
LLKEAPVLGACGFGYAATMILFVIANKLTASANAIMLQYTAPVWAALLGWLFLRERPRLEHWAAMVLVGFGMFLVFHGGFAAGSFLGDILALVSGITFAANSVILRAREDNNPADIMLFSHIICAVISVPFFILHPPAPGVKYFLSVIYMGIFQLGMASALFAYGIRRIPAVQAMLTAAIEPVLNPVWVLLALGESPTLSVIAGGGIIIGAVVFSSTLSALRRRN

SEQ ID NO: 88160 - protein, 251 aa, Unknown
  Obtained from environmental sample
  misc_feature (1)..(251): Xaa is any amino acid
MKKLFIDIETYNESVVLRTRGLYRYAENAEIMLVGYALDDEPARVWDVVRESTPGVFMKIANSIDENEYQIVAHNAAFERTIFSKQDGIFKALHDRKNWHCTMAQALAHGLPGGLQYLSDIFKLSGDKAKDPEGRSLVNLFCSPRDGKRAARSTHPDEWEKFKEYCRRDVEAERALYYKLPAWNCNQSERAIFNLDYEINSRGFMVDVALAEAAVAIVKKEKQSRDNKVFELSGGRVTAGTQRDKMLEHIL

SEQ ID NO: 88161 - protein, 315 aa, Unknown
  Obtained from environmental sample
  DOMAIN (55)...(148): PPIC-type PPIASE domain
  misc_feature (1)..(315): Xaa is any amino acid
EFAQRNDKATFEYYKIQSRDHRNDSAAVTDKMISDYYAANQNRFRRDEQADLYFVKIPKIATEADLELNKNSLIDIKKKVLEGDSKFEDEAEFESDDEGSRSNGGDLGWFGKGAMVPEFEAAAFALQPGEISDPVKTAFGYHIIKLEEKGEPDSATGEYRIRARHILRKDEPSGETLDALSAKAEQVKMAVTSKGFTAAAAEGLSVSVDSTGFFKRGDMPAKIGYLSGAGQFAFNRKAGEVSDVLENQDAYYVLGLKEKAKKGLQPLSVVRDQIVEALRDTLAMKEAKVYAGQVLEKVKGGSTLQDVQNSDKKIV

SEQ ID NO: 88162 - protein, 456 aa, Unknown
  Obtained from environmental sample
  misc_feature (1)..(456): Xaa is any amino acid
MSDRVIWDRLIRESPVYSNDMIRVGYNSEADLHVGGNDININENTLLRLRYNKETGEFQIELTSGNIGLVTNPKGNEVALNIMGRQVKAKPGTALNAAAGGNGMALQVSEGTAVIAEENENRELGAGAAVAMDLGGSIRSAPSVFVIQPKPNALYRKSTSEPLNVAFLWNRINLRLDETLRLEIAEDQSFSRSVRTLNGLKDSAQVSLNAGLWNWRLTFNGVVLDSGRFTIMDNKGLELLSPARNRQFFYETEPPKLYFQWSQIDDVSHYIVEVDVTPEFRNPIIKKQTTAASFSYSNLGEGIWYWRVTPVFSLTGENSGGVTAANPSAFRIVKSKELQTPSLTFVEEPASVPPPAPVPAPRPVPAPPPAPAPAPAPAPTPAPVRPSEPKRITLDSPSNETILQGLTALRQQTVFRWSTDEAVAKSRFVLSHNPNPLAGQAVIEITDPNRTIRIDR

SEQ ID NO: 88163 - protein, 238 aa, Unknown
  Obtained from environmental sample
  DOMAIN (129)...(236): N-acetylmuramoyl-L-alanine amidase
  misc_feature (1)..(238): Xaa is any amino acid
LIQNHWKKLKSFCALFIIIQFTSLYALTLDETMNAIKTISPNEQPQFRWDPLFRDGSFKLGEHYGSFSAAAKEGETGYLVFDNRELFNVPLPYNNNGTLVFPDNFVSTLKNTFARMYENDESRFRVAVIVIDPGHGGKDPGAIGNLTVNGKTTQVCEKDIVLKSGLALRDRLTSAYPDKRILMTRDTDKYLTLDQRAEKANAVTVKNNEAVIFISIHANYSANSSARGYEVWHITSGQ

SEQ ID NO: 88164 - protein, 246 aa, Unknown
  Obtained from environmental sample
  DOMAIN (73)...(173): Methyltransferase domain
  misc_feature (1)..(246): Xaa is any amino acid
MDRTCPPPIEYEKEYFFEAYKKQYGKNYLEDFPNLVAMAKRRIKHISQRLHTKSTKGQRSQREEKSGDSPLLLDIGCAYGPFLVAAKEEGFLPFGIDPAGDAVRYVQETLNITAVQGFFPNCPLPTTNYPLSTTHYPLYDVITLWYVIEHFRNLNSVIAEIKKLLKPGGILAFSTPSFSGVSGRKSLRKFLENSPADHFTIWSPKMCKKALALAGFKVKKIVISGCHPERFPLLGKFAKSAKSPLY

SEQ ID NO: 88165 - protein, 232 aa, Unknown
  Obtained from environmental sample
  misc_feature (1)..(232): Xaa is any amino acid
MRTQPGLLSVAGFGLAVVLIFSCSDKEVVKGDNIVNYVTKQIGDQVWMAENSNYDVEGSRCYGEGGLVYNEETRAYDTTLSTSEILANCIQYGRLYDWATAMALPIKCNSTLSTNDADCAINNPHRGICPTGWHIPSNADWDKLFRFVDGTDSISNTNDINGTSSPYDSPKAGRHLKAASGWHNDGDGEINSEVSYGFAALPGGYGSSAGHFSDAGYSGIWWSSSEYDAYYA

SEQ ID NO: 88166 - protein, 119 aa, Unknown
  Obtained from environmental sample
  DOMAIN (50)...(119): PCRF domain
  misc_feature (1)..(119): Xaa is any amino acid
VLEKQTGDPELWNDAANAQALLKRAAAIRELIANWEIVSKQCDDLGELYELSKSEKDNELSASIEKDVSALDAKISEMELRKMLNGPDDAAPALFSINSGAGGTESQDWTQMLLRMSRA

SEQ ID NO: 88167 - protein, 198 aa, Unknown
  Obtained from environmental sample
  DOMAIN (4)...(197): Aldo/keto reductase family
  misc_feature (1)..(198): Xaa is any amino acid
MKMLGFGLMRLPHVGDYNNVDIEAVKVLADEFLKRGFTYFDTAYPYHGGNSETAFREAVAKRYPRTSYKIADKMPMFSVQSQEQLPQIFDEQLAKCGVEYFDFYLLHCLNRQHYKTAVNLKAFEFVKQKKKEGKIRHIGFSFHHNAELLDKILTEHPEMEFVQLQINYLDIDDINIESGKCYDVAKKHDKDIIVMEPV

SEQ ID NO: 88168 - protein, 104 aa, Unknown
  Obtained from environmental sample
  misc_feature (1)..(104): Xaa is any amino acid
MRKHILCLMATIFALAFTPIACGGGGGGNNNNGGGETVPVTGVTLSQSSMSLTVGGATGSLTATVAPSNATNKSVTWTVSPATGTVALSGSGATRTVTAVAAGA

SEQ ID NO: 88169 - protein, 302 aa, Unknown
  Obtained from environmental sample
  DOMAIN (162)...(209): Regulator of chromosome condensation (RCC1)
  misc_feature (1)..(302): Xaa is any amino acid
ALTAASVSAGFFHSVATMADGSLWEWGGSADTPARTGLDSDWAIVSTGYHSSAAIKTDGSLWAWQSTWVDSSPGYITNQPYSDSPRRVGADSDWVSVSVGRLHTLALRADGSLWAWGINVWGQLGDGSNTTGHIENPVRVAADNSWAAVSVGEDHTLALKTDGSLWAWGYNSDGRLGLGDYSDRNVPVRVGTENNWKAVSAGGNHTLAIRTDGSLWAWGDNVYGQLGLGDSGDGTSRNTPTRVGTDANWAAVSAGDFGHTLAVRTDGSLWAWGYNGDGQLGLGDSGYGTSSTDRNTPTRVGR

SEQ ID NO: 88170 - protein, 539 aa, Unknown
  Obtained from environmental sample
  misc_feature (1)..(539): Xaa is any amino acid
DNTVSPPEKNVKISILPLTKDEIEAIEQKALPIGSVKAVDSAVYILSDSYRWIFAKDDSPLAERIKRVLSISAEVKALRNHMREGRASAPLQGTIKTALNSYKDLYGDYPKDDPIISRFVRNYPSLSGIYDALIDPSSDILSLANLYDNNGVPINGHNRAVEVLLFLQKRMLTATVENINQYFPDEKDELVLEMCRNPDIFLSEQRTWQLREDFISGDAWGKIDVLNSLVSNAGDAVQKEKWQYGISELEKAVGWIPIEEADFSPHSSWIPEDIINAWVRDEDGLDRPYLLEHGSLKRNDSGKWGILYFEDHSFYDSSARAYRNVSAGQWEEMANEIVYYLNMQKQRSKYNDTEIFNREHNESFKNYIANHSTYRDELERKYNRIFNTEIGVPVKTYPVYIEGWRTDSKTLKGHQWQSVHHLYREGKGISALGTGFGKTLTAIALHALLKQEGCIHRAWFQVPNNKVKDWVKEFHEVLPSRTIGFVDPEMQGYSSRDKRYSLYQQLASSAYDIILMPESSAGEIQLSPENDRIIVDEVI

SEQ ID NO: 88171 - protein, 340 aa, Unknown
  Obtained from environmental sample
  DOMAIN (33)...(319): Aminotransferase class IV
  misc_feature (1)..(340): Xaa is any amino acid
MPPQQLDWSNLGFEYMQTDSYIRADFKDGRWGEVAVCTDPMFSIHVAAVCLHYGQACFEGLKAFRRKDGSVALFRPQDNAERMIGTAKRTMMEPPPLEMFIEAVKKTVALNINWVPPYGTGASLYVRPLLIGSSPRVGVGPSEDYILFSLGMPVGPYYKNGFFPVKAYVQESYDRAAPLGVGNVKVAGNYTAGLYGDYEGKKKGYPICLYLDSAHHRYIDEFGTSNFFGITKDNKYVTPESSSILPSITNNSLQKIAEGMGLKVERRKIDIEELPDFKEVGACGTAAVITPVYSITRGDKVYTFGKEHEAGETLTRLFKEIQGIQYGEMEDRYGWMLAVS

SEQ ID NO: 88172 - protein, 398 aa, Unknown
  Obtained from environmental sample
  DOMAIN (7)...(398): Sodium/hydrogen exchanger family
  misc_feature (1)..(398): Xaa is any amino acid
MELGVMILIAALILLAIIIFASVANRWRVPLVVVSIFVGMLFGNDMLNVGEFGQNPGDYGLAQTIANSALVFVLFVGGFGTKMSRLRMVFGPAMMLASVGVIITAVVTSFSLYWLLRAVHIDIDAQTSMLIGCIIASTDAAAVFSILRSRSLDPKMSAAVEIESATNDPMAIIMTTIAVGFAVASVPSSGGGGLISLGTVGILAWKGIGGLGIGLLVGLVACWLSRFVTNLDKGYFYIYIIAIIMLSFGVAEVAGASGILSAFAAGFVMGNKNIPYKSTSTTLLDAMSTIGNVVIFVLLGLLVFPSKFADFDVFGGGILLFLILTLIARPIAVFLCTFWARYSFKEMLFLNWGGLRGAVPIVLATYPAANNIEKSNYIFNIVFFAVLLSMLIQGFTIT

SEQ ID NO: 88173 - protein, 381 aa, Unknown
  Obtained from environmental sample
  DOMAIN (3)...(169): Mur ligase middle domain
  misc_feature (1)..(381): Xaa is any amino acid
VQRMLWEMAENGCEYAVAESSSHGLSPRTNRLGDVEFDACLYTNVTHEHLEFHGTWEQYRDDKANLFRALDRVQKRFTTEDTVDSYEPFGVINADDPSAEFFSNATRRETLSFSVKGKDADLVVKSIESCAQGNKYNVFIRAEKAYIDIIDNLPGAFNAGNVLASLLVVSGLTKIPVRELVPLCPKLLPVRGRMTAVDKGQSFEVLVDYAHTPSSFQTVFPPLRKRLDNSGKPGRRIISLFGSAGERDTQKRAEQGKIAARYSDIIVLTDEDPRGEVPIDILEEIAQGINAQGIYAQGIYAQGVHAENPALFKQGENLFLIPDRPEAIRKAFSLAREGDLVLLLGKGHENTIIYKDRVMPYDEIGEAEKAWKREWGVGSRE

SEQ ID NO: 88174 - protein, 152 aa, Unknown
  Obtained from environmental sample
  DOMAIN (1)...(126): Glycosyl transferases group 1
  misc_feature (1)..(152): Xaa is any amino acid
GHPCKLVMVGDGPDRLEAENYAREKNMEANVRFTGKLLDIDSVLSCADIFLLPSSTESFGLAALEAMSHGAPVVASRAGGIPEVVREGVDGYLSNVGDIGDMAENVSKLLADPGLRQSMGRSAKERALNDFAEGPIVEQYEAIYRKVLSGQF

SEQ ID NO: 88175 - protein, 328 aa, Unknown
  Obtained from environmental sample
  DOMAIN (197)...(319): Bacterial type II secretion system protein F domain
  misc_feature (1)..(328): Xaa is any amino acid
RGQTRAGGTAVKRTIAALRFSELLLACLKGKTGLLDALSILAREGIEKPVRENAFSLLRIMKKGKGLSESLRIIGEEKVFFEPLYITLIAAAELTGSIEAVLGRIVSDLQRRQRAKENLMNILIYPTTIVFLAIAGTIGIILKGMPLFISAGLLSATIVKDAKTGIGFAALVLLLGGGSLFFVYFRIFNDDSPESRIFYLIDFLMKSNITLTDALSQCVLSLGHTKYGSALVKIKKDIVSGVSFSEAFARTKCFSPYVLGWLSIADINGNLNGISGSIRDHYLQKENKLREAAAKLIEPAVIVLVGIYVLIIMATVILPILSYSGGIL

SEQ ID NO: 88176 - protein, 226 aa, Unknown
  Obtained from environmental sample
  DOMAIN (23)...(129): HD domain
  misc_feature (1)..(226): Xaa is any amino acid
MNKSTYNKIKNYMHECMKDAAHDTEHIFRVLYLSLNIASKITEDINFDILIASCLLHDIGREEQYKNQNICHAEVGGIMAKEFLLKNGWSEKDSDHVKNCISTHRFRGNNIPETLEAKILFDSDKLDAVGCLGISRTLMYKGIVGNNLYEIKDNKICFGENKNDKETFLKEYNFKLRNLYDNFYTKEATEMAKKQKECAQLFYKDLIDQIIEIYKSKEIINEYIVE

SEQ ID NO: 88177 - protein, 258 aa, Unknown
  Obtained from environmental sample
  misc_feature (1)..(258): Xaa is any amino acid
VNFITSHDGFTLKDLVSYEKKHNEENSENNRDGGDNNNSANNGFEGRTQNEKIEARRFKQMKNFIASMMVSLGTPMILGGDEIGRTQNGNNNAYCQDNEISWYDWSFYEKNYAYYRFVKEMIAFRRRHPGFMRPEFFTGRDGKYNAIPDISWFDEKGDTPNWDEIGPCLAFRMDGSYADILADRDDNDFFIMFNGSEKALQFKVCEPMAGKKWVRAVDTGLPSPDDILVSGEERILENPYAYPLKEKSMVILISRLLY

SEQ ID NO: 88178 - protein, 337 aa, Unknown
  Obtained from environmental sample
  misc_feature (1)..(337): Xaa is any amino acid
MHPKTDVEYATLGILDNGIARIPHLESWLENNRWTVYPDDKITPTHGTFTAAIALYGDDLEKESWIRHKGIKLFDAAIFPDTSKESILEDELIENIREVIKANHEKVKIWNLSISIKEQISETTFFDFAIFLDHIQETYNVLICKSAGNCDNFKYGRPRGKLHKGADSVLSLVIGSIAHAKGSYDLAEIDNPSPFSRIGPGPEFIIKPELVHYGGNSGVKPDGSVTITGVKSFSVDGGIAQSVGTSFSTPRISGLATGLYQEINQEFDPLLIKGMVVHSAKYPDNLTLPYIERTKYVGFGKPPSVPEILYNDPHEITLILRETLIKGSFLDILDFPM

SEQ ID NO: 88179 - protein, 446 aa, Unknown
  Obtained from environmental sample
  DOMAIN (155)...(224): HAMP domain
  misc_feature (1)..(446): Xaa is any amino acid
AYQSTIENQAKPLGNATDILAAIHSLRAELRLCVLNTGKPDKVNDAEALINNWYKKYEENTAEFAKHISRPENKALMDDAAVSYANFKVAMREVIDRAKNGDDQGEVMKYMLTNALPNANKTADIMTKVIENKRNLLQDAEDRGDALSGSLFATTLTIILLSAAIAVLLGMYISSLISKPLHSTVKMINEMSLGHLEMRLGIDRKDEIGVMAKAMDMFADDLKNVVIGTIKKISVGDLSAKIEPKDDKDEISYALKKTVESLRVVVGTMKKISVGDLSVQIAPKDDKDEISNALKKTIESLHGLIIDDGGRVFNAAANKDLSQRLTCEYQGEFARMKDNINTVMQNLNDALNQVTVTVSQVSSASDEISHGAQDLAECSNEQASSLEEVSSSLESMSAMTTKNADNTNQAMVLASEARVAANDGDLSMKRMADAIRQIKASADNTA

SEQ ID NO: 88180 - protein, 207 aa, Unknown
  Obtained from environmental sample
  misc_feature (1)..(207): Xaa is any amino acid
MQKAAALFLILFFGVFVLLFAQDDAPETEPDWEDIYTSDLYSRGDQTLAIGLGVGFPIAFINTYNREIITDPKIEPPLGGTGFINYTYYFNSRFFLGGELGLLFLPTIGGNTVFITFFGPRLGTQFIFGKFEFPLSIALGGTIQTYLDMGYFGYYNKIGVGAYFRITHQWSFGITSNFCWFPQWTDDSTKNIDALFVDLAIVGEISF

SEQ ID NO: 88181 - protein, 211 aa, Unknown
  Obtained from environmental sample
  DOMAIN (1)...(124): HD domain
  misc_feature (1)..(211): Xaa is any amino acid
VLDHSLLACDFAARDYPGETKLCRCLAALYHDIGKPVTAQMGEDGGWTFYRHEKESARLAKAILLRFRYPNAMIDRVCRLIEEHMFSYTESWTDAAVRRFVIRAGEENLSDLFALRRADIFGMAGREPKWDTLLPFHGRIEEVLARGRALSIKDLAISGNDLISLGIPSGKTIGIILRELLEAVLEDPALNNREKLLEIAGKKWLAYTKNS

SEQ ID NO: 88182 - protein, 195 aa, Unknown
  Obtained from environmental sample
  DOMAIN (1)...(183): Protein kinase domain
  misc_feature (1)..(195): Xaa is any amino acid
LRTLIRRRLRHPEPSRRHVDLPTALRTVARTLDALAYANRSGVVHQDVKPGNILIERGSGRSYLADFGIARTEQTEEEPALVRGTPLYMPPEQARGEATDARADVFATGVTLWESLSGTLPVPPFPSLKLVGIKARRPHAFFKQTPSESSERIDKDLEAIIQKATASRRDDRYADCAEFLGEIKGYADKKLGLNL

SEQ ID NO: 88183 - protein, 400 aa, Unknown
  Obtained from environmental sample
  DOMAIN (3)...(400): UvrD/REP helicase
  misc_feature (1)..(400): Xaa is any amino acid
MSNNSVILSAYDIDLAKHGVIEAHAGTGKTYTIVNLVLRMLEQTENRGKGGNRYVHLSQILLVTYTEKAAGELKKRIREGIAAQINKYRDDDGKRDLAAHLEDCLNNMHEALIGTIHSVCLRLLQTWPFETGVHFNTAMVEDDNEGAEAALRISMRTDWEESSSVLRQGLIVMEQKGVWLEKKHIKLISKTALKIMGNDAKLDPAPAGGLTLEDAMDKINNATDAELETLKKKLLYAFINRAAKILAARYDAYKREKGLVSYDDMLRLMRNAVRSHDVKILERLRKRLRYGIIDEFQDTSPVQWSIFQKIFLEEAEGAKIYIVGDPKQSIYSFQGADINSYISAKDAIAAQNGTVYSLKNNFRSLPEMIDGYNAILCGDTENWFAPEGGDSDISYSKANA

SEQ ID NO: 88184 - protein, 288 aa, Unknown
  Obtained from environmental sample
  misc_feature (1)..(288): Xaa is any amino acid
AGKWIPEKKPLSFAEFSDGWWNIKTCKYLEWRQIQNPLAPSTIDHYKTNLELHIKLFFGKMKLNAISADIVENWIMGLSRKGYNNSSINIQLATLKIMMKEAVRNKLISSNPMEKIKKLIAHNKEVQILKNEEVQKLFPAEWIKIWESYEIYIFNKLAACTGMRLSEIIGLQINNLHDDHIHVCAQYTHKYGIRPLKTKDSRNIPIAAVLHDELLTLIKGSEQEFLFTETGGSEPISRHRIYRETSAAFEKIGIGREERRERGLVVHHWRHFLNTALLMANVSTLKVQ

SEQ ID NO: 88185 - protein, 488 aa, Unknown
  Obtained from environmental sample
  DOMAIN (200)...(386): Peptidase M16 inactive domain
  misc_feature (1)..(488): Xaa is any amino acid
AGDAVGGFRLELIREIPEVRGAGYQFVHAKTGARLIHLFNDDDNNLFSIAFRTPVSDSTGVPHILEHSVLCGSKRFPVKDPFQEMLKGSLQTFLNAMTYPDKTVYPVSSQVEKDFYNLVDVYCDAVLNPLLTENTFYQEGWHYDLESPDDPIGIKGIVYNEMKGVFSDFSSHVGRGITSKLFPDTTYFHESGGDPEHITDLTYEQFKDFHRQFYHPSNSFIFVYGNLPSEKTLKFIDERYLREFDAAPVDSSVAPQHLWDEPRTAAMEAPAPSSEEEGSASVVCSWIVGRSADPVDVFSASILSGYLLSTETSPLKRALIDSGLGEDLDDMCGFDADLAQGVFSAGLRKAQPQNAQAILDIIINTLKNEVEKGLDGELIEGAVRQTEFSLREITGGHYPYNLRLADRCYRSWINGGDPFALLAFEGPLSVIKDGMKSGRFFEEFIRKNLIDNKHRLLAVVTASSEKGRKLEAQTEEQAAKLTAGFTEG

SEQ ID NO: 88186 - protein, 476 aa, Unknown
  Obtained from environmental sample
  DOMAIN (239)...(374): Thiamine pyrophosphate enzyme, C-terminal TPP binding domain
  misc_feature (1)..(476): Xaa is any amino acid
MPDAFKNLTDDQAAKAPAGFKTAAIKPKPVDGQKAALVIACEDCYSCGVCFNICPMSNKGQEKPALAWKHYSDDHEFHAEQVKVWEYFLSLPETPAGELKNAKAFAYKRPLFEFSGACGGCGETPYIKLMSQLVGDRALIGNATGCTSIYGGNLPTTPYAQRADGRGPVWSNSLFEDAAEFAMGFRLTSDKLAIHAREVAAQAKSEGIAAGIIDKILSNDQADDAKIDEMRKSIDELKAAVKNDSKPTAKLLYSLADFFVKRSIWGFGGDGWAYDIGFGGLDHVLASGKNVNLLCMDTEVYSNTGGQMSKATPVGAIAKFANAGKEITKKDLGAIAMSYGYVYVAKISLGYDMNKTIQAFREAESYDGPSLIIAYSHCINHGIDMSKGLEQQKAVVTSGLWPLFRYDPRLKDQGKNPFQLDSKDPTTNIEDFMYKEVRFKSLKAANAERADALLAKAKAHAERVWKEYKYLADRPF

SEQ ID NO: 88187 - protein, 420 aa, Unknown
  Obtained from environmental sample
  DOMAIN (153)...(330): DNA methylase
  misc_feature (1)..(420): Xaa is any amino acid
MPKKPAIDTSKLNQIDAYTYPEHDRANIPPIGMAQYDTVASPEVKYEYDPHIDPSLQWAGKKEGTTFEVPTSSIHIHESIKPHKIIRSVQTIGDDYADEQGWLFESDAERAKRRNDSIEFYQHKNKWTNRLIAGDSLVIMNSMLEKEGMAGQVQMVYIDPPYGIKYGSNFQPFVNKRDVKDKKDEDLTTEPEMVKAFRDTWELGIHSYLTYLRDRLLLAKELLSDSGSVFVQISDENVHLVRCLCDEIFGRDNFVSEIIFRKKGMTLGANTIETMNDFIICYAKDLPSIKYRQIYEEYNVEGASRWTMVELPDGTRRHMTNEEYYNHKLLPVNSNVFRLVSQRAPSYSPNNIFDFKYEGKTYKAPGCWVTNIDGMNVLAHNKRFFPEGTNLSYIQYITDFPYKKITNLWTDTSGANDKIY

SEQ ID NO: 88188 - protein, 512 aa, Unknown
  Obtained from environmental sample
  misc_feature (1)..(512): Xaa is any amino acid
KAPKEAKIFQATSLISARPAGSGDVTEFEFKGQVYTPGRGTFKTNQNGLINLVKVNRLIPSGNTLRYIRFFDDFPYNEYTNLWEDTYGASDMKYVVETSTYVIQRCLLMTTDPGDLVLDITCGSGTTAYVAEQWGRRWVTCDTSRIAITLSKKRLMTATFDYYKLAYPEQGVSSGFVYKTVPHITLKSIANNEPPEQETLYDQPEIEKRKVRISGPFTVEALPAPVVKPLDDDTHPAPFFHENAAKKQSDWMQELKASGILGRQGEKIQFSRVEPLEGTKFLHAEAETKETDRKKAVICFAGETRPLDIRMVTQALNEAETIRPKPVYIVFAAFQFDPTAAKHIDDTKWPGVTLLKVQMNPDLMTADLKKKSSSSQSFWLVGQPDVELIHIEKGADKGKYKIKVKGFDYYDIKQGIVNSGGTDKIAMWMLDTDYDGMSIEPKQVFFPMEGKNEGWDKLAKTLKAEINPDLIEKYRGTESLPFTIKDNTQIAVKIVDDRGIESLKVISVGANG

SEQ ID NO: 88189 - protein, 291 aa, Unknown
  Obtained from environmental sample
  misc_feature (1)..(291): Xaa is any amino acid
DFAPRYLGAINELSKKESTVTIIKGPITGNVRARQGDYVLAIVPTGERLPGSVFQWNGVAWQYRAPENFSALYINCFKDGLDVPELSQDSGWFGSVFAKLLIAQNAFIENLAARMIQLQDNGGIRSENFLEGKQGFSLQANGRAVFNEELYVYNLKVVSFELIPPSGDRELIIELVGYDSQSLSLPIGWYEVEMAGGGGGDGERFSYGAEGGALKYRFYNNSSNNYTKLFCGGGGETKQNGAGAGGGGGSVLEVVKDNLVIIAGGGGGAHGAIGVSFSGGGGGGGGYGAGG

SEQ ID NO: 88190 - protein, 1019 aa, Unknown
  Obtained from environmental sample
  misc_feature (1)..(1019): Xaa is any amino acid
MSVKVIAELHPIRRTRVKITTNPKSISEIIEDLNTGFPLTQARVCRNGEIVKDLSTMTNDGDELTIKFVPYGNTHDQGVGMKIGGWALFAVGLVLTLTGVGSLVGVALMGSGLAMALGGQVMLSINIPSLKDREKPENDPSIRGGKNQARPHGRIPVLFGKHRLYPDIAANSHTSIIDGKQYYTQLFCGGYKDCVIDKNSFKLGETALVELSATKDIELILSGMDPVIRLEILQNGKASNLYPHCVHEDSINSPIQNQVDGADGAKISGEYIRTTPDNTDAIDVDIFFHNGLGKYNDDGDLESTSVEVTASYKPFDAPDSAYISLGFFNAANNTISGAELKTKRFHVTKDGLTKGKYTVKIKRITADSTDSKIIDTVYLGSIRSFKSVAPIRAERRKDLTIIALRVLATSQLNGVLDSFNFIATAKMPVYSGGGSGSLYWLNAVETCNPASALLYALQGRAAQQIVDNNDINWESLEAFYKWCEQKDEDGDYKYTCNAYLSESVTIAELMRMIGSTARADILRIDSKISVVQDIERPSHLQLFTPKNSVSYSIIMFKADIPDAIAMRFIDEQAGYAQQELNVFNTPDGNRTKDPETIQKADLWGVTSSKQARRIGMYNYACLKNRPFVHTIETDFEYLICNKGDWIQYAGDIALAGSAQGRIKGIIFADGVCIGIDTDEPVVMTDGKQHAVRIRLSNGTIILKDVVFNLGIPREKSIPQHPGEPYEPLIDELRAIGEDNVYYEPQNVIYFVEPFEKKDAPKAGDIYAFGVRGYEALDLIITDIQPGQNLTAVLTCVEYSPEIFGVDKPDFILPDFENKITPVSGAVDPGTVTPDRWRSFAVYHDSEDEPPRPSGDGQEDGWHHIQTFRSVWQSTKIAESIESGEWSLPVRIKAYRGNDDVMPIWLSLSPQNITLETDSDGNLLVGSLPLTVQARLFRWNSIITEAIFSLPDATEGFSIDSNGVITVEDFLSETKEIKVQAKYNNETYTAMLIINKNNNAVHGYLGACYTYTETNTVKLT

SEQ ID NO: 88191 - protein, 263 aa, Unknown
  Obtained from environmental sample
  DOMAIN (6)...(263): MreB/Mbl protein
  misc_feature (1)..(263): Xaa is any amino acid
MFGGISSDLGIDLGTCNTIIYIRNKGIVLNEPSVVAVELGTKKIVAVGADAKRMLCKTPGHIRTIRPLRDGVIADLESTEKMIRYFISRVLPRYRFIKPRMVVGIPSCITEVERRAVEESAYKAGAREVIVIEESLAAAIGADIPINEPAGHMVCDIGGGTTEISVISLGGMVVTNAIRLGGDEFDEAIIKYVRMVNNLIIGQQMAEHLKIEIGNAVPDKNIEEIEVKGTNAANGLPQRFKIGSDQIREALRDPINQIMTISN

SEQ ID NO: 88192 - protein, 254 aa, Unknown
  Obtained from environmental sample
  DOMAIN (1)...(247): Glycosyl hydrolase family 10
  misc_feature (1)..(254): Xaa is any amino acid
MTTGTRAEVEKNVKEYISTVLTHFKGKIPSWDVVNEAMKDGLSAAEVNGDWKKCIRNYQNPWYDKLGPDYVEISFRAARAADPDITLYYNDYGLEDPNKAEAVRKMIKDINDRYKKETGGSRNLIDGIGSQAHMFEFKNLNMDNVRLSFEKLASLGLEISISELDLSLIAYERGGGKDTDMSQADETAQAKYYAELFKLYKEYSRYIKRVTMWGMDDGTSWISAGNPCLFDWKLNAKKAFYAVSAPETFLAASP

SEQ ID NO: 88193 - protein, 70 aa, Unknown
  Obtained from environmental sample
  misc_feature (1)..(70): Xaa is any amino acid
IRARQRIGDLGGILKNRRGIVLVLGNEETGLPKEVKDQCSCLLRIPGTGNIDSLNVSQAAALFLNAIYNM

SEQ ID NO: 88194 - protein, 468 aa, Unknown
  Obtained from environmental sample
  misc_feature (1)..(468): Xaa is any amino acid
FIVTIYPSASGVPGEHGVPGEPGGPGEHGVPGEPGGPGESGGGAPKEKKLPPVNSLITVTVRGIENAQFEQMDEYSFSYNTTDDNNVCFTKWEVGHNINNDIYIKYNQKGADLAKIYYQVNNGTKILYYNKIKTSSEDTIPSEDIINLNIASLDDSGVRKGRSVSGINEYKVFIELYKKGIMESNISFKIWNVPGMVFTDDNPLIEVRTEADLIAMKNGLDKQYVLANDIVIFNEWTPIGTEANPFEGKFYGNGHTIKMLRGINPNADYAGFFGVVKHEGFLDSTVIRDFNLIYPETGNVPTTSTCFGGIAGKIDGMGVTIRNIIIGGSYYINYINNQSLIFGGIVGYQDNNARIINCLVDVNFSINSSSEIDNFDSFLFGGAIGKMGASNYSGLGPVVEAVNVTSNIGIDGIIATQAELGGIIGRSESGILRYLHFSGDLQINIPSGYVSNINLGGIAGSIKNSTIE

SEQ ID NO: 88195 - protein, 304 aa, Unknown
  Obtained from environmental sample
  misc_feature (1)..(304): Xaa is any amino acid
DDEGVYPQTGQQKELDLLVRDPAKYPADIDEADRQRMMFVTALLQAEKRVYISYLNRDPIQDAALYPSSLIFEFETIARRERKDQLSLPLAGYGGVNAELRKKYPDVFETHLWLDAALAGDAPPRVSHEARGIEKTCAETVSEIPRLSFSDCARYIANPAEGLLRFSLRKKENALWDILSNPVEPFFRNDVETSLRTEIKNAAVRSFLLSGVKESKLSGMEPEQFLRNHFDKRRRTYWEEQGNIPSGIYSEGYWDQLLYGKDGLLGTLAKIAKISDLPESIRNAERVYSPFIFGSILRDPPSDP

SEQ ID NO: 88196 - protein, 284 aa, Unknown
  Obtained from environmental sample
  DOMAIN (146)...(213): Elongation factor Tu domain 2
  misc_feature (1)..(284): Xaa is any amino acid
ACPFTLPIGYGKLFKGIYSIADNTFHTFNKEEGKQEILQMKGSDDPKLTELCGEEYIKEFKNRYDMVTQAMEPFHKNEYLAGKQCPVFFGSAVNNFGVRQLLNTFANIAPPPTPRESDVRIVMPTEDKFSAFVFKIQANMDPRHRDRTAFLRICSGSFERGNKVWHCRTGREIRLAAPTSFLAQDKEVIDKAYAGDIVGINDPGIFNIGDTLTEGEKFRFSGIPDFAPEFFARVTLMNPLKSKQMSKGLLQLSEEGATQLYTSLTSALPIIGVVGEFAIDVLTH

SEQ ID NO: 88197 - protein, 134 aa, Unknown
  Obtained from environmental sample
  misc_feature (1)..(134): Xaa is any amino acid
ANTDLVCDAINTAMRELFLQIAYGRTQTAFSEGGLPIGAGLEDLGKGLRSQIGTMYGTVAKGVRYLEMAEGYVTRLALDKEDLVIGYEFVNLGKVMESVSKGVDPKEAIAKATGTYGRFKEEDGAVKHINPRHE

SEQ ID NO: 88198 - protein, 322 aa, Unknown
  Obtained from environmental sample
  DOMAIN (58)...(278): Methyl-accepting chemotaxis protein (MCP) signaling domain
  misc_feature (1)..(322): Xaa is any amino acid
RHDLSSNMTETAAAVNQITANIQSVKARVINQSASVTETNATMEQVIANINRLNSHVEAQSSNVSQASSAIEEMVANIGSVTNTLINNAANVKTLQEASEVGKTGLQEVATDIQEISRESEGLLEINGVMENIASQTNLLSMNAAIEAAHAGEAGKGFAVVADEIRKLAESSSEQSKTISSVLKKIKESIDKITGSTNNVLNKFEAIDSGVRTVSMQEENIRNAMEEQGEGSKQILASAGSLNGITQQVKAGSEEMLEGSQEVIRESRNLEKATQEITGGMNEMASGADQMNIAVNNVNEMTQKNRDAIDILIKEVSRFKVE

SEQ ID NO: 88199 - protein, 174 aa, Unknown
  Obtained from environmental sample
  misc_feature (1)..(174): Xaa is any amino acid
MLRNFSIGVRLLFIIFILLLTIAALVFAIKFTSQTVEEMTLKITGDIMYTGQRDKIKLGTQTMAVALAEALQGVDDRQRQHDIIKSYIQDYRFEEDKSGYYFTYIGTTIFMHPTLPQREGEDLGNTQDKNGVYYVKELYEAAKKGGGVCRVCIRQAAQYGYSPKTGICGIYSPY

SEQ ID NO: 88200 - protein, 295 aa, Unknown
  Obtained from environmental sample
  DOMAIN (210)...(283): Acetyltransferase (GNAT) family
  misc_feature (1)..(295): Xaa is any amino acid
MSVKFRRYKLLADFDKVNKYLTDVFNIETLNGYLLPQYFEYAHTHPLFTFKLAHKFGLWEHEDELIGIACYDMYPGECFISVKSGFYSLLPEMISYSEEYLSEKSNGKTSLAISIIGKEIEKKELLEKSGYKKIHSETVSVFSYENPLPNQSLPEGFSVISLEDENDFKKINDCLWYGFDHGPEPDPDDDIDCRILMQSGPNFRKDLTTIIKAPNGEYACYAGMWIDRQNNYAYLEPLATVPKYRRMGLATLAVVEAIKKTKRLGAKYCFGGTGEFYSSIGFKEISNRELWRKEW

SEQ ID NO: 88201 - protein, 77 aa, Unknown
  Obtained from environmental sample
  misc_feature (1)..(77): Xaa is any amino acid
MKALTVAQIKTHFSDVLTRVKNGENVKILYGKSKKPVAIIIPIENINTPRSIGIMDGKATFKAKGNGKISEEDFLGI

SEQ ID NO: 88202 - protein, 213 aa, Unknown
  Obtained from environmental sample
  DOMAIN (22)...(213): Amidase
  misc_feature (1)..(213): Xaa is any amino acid
MFVNSALSLSAAIKEKGISVVEAASAYIRIIEKNDSRYNAFLSVSKEKAMARAKEVQSRIDAGETLSPLAGVPIAIKDNISTTGIETTCASKMLKGYTPVFNAAVIDKLEKAGMIVIGKVNMDEYAMGGSSETGVKGPVHNPWDVARVAGGSSGGSAAAVIAGETPIALGSDTGGSIRQPCSFCGVTGIQPTYGSVSRYGLLAYASSLDQIGP

SEQ ID NO: 88203 - protein, 82 aa, Unknown
  Obtained from environmental sample
  DOMAIN (6)...(77): Glu-tRNAGln amidotransferase C subunit
  misc_feature (1)..(82): Xaa is any amino acid
LSCLTLSANEKTRLTHDLQEILDYMARLGEIDTNGVVERSHPFDNVNDFRDDEIGPSFDRVLILQNAPAKNDEAIIAPKTVE

SEQ ID NO: 88204 - protein, 277 aa, Unknown
  Obtained from environmental sample
  misc_feature (1)..(277): Xaa is any amino acid
DGKTYARELGWTQGNDGYSAHVDWTSPFLTKPGDELVAARVIRGSGLFGGWSLKVAAFANGSLTVAEAELGAPVSWTPCQLPPGTAPSAAEWSEDGSRLFVGTEQGLLLAVAPGVEPLTADFQEPITALGFALGHSSLLVGGKNGKLAAYQVLRRDGKSELQRFHDFKPLGGGVRGFMETLRDKRFLAYSDAGFAVNHLTTESRLTSADASVSSVVSFSPKGDCVLVPGETPRMWRVKSNHPEVSWGLFWKKVHYEGYSAPEHVWQSSGASDDIEPK

SEQ ID NO: 88205 - protein, 148 aa, Unknown
  Obtained from environmental sample
  DOMAIN (45)...(146): ATP synthase alpha/beta chain, C terminal domain
  misc_feature (1)..(148): Xaa is any amino acid
TPSPIWTRPPRLSRKIVELGIYPSVDPLASSSRILDAAIVGEDHYNTARRSQQILQRYKELQDIIAILGMDELSEEDKLTVTRARKVQRFFSQPFFVGEKFTGIPGCYVSVKETVRGFKMILDGECDAIPEQAFYMAGSIDDVLKKAK

SEQ ID NO: 88206 - protein, 87 aa, Unknown
  Obtained from environmental sample
  misc_feature (1)..(87): Xaa is any amino acid
MKVVAIKDIIRKDVPIYYRLLYTGVAVIELAKGAANYRIDFTIEIKPTGQKDISVTFLDALEYPLLPVIKELKVIIDNMHSNELLPD

SEQ ID NO: 88207 - protein, 345 aa, Unknown
  Obtained from environmental sample
  misc_feature (1)..(345): Xaa is any amino acid
MAEKTYEEWLEAFRDRKVLITPEQQLADLVLGDYSEKKDREIILLKDVPNEHKTVELCLVALEVVGYELQFIPEECKTAEVCLAAVQTHGQALQYVPDKHRTAELCLSAVMQDGFALAYVPEKFQSALLCLAAIMNNHEALEYVPEKLKTAELYLAAAAQQKNRALPDSQIKSNDDDLQFMPEEHKTAELCFASVMRDGLSLSYVPERFKTAELYLAAVIRNGATLELVPEEDKTAELCLAAVMNNYKAFEYVPEKLKTANLYHAAVRENGRALEFVPDKIRTAKLCLAAVMNNYEALEYVPEKFKTAELYLAAVQENGRALQLVPKEYKTAKLCLAAVLIDGSA

SEQ ID NO: 88208 - protein, 129 aa, Unknown
  Obtained from environmental sample
  misc_feature (1)..(129): Xaa is any amino acid
MSIYDKAPNRKEIARRIENYHLYEGESLDLSHLYMTELPLEIKSMENLTVLDLSYNQLKTLPDWIGDLRSLKRLNLRWNELETLPDSFTELKKLTFLDVGLNYLGGSLGCLEHLKTLEHLDLKESSSMH

SEQ ID NO: 88209 - protein, 275 aa, Unknown
  Obtained from environmental sample
  misc_feature (1)..(275): Xaa is any amino acid
LDADPRPQNGVYAPVRCVEAPVAAFARDAECSRSVWSADEGYPGDPHYRDFHKDIGHYLDLRYIAPYIDPAGIRVHTGIKYHRVTDKRDPNKQLYERENALRRASVHASDFINKRAAQISKIADGMNRPPIAAAPYDAELFGHWWFEGPEWLNFLIRKCATDQDTFALITPSEYLERHPESQTCAPAFSSWGDGGYSQVWLNETNEWIYPHLHRLEDRMVECAREFRLVGCGLEQRALNQMARELLLAQSSDWAFIMKTGTTVEYATRRVKEHIA

SEQ ID NO: 88210 - protein, 75 aa, Unknown
  Obtained from environmental sample
  misc_feature (1)..(75): Xaa is any amino acid
AICQAARNGVSIDGATLYCRMTPCRTCAMLIINCGIIRVVCQRRYHDAGDSEAMLSAAGIKLEYVHDEVQEYEKQ

SEQ ID NO: 88211 - protein, 339 aa, Unknown
  Obtained from environmental sample
  DOMAIN (81)...(332): DAHP synthetase I family
  misc_feature (1)..(339): Xaa is any amino acid
MVFILKPNIPKEKIDKFISDWEQKGFSTIFSVGTEHTAVCLIGNTAEIDLDHVVNTSDIVDYGKRITEQYKAVNRSVHEDNTIIKVGNASIGDGFFTVMAGPCSVESREQILEIARGVKKSGAKILRGGAFKPRTSPYAFQGKQAEGLEMLRMAKRETGLPLVSEIMNQTQIDLFEDIDIVQVGARNMQNFDLLKEVGKLKKPVLLKRGLANTIEELLMSAEYIVSSGNEQVILCERGIRTFETMTRNTLDLAAVALLKQKSHLPVIVDPSHASGIRSLVPPLAKAAMAVGADGLIIEAHNDPAKALCDGAQSLDLEQFHSLMDELKRRAVIENKIFQE

SEQ ID NO: 88212 - protein, 666 aa, Unknown
  Obtained from environmental sample
  DOMAIN (517)...(605): Hpt domain
  misc_feature (1)..(666): Xaa is any amino acid
AYLIINDILDFSKIEAGKMEIIPIKYLLSSLLNDTANIIRMRLMEKPIRFFTNIDGNIPNSLIGDEVRLRQIILNLLSNAVKYSDKGHIGLSIMEQKREAGQVWLGIIVTDTGKGIKSEDQARLFGDFVQVDTRKNRSIEGTGLGLAITRRLCHIMGGNITVESEYGKGSVFTVVIPQGVDSPEPFAVVKDAANKKVLVYESRVIYAKSVCWTLDNMGVPHTMVSNQDDFAAALYREEWFYVFSGYGLYERIKPLMEKSATAFCGGKKPSLALMIEWGTEAYIPDVRFVSIPVQSLSIANVLNGMADNKGYIKSSGLIRFTFPRARLLVVDDIATNLKVVEGLLAPYLAEVDTCLNGLQAIELVKRNKYDIVFMDHMMPEMDGIEATTTIRALKGERFRTVPIIALTANAVMGMREMFIKNGFNDFLSKPIDVSKLDEMLNKWIPKDKREAGAGNSPTKLAQEQGTLRQAQEPNPEPRSRYPVIHSSEPCTPIPIIPGIDTAKGIVMTGGTVAAYTKVLSLLCKDIEERLPFLRKALDENLPLEDILPAFVTQVHALKSALASIGAQSISSLAAGLEAVGKAGDIDFIRESLPDFLGQLTALGKNIGDALEQGKPEYQDDPRSPFPVPAPTLLASSLLKELAEALKSQKISEIKRILNTLNQQAQD

SEQ ID NO: 88213 - protein, 223 aa, Unknown
  Obtained from environmental sample
  DOMAIN (10)...(196): haloacid dehalogenase-like hydrolase
  misc_feature (1)..(223): Xaa is any amino acid
MKFKEKTFRPSAVIFDMDGLMFDTENLTIPFWEVAGKPFGYNITYDIVLRMVGISAEKARLVLQEEFGSDFPYDTIRGEFRLLVNKEIEQKGVPQKPGLMYLLDRLRAANIPLGVATSSRSGTAINMLTKAGIIDRFKAITAGEEVTNGKPAPDIFLLAAEKLRSPPSACVGFEDSTAGLMGLHAAGIRSIYIKDVLSPPQEVLATVWRRCNDLSEAAALFGI

SEQ ID NO: 88214 - protein, 402 aa, Unknown
  Obtained from environmental sample
  DOMAIN (1)...(61): Phosphoribosylglycinamide synthetase, N domain
  misc_feature (1)..(402): Xaa is any amino acid
MGNESPETEKGQELLLGFAKKEGIDLTVVGPEAPLAEGIVDRFRSAGLAIVGPGQKAARLETSKVYSKSFMGKYKIRTAASKNFTNHADALKYAEKHFGKAKETNPSPLVIKADGLAAGKGVVVAADFAEAKQTLSSFMEESSLGEAGKSVILEEYLEGLEVSVLAAVSVSPGKKGVIKPFISARDHKRRFEGGQGPNTGGMGAIAPVPDFTEVARNDFEKAILAPTLKGMEEEKMDYRGFIFFGLMVQEERCYLLEYNARLGDPETQAVLPLMDSDLAGLCAAILDGTLQDFPLKWKKGAVCAPVAVAEGYPGPYRKGDPIATNPEELEKTGAKLFVAGASRGAGGPLGSGLRTAGGRVLCVSALGSDADDAFAKAYQALRYVSFEGMGYRADIGREHGQS

SEQ ID NO: 88215 - protein, 350 aa, Unknown
  Obtained from environmental sample
  DOMAIN (1)...(323): Nitrogenase component 1 type Oxidoreductase
  misc_feature (1)..(350): Xaa is any amino acid
AHRHNGVMRYIIGTGDKAPKTKFSVNILGEYNIGGDGWEEERILKRCGIEVLNLFTGDASYESLKSSHLAHLNLVMCHRSINYIAEMMKTKYGIDWLKVNFIGIGATCKSLREIAKYFNDPALTKRVEEVIAEETQAVSEDMEYYKTRLAGKTAGIFSGGSRSHHYQVLLEDLGMKTVIAGYEFAHRDDYEGRDIIPQIKEDADNKNIESITVTADAKLYRETYTQDQIADLRKDIELDTYDGMIPEMCAGDVVVDDYNHFETDALIKTVKPDIFLSGIKDKHSIQKAGVSSRQIHSYDYSGPYSGFHGAVNFGRDVAMAIYTNAWQLVTPPWKHQPMLTGTIAEEGKNA

SEQ ID NO: 88216 - protein, 417 aa, Unknown
  Obtained from environmental sample
  misc_feature (1)..(417): Xaa is any amino acid
MAIQFLIIIAVILILLLCIKMKTKRQRIAVLIGFVVSILSFFAFLAVIFSAQRTILWSLLLVFYVSLIAFLIFWNILKTKKVYLILFVPAICILLAISIIGYYSYIHKIPTINEESNLYRYKSSTENNVLAKLDEESNLKLTDNLPVLDGATALYPVYASFAQAVYPKNEYESSDAPVISQENVYKTSKAQVLCTTTVGAYDNLLEGKVDIIFCAAPSASQRKQFYDNGINLNLVPIGREAFVFFVNKKNIVDNVTIENIQGIYSGRIINWKELNGSNQKIRAFQRPENSGSQTALEKIMGNILIMEPRREDVSTGMGGIINRVAAYKNFPNAIGYSFLFYSTEMVNNDQIKLLSIEGIYPSRETIQNGRYPFSDDFYAIYIDTDDKNENIESYIEWILSEQGQELVSKTGYIPIKR

SEQ ID NO: 88217 - protein, 231 aa, Unknown
  Obtained from environmental sample
  DOMAIN (18)...(231): Protein of unknown function (DUF541)
  misc_feature (1)..(231): Xaa is any amino acid
VLIVLCAASCNKETDRQNQSTISVFGTGTVSVQPDVIQMSITLSNVAQTTKKAQEEVSKMVRQTLNILKEAEIEDKNINTAFLTFNSEYEYTNKRILVGQRAQQSITFSIENIVNENEKASSIIDQLIQINGIELNQVSYSVKNTADYYVKSRELAYRKAVEKATQYAELSNLKIKRVLNMTDQGTQQVSPMSNRIRQLSDQIMEAESSSTVLPIGELEITTNILVVFLLK

SEQ ID NO: 88218 - protein, 315 aa, Unknown
  Obtained from environmental sample
  misc_feature (1)..(315): Xaa is any amino acid
MEINKENPPQNEWGPYDFGNGQRIFDIRYDPVFKAVFTRDTEESRKSLSHLVSALIGRVVTVKTVIANEPAADYLGGKKIRFDIACKSKDGEPIDVEMSFYPITDELNRLEYFSSRLFVGQDIAGVEKSYCDLKEAYQISILARRNFFPDKKLTHMFLFYDPEARVSLEGKVRIITLELEKAAMCVDKPVCEMSKAEAWAVFFQYLTNEEKREKIKEIIAREEGIAMALNAMFQITSNYEEYSRLTTDLKNQLDWQASMVGAKREGRAEGRAEGLSKGRAETSLEIARKMKNAGRPLSEIAEFTGLPPETFTTEK

SEQ ID NO: 88219 - protein, 70 aa, Unknown
  Obtained from environmental sample
  misc_feature (1)..(70): Xaa is any amino acid
MLMTEWNIEDAQKVWFEDGWEKGLEEGREEGREEESFSIAQNLVKLGLPIETIISATQLDPEKVKALYQQ

SEQ ID NO: 88220 - protein, 81 aa, Unknown
  Obtained from environmental sample
  misc_feature (1)..(81): Xaa is any amino acid
MGIMNDVSFEIGGKLVILIEHQSTINPNMALRLLMYIGRVYEKIVGDMNVYSSRQLRIPRPEFYVLYNGIAPYERRKKREE

SEQ ID NO: 88221 - protein, 198 aa, Unknown
  Obtained from environmental sample
  misc_feature (1)..(198): Xaa is any amino acid
FSVNERVATIRDVSRSVINMLVGDRAIMDIMGLERSAIEAEGIALMNETFRGYNLGIDVIAVKLQNVTPPAGVQQAFEDVNKAMQDRERLINEGQQVYNEEIPKTRGEAERLIQVAQGYATERVNRANGDVARFNAVYNEYRRSPDVTRQRLYYEMIEEVFKGEEGTVIIDRSLRNFLPMMNLGGGTPSAAQGAQGGR

SEQ ID NO: 88222 - protein, 131 aa, Unknown
  Obtained from environmental sample
  misc_feature (1)..(131): Xaa is any amino acid
MSPIFVVFIAVAAVAAFIGGFFWRVTVDRKYRREQEEQLSREAERILKEAKNEAELRKKEALLEAKDEWFKAKTEFEKEAAKTRDQIRQEQLRVKEADMEVKKQRDHNNKRETEFAARESFLNSKEKTLRT

SEQ ID NO: 88223 - protein, 252 aa, Unknown
  Obtained from environmental sample
  misc_feature (1)..(252): Xaa is any amino acid
MKINELRLNGLHNDAHFQFYAEIRTLVEETTPAALKIEAGWLLFIPAFENYDAALRKIIKSAITDQIKDADAARDAAFAAFAKFLAAMCEHYDTKIRNAALKVHVVAHTYGNVAAKPINEETSAVYNLVQELKSENYRTAVTLIGLMPWVNKLGTLNTDFESLIQERDRENEAKSHISMKTARRNIDDTYKNIVKTINSLIYLNQLTEYETFVDTYNIVVKRFNTLLKQQQSISRHHGKGGGTGGTDDGNEE

SEQ ID NO: 88224 - protein, 385 aa, Unknown
  Obtained from environmental sample
  misc_feature (1)..(385): Xaa is any amino acid
MKVFNRQGRGRTLLLAAVVAVGAALVSGAVAQTDTVYVWFVVNVPAATVSATDGTVQMQFSLSSCREKIGFPVLKTTDIAYEARRQINAPAIISGRNGQVSVNLPAQSYSNAEVLLYTVNGKRILRRKVSASNSVNSISRNNLATGVYLLSVRGTAIEAITARLNHGGGEVNINVAFGDVGENLSAASQMSKKAADAVLKWTVTVSAAAEGYKDRVFTIQPVAGKNAMQNIKVLADPDAVVKGTFTDIRNGQEYKTVKIGDQTWMAENLNYQTDSSWCFKNADSNCVKYGRLYKWVMTVGVCPTGWHLSSHEEWRDLVRATGAGSGTAETLKAESGWAKYSFMNCCNGTDDYGFSALPSGRRMWGSSGVFDYAKNCLLVDGYGER

SEQ ID NO: 88225 - protein, 238 aa, Unknown
  Obtained from environmental sample
  misc_feature (1)..(238): Xaa is any amino acid
MAFVDAERTQLYLRCALFGPSGSGKTMTALRMAKGIAEKMGVPVAVIDTEARSATKYADRFAFKVDNLKEKTIDHYIASMEEAAQKGYKVLVIDSLSHAWRETKEEVDRITQASVSKNSILSWGKVGPKQKRLVDAILNYPGHLIATMRSKTEWVIGEGKDGKIAPQKIGLAPEQGKGIEYEFDLLLELNQDHFATVTKDHTSKYQDAVIEKPGEDFGVALYDWLMDGKTETPAAAPT

SEQ ID NO: 88226 - protein, 316 aa, Unknown
  Obtained from environmental sample
  misc_feature (1)..(316): Xaa is any amino acid
MHGILENDFMFSGRGEVPWHGIGAVLDGVLTSDEAIREARLTWTVEQVPVYTANNPAESIPGYLANMRSDTEEVLGIVSERYKVAQNKDVFTFADDLIGNGRVKCTYETAGSLFNGRRVFILVNMPKGRIVEDEYQPYLCLSNAHDGSACLQVFLTGIRVVCNNTLSAALNTAKRKISIRHLSAMEQRKDEAIKTMGAASKYFHDLEAFASELAGKKVNIGKVLDRLFPASREMSLRQLKTNREVKELIKSILKQKDDLQNFKGTAWGAYNAIADYRSNAQPKRRTDTYADSKMAMFLDGDSVMNEAQEIIMELAA

SEQ ID NO: 88227 - protein, 247 aa, Unknown
  Obtained from environmental sample
  misc_feature (1)..(247): Xaa is any amino acid
MLLAKIYSARPGRYFALIPQEIDAAELAADLASLEVPGLQFPGWGVAPYRELAPLSAVFGERIRVLSDLVTARPGIVIISQRAFLSPLPPPDYIKSLLISVKPGAKIDLTELSRKLVSYGYIRVPRVQVRGEFALRGEILDIFMGGDESGAEDEVEAFRVLFDFDRVESVKRFNPSTQGGGLGKDKIVELLIRPMRELVWTDDRIETLSANLAACKEFTDGGKAIIEELITHRNFAGEEMFYPLAIN

SEQ ID NO: 88228 - protein, 272 aa, Unknown
  Obtained from environmental sample
  misc_feature (1)..(272): Xaa is any amino acid
RSTDFNDGDSMLLVISMKTLSTTSEDGTGKIRLIVEQEASPNERTLQEIVYTLPGGGWFTAYLPFRAKNGCTRLCVWLGYDLQTVQFGGYQIINYEKKAELFQLPISSIMGEKPDGRELFDKDNTWRRDAWARIEQIRKGDFTVNVRDSSGNAVSGAQVRAAMYEHEFRWGTAINGNINSNTKYRAGVSLLFNAAVLENGHKWSNWESNSADTRSLFNAVVGLGLKYIRGHTLIWDKKFLARAAWPGSNYSIPKRVYDSFQADDKAGSGQGD

SEQ ID NO: 88229 - protein, 209 aa, Unknown
  Obtained from environmental sample
  misc_feature (1)..(209): Xaa is any amino acid
LGKFNFDKPVDRQTAYSYSIKHDPVSRKKPADVLPLWVADMDFPAPPCVLDVLSERVKHGVFGYSEPDAPYFAAVQGWFEKRFDWHIDREWLSITPGVVNAIYVAIRALTKPDGGVLIQQPVYYPFESAVKDTKRKLLVNQLVYGGDGRYGIDFADFEEKAEQAEMFILCNPHNPVGRVWTHDELLRMGEICLRNGVIVVSDEIHQDFI

SEQ ID NO: 88230 - protein, 84 aa, Unknown
  Obtained from environmental sample
  misc_feature (1)..(84): Xaa is any amino acid
MVSAAATTGEQKSFADKLSYFDRINNMHLKNPRLIGFGISNKETIDVVFQHASGAIVGSAFIKILEKTNDVKEGVRLLLEKLRS

SEQ ID NO: 88231 - protein, 161 aa, Unknown
  Obtained from environmental sample
  DOMAIN (1)...(161): N-(5'phosphoribosyl)anthranilate (PRA) isomerase
  misc_feature (1)..(161): Xaa is any amino acid
MKHSQNIIDLVKVQPDYIGFIFHEKSPRFCENELKNLDFISKKSKRVGVFVNEAPEKISDTVLKYGLDLIQLHGKETPDYCKKLKQKIHDIKIIKAINIANTLDLEQTEIYNNDCCDYLLFDTKTHLHGGSGVKFEWWMLDWYDGEIPFFPSGGISANDVA

SEQ ID NO: 88232 - protein, 63 aa, Unknown
  Obtained from environmental sample
  misc_feature (1)..(63): Xaa is any amino acid
MDTSLSLADKIPAEFVKISESGISSVETVRTLREAGFKGFLMGENFMKEEYPAEALKIFIQDI

SEQ ID NO: 88233 - protein, 601 aa, Unknown
  Obtained from environmental sample
  DOMAIN (126)...(270): GAF domain
  misc_feature (1)..(601): Xaa is any amino acid
VAMTIRSFFEKNRKGISYYLKLLVVVVAFVIIIVSSCLYAGYVLKNHLSQALNNELIDQIITRMALLLASLGIALIAALSITLLSIDSKDIREFINMMKKIELRDNLLKMVNHAAMTLLSAKDEDNLMSSVLAGMEILGNAVNVDRVQIWQNEMIDGTLHFVHKYEWLSEFGKEKSPVPVGLHFPYKSKPDWEEKFFAKENINCPLNELPKEDQDFLRPYDIKSIVIIPLFMQERFWGFFSLDDCREERFFSDDEMKILHSGGLLVANTFIRYDMTENIRNTAIQLETALKEAQDANMTKSKFLATMSHEIRTPMNVILGVSESYLQNESLSQDERDGYNKIYNAGDMLLHIINDILDFSKIEAGKLELIPVKYDIMSLINDTAQMNVIRYQQKPIKFSLSIQDNMPVSFIGDELRIKQILNNILSNAFKYTDAGEINLTFTVEHADKENEVTLIFTVKDTGQGMTPEQVNKLFDEYTRFNIEANRTTVGIGLGMTITKNLINLMNGKLIVNSQFGKGTEMTVHIPQKLAGQETIGKKHIENFNGMLLEKKDYPTSKKINRELMPYGKVLIVDDMTSNLDVAKLLLRPYQLNIETVESGWK

SEQ ID NO: 88234 - protein, 96 aa, Unknown
  Obtained from environmental sample
  misc_feature (1)..(96): Xaa is any amino acid
MEKYQEKCRKNLLKNSIEKENYEIAIKEWYFHHEVIDNNEFFDINVSRPSCELCEHEDLRWQFVIYNINNSNQLKVGSSCIKQFNIALLEKDGRKI

SEQ ID NO: 88235 - protein, 123 aa, Unknown
  Obtained from environmental sample
  misc_feature (1)..(123): Xaa is any amino acid
VENIEFKELGTIDINNNVLDHYNRYQEIKKCYRKEDENWVIKNIEFIENWDKDKKERVIKDFLKTINDGGSVFGAYDNNKLIGFAVLYNKIFGSKKQYIQLGNLQVSYGYRHKGIGRKLSEMC

SEQ ID NO: 88236 - protein, 179 aa, Unknown
  Obtained from environmental sample
  misc_feature (1)..(179): Xaa is any amino acid
MKKQFSLVFFTLLIVCFLGALPFYFSGSIPNFTDAVFESVSGFTTTGATVLKDIEALPNILLFWRALTQWLGGMGILLLVIDNFRIQKKRIIRILLSIYAALTALQFILLAIFGMNWFDALTHSMSTISTGGFSIRNNGIAYYKSAAVEWVCVFFMFLSGINFFLIWRFLLEKLMMYTQ

SEQ ID NO: 88237 - protein, 442 aa, Unknown
  Obtained from environmental sample
  misc_feature (1)..(442): Xaa is any amino acid
MRRIQNLTREELAQKVQAVTAIDERIREYDAHLEELLQMTGRVQDNLNRLREESAYVEDVEKKVREINEKFDAAENEIDSLGEKLASIEADFERENATALEKAVEESVSAAKSAILDMEAEAQTISRKVEEYREAVNKLERGRVERLSRDEERIEKLLTEAVDRAGNRADKVEEAALIKLRDQAQERVNHIKTNFEEKIKSIQETVKTKITEINEHIKESRDEWKNETTSIETRQKEYAANWKKDIHELDAFAKQVKDEWAAIAHRTGQELITAAELRLEEYRLVQEEQYKQLASISNDTTHLEEELRRSMLETINRVNGDFARFENEMNKSWEEASNKMHESWEGEANKMRNSWKDEANKMRNSWKDESGEYTADLQALRQDMAGIDDELRKSMRETISQVNGDFARFENEVRDSWKDETNKIHDSWETETNKMRDSWKQS

SEQ ID NO: 88238 - protein, 851 aa, Unknown
  Obtained from environmental sample
  DOMAIN (126)...(678): Ribonucleotide reductase, barrel domain
  misc_feature (1)..(851): Xaa is any amino acid
MKPVLQEGNREPPVRHPPAGSVEVPEDGAEHDARQVFHRLAFTWMDWGRRNKYFDSNEDAKAFYDEICYMLAHQLAAPNSPQWFNTGLYAVYGIDGPAQGHYYFDPVKNEVVKSDSAYKRPQPHACFILSIEDDLVNDGGIMDLVTREARLFKYGSGTGSNFSRIRGLNEHLSGGGVSSGLLSFLKIGDRSASAIKSGGTTRRAAKMVTLDVDHPDVEKYISWKAEEEHKVASMVTGSAIVKKHLDGIKKALASFRGPDTDKFNIEKNHDLAAALRAALNDKIPTSYLYQQLRRLEHGDDDVFSQVFSTAWDDEAYNTVSGQSSNNSLRISDEFMWAVMNDGDWNLTNRTGGNVVKTIKARKLWTDIARSSWQCADPGLQYHTTINDWHTCPADGEIRASNPCSEYMFLDDTACNLASVNLARFYDKTARTFDVEKYLHAIRVWTTILEISVVMAQFPSPEIAELSYKYRTLGLGYTSLGSLLMIMGLAYDSPEGRAVAGSLSAILTGEAYAQSARMASELGPFAQYAENSNAMLRVIRNHRRACNNAPPSQYEGLHTIPQGIDPAKCKATFDLSYLLGTAKKSWDDALALGERYGFRNAQVSAIAPTGTIGLLMDCDTTGVEPDFALVKFKKLAGGGNFKIINQSVPPALAALGYNEKEIEAITAYATGHKTLKGCPAINAESLAEKGFTAGIIGVAEEALKNAPSLESVFSPWTLGKDFVEKKLKIPEAAFSQNGFSLLKRLGFSSAEIEEAEQYACGTMCIEGAPGLKKEHYSVFDTATPSGKHGRRSIPWTAHVEMIAACQPFISGAISKTINMPNAANYEDVKGAYMLAWKRALKAVALYRDGSKL

SEQ ID NO: 88239 - protein, 820 aa, Unknown
  Obtained from environmental sample
  DOMAIN (151)...(708): Ribonucleotide reductase, barrel domain
  misc_feature (1)..(820): Xaa is any amino acid
WSQIATDIIAQKYFRKAGVKLDKIYEWKKYIAPQSGTEAERAARFDFSLPEDGAEHDARQVFHRLAYTWTDWGRKNKYFDSADDEKAFYDETCYMLAHQIAAPNSPQWFNTGLYAAYGIEGPAQGHYYFDPSSSTVKKSENAYKRPQPHACFILSVNDDLVNSGGIMDLITREARLFKYGSGTGSNFSQIRAQNEKLSGGGVSSGLLSFLKIGDRSASAIKSGGTTRRAAKMVTLDADHPDIEDYIAWKAREEHKVASMVAGSQIIHKNLLEIKKALDSFRGPDEDRFSASKNHELETALRNALGDKIPPSYLYQLLRQLQQGDKDINPGVFSTAWDDEAYNTVSGQSSNNSVRLTDDFMKAVLDGKEWKLKSRVKGETEKIVSAGKIWKDIARSTWACADPGLQFHTTINDWHTCPSGGEIRASNPCSEYMFLDDTACNLASVNLARFYDKTARTFDVEKYLHAIRVWTTILEISVVMAQFPSPEIAELSYKYRTLGLGYASLGSLLMIMGLAYDSPEGRAVAGSLSAILTGEAYAQSARMAAEFGPFAQYAENSSAMLRVIRNHRRACYNAPPSQYEGLHTIPQGIDPAKCMASKCQAGFDLSCLLDAAKKSWDDAMTLGEKHGFRNAQVSAIAPTGTIGLLMDCDTTGVEPDFALVKFKKLAGGGSFKIINQSVPPALAALGYSEAEIEAITAYATGRKTLKGCPVINAESLAEKGFTPEAVALAEEALKSSHSLEAVFSPWVLGKDFVEKKLKIPHSSFSQNGFSLLKHLGFSSAEIEEAEAYACGTMGLEGAPGLKKEHYPVFDTAHPLRESTAS

SEQ ID NO: 88240 - protein, 401 aa, Unknown
  Obtained from environmental sample
  DOMAIN (55)...(134): Toprim domain
  misc_feature (1)..(401): Xaa is any amino acid
EGKIVAFGGRALPGTVQSDGNEPPKYINSPETEIYKKGQTLFAIDHAKPQMRQTKTVYLAEGYMDVIALHQAEVVNSVAPLGTAFTDEQAAWLRRWVDNVVLIFDSDEAGQKAAYKAIITCRKNGISCSLVNLQEGLESEIDGEEAEKIKDPADILQKFGPQILKKVVKFTINDFEYLISRGRLQYVAAGGDINGAVEFMFPYLEALDSEIDRDDSITRIADIFKIERSAVLKEYSNWKLTGHRDFSEKPAEVRQKLQITVNDELRLLTNVALNQELYPEFRAALEIKDVNDPAAKELFISLEECFKHDENGVDFLLERIKDEALRDFIAKKGTSGEFKGDSRKFMEDGIKQIRKKLLEKRLTEINAQMREGERTSTDADIDILLAEKKEIDSQIRKLEGR

SEQ ID NO: 88241 - protein, 281 aa, Unknown
  Obtained from environmental sample
  misc_feature (1)..(281): Xaa is any amino acid
LPQAQNYAGKVSANTTLNTILDEHLSPILNTVASKGQLQTHNLKIQNSELFGTMANLLKNESWRTPTLNNININYEIKDGQLTIEPIRMNIAQASLELTGSQGLDMSLNYKVNTTVPVSAIGSAASDILSKIPGGSRLREIKVTGLITGTVKKPLVTLGVADMVDNVVETVKETVKEQAQAVKEQAKEEVDKQISAIMADAEKQAQNIRDNAKLAADKIRAEADANAQKLEDAAKSPLEKAAAQVAAKKLRDEGNAAAAKLEQEAEKQVTAIMDAARQNKN

SEQ ID NO: 88242 - protein, 530 aa, Unknown
  Obtained from environmental sample
  DOMAIN (201)...(452): SNF2 family N-terminal domain
  misc_feature (1)..(530): Xaa is any amino acid
MPTDQTNSTGLNPQNPLIVQSDSALLLEVNNPLFPEARNAVSQFAHLDKSPEYIHTYSITPLSLWNAAALGLTAADVEERLARYSKYPLPRNVVDGVKELMGRFGKLTLESGESGGLVLRSVDAEMLAQLCRHPQVAPLVGQSCGEGRVSVAPRNRGLIKQALIALGYPAHDLAGYVDGDPYEVSLREASLSGAPFAVREYQRLAAESFVGSVRAPGGSGVVVLPCGAGKTIVGIYAMSLLKRRTLILVTNVTAAHQWKREILDKTTLREDEVGEYSGDVKEVRPVTLATYQILTYRKSKESAFLHYDIFNSQNWGLIVYDEVHLLPAPVFKFTADIQARRRLGLTATLIREDGLENDVFTLIGPKKFDVPWKDLERQGWIATAKCVEVRVDLPPSEKMRYLSLTPRQQIRLAYENPSKLNAARDIVSKHKGDNILIIGQYITQLEMFAEELSAPIITGSTANKRRDELYKQFRDGEIKVLVLSKVGNFAIDLPDANVAIQISGSFGSRQEEAQRLGRILRPKKRGEQAV

SEQ ID NO: 88243 - protein, 270 aa, Unknown
  Obtained from environmental sample
  DOMAIN (26)...(180): Caudovirus prohead protease
  misc_feature (1)..(270): Xaa is any amino acid
MPDTPAKTRLQRTMTFERGKIDIENRAIEISVSSDSNGITRFISPFGPVKEILGHKRGEIRLDRLAGENGGPLLFNHNFDELIGRFTATGVEGGKLRGIARFGTSPRAEALWNDVQNRILCDVSITYDYDPSAAVVTERDASGAALAVRITDWEPFEVSFVTVPADHTVGVGRSLRAKDDDEDESEAAPSKDEDDDERSADDDADDEKRSIKPSITTATGKRQRPTKEATMPQAAPTAAAQAANHKDDRIVQLLQIADEYNVTAEKRNEW

SEQ ID NO: 88244 - protein, 389 aa, Unknown
  Obtained from environmental sample
  misc_feature (1)..(389): Xaa is any amino acid
MRAARIARGTRDARGENPDMHILSSGALDDITNAISDLSPRLVIIDSIQAVYTSALNASPGSLSQVRECAWMLTEECRARGGTLILSGHVTKDGTLAGPKILEHMVDTVLYFEGSRDRELRILRSVKNRFGNVNEIAVFTMGEKGLREIADPGGVFLEGMPKIGSHGPGSILTAALEGNRVLLAEVQALVTPRVSGSIVRTTDGVDANRVQRVRAILESQLGMNLGDQDSFVNVTGGLEINEPAVELAIAAAIYGSARGLCPDSRLIVAGELGLLGDLRRIPQAVKRAAQARKFGMEACLLPEANAGEFPRAEEGKDMSVLFAAPHSPPSTPLADSGALAMRDAHVLFAAPHSPPSTPLAGSGALAMRDAHVLFAANLRDALAIIFPEN

SEQ ID NO: 88245 - protein, 334 aa, Unknown
  Obtained from environmental sample
  DOMAIN (114)...(143): SWIM zinc finger
  misc_feature (1)..(334): Xaa is any amino acid
MKSQYGITPWGSWFIDVLNSYGLEGRLDRGRTYANTGKVLSLKLEAGRAVAKVKGNYRPSYKVEIIFPPLKEAELVYKMIEEDPLLLAHIASGELPETFLQKLKQKNISLIPRHWREMKKSCTCPDEYGDPCKHLAALYFIIAREIDTDPHLLFRLRGMDLAARFGKLAVQRILPPFTISHSVSDNGNIGEKESTALTVRPSPPILEEIPNCVNLITALLPSAPAFCKRDFAVVMAEFYHRTAHYRAWETAEVAIRQKPNTIFRARSGQYTVPILAPEQSCFWMLRTLTATSDGLHPAMPLNTLSAFRRKTEQRPTVFFSIFLSFLTCYVLPAR

SEQ ID NO: 88246 - protein, 384 aa, Unknown
  Obtained from environmental sample
  misc_feature (1)..(384): Xaa is any amino acid
VLAKGKTLKIIWRPFETLPDVRKILDAIGAIECGMLNTVNGRSVVDLLASAFFNEWVYRRSLAFRKSFGRQSGGQEYLELLNLFFYETEIDVSTPARRSLPQAIDRWLAVLHIDFTAYRYSLTVKDAHAKRAFGTDFKFSLSMDVITEEKDETRKIPLCQCKDLDALKAPIALSNYLPEIRQLASVSEKTRKGSVELSQTRLVNFLESASFLLSRLGMTVELPKSLHRELKPRLLVKADSAAKGSGSLKRYLDLNVLQDFEWQIAIGDEVISIQEFEKLVKQKQDLVRFRDGFIKIDTEELARLLKKAKDTKPDLNDFLKAHFSGDTILAFDVRKIIDNLFHEQNLPVPNSLNADLRPYQKRGFNWVCSLLLSGFGCILADDMG

SEQ ID NO: 88247 - protein, 65 aa, Unknown
  Obtained from environmental sample
  misc_feature (1)..(65): Xaa is any amino acid
MYAEMALRDEGMKILINKLGHVEAERFISLIIREPFDYTEWQRDLFNEMSVKELSNIAMKEYKSE

SEQ ID NO: 88248 - protein, 746 aa, Unknown
  Obtained from environmental sample
  DOMAIN (10)...(250): Iron only hydrogenase large subunit, C-terminal domain
  misc_feature (1)..(746): Xaa is any amino acid
MLIDDTSRFMNDLEQKNKIIAIAAPAVASFFPNQFLNLNGWLKSLGVEEFFDVSLGAELTVVSYLNYIKNKNPRMVIAQPCPAIVTFIEINHPELLPYLAPADSPILHTIKLIREYYPQYKNHKIAIISPCIAKRREYDETGMGDYNVTMIALRKLLDEHNTDLSVFPKIEYTGVSAERAAGFPIPGGLLDTAERFEPGIRRRTEKIEGVYAIYPYLREISEILKTDAQLPLLVDCLNCEKGCLGGPGTGNAEKPLALLKEPVQRRIAKLEEELNSKSGEKAFSKYHDVLKRYWKKDLYNRSYRNLSENNTIKQPSEEEITKIFRSMKKFGEEDIYNCTCCGYGNCKSMAKAIFNKLNKAENCAHYILALLTEKTNTEELNRQLQEHIAQASGLIEGINKLINKLNAAIISQADTIAQSSAATEKMIDSLRETSEISRKKQVAIKGLIEDTAKSQTSMRETIQSIEEISKSVEGISEAIKIISAIAANTNLLSMNAAIESAHAGEAGRGFAVVAGEIRRLSDSTRENSVNIAKTLNSIINGVTVTEKQSGDTGTRITEMAKEIGSFAKTMSDLINTFGELSAQSGEITAALDSLNSQSEMVKTDYVEILSMTDKLRAAMYNLTMLSKKKVIVVDDEETVLTMTKNTLKDGYNVTTANSGKEALDLFLKGYVPHLILLDLYMPEMDGWDAFVRISNIGQLHNIPIAIYTTSNDQKDKDKAEELGAVEYINKPINKTELLEKVSKLLG

SEQ ID NO: 88249 - protein, 314 aa, Unknown
  Obtained from environmental sample
  DOMAIN (1)...(313): Glycosyl hydrolase family 10
  misc_feature (1)..(314): Xaa is any amino acid
MDGTYFDMIKNNFNVITPEDGLKPISLTSNRGGAYNWTYADQMVSRMLENGIPVHGHVLVWHDWTPEWMTRGTKTEVEDNLKNHITNVLTHYHGRINSWDVVNEAMRDGLSPAETAGDWRKCLRTDAPWYRALGAGYIETAFRTAREADPGITLYYNDYGLEFPQKAEATRKMINDINNRYKKETGQDRNLIEGLGIQSHYDAKCFDENRVRSSMEKLKTLNIELSISELDVNFADYKEGSGNDIIMSEYDAAVQARIYAQLFKIYREYSAYISRVTMWGIDDRNSWISAGTPCLFDRYLNPKKAFNAVFNSEN

SEQ ID NO: 88250 - protein, 472 aa, Unknown
  Obtained from environmental sample
  DOMAIN (56)...(220): Na+/Pi-cotransporter
  misc_feature (1)..(472): Xaa is any amino acid
MGANIGTTVTAWIVSLIGFSLKLSELALPAVGIGFICSIIKWKHRNIGDFILGFGLLFMGLDILTKSMPSLGENVYIIAKASNMGFLTDLIGVAFGTVITLLLHSSSATTAIILTMAYNGIIGYELAAAMILGANIGTTIDAALASIGTKTNAKRAALVHVLFNVFGTVWALPLLKPLLALVDFVTPGTMTLGMIHDPMETAHLAMLHTVFNVVNTIIFLPFVNYFARFVSFLIKDDPSEETGPAQYRFTYASGKIQNTPEMQIVFAEKEVRDMANHVLLMFSSFNKVIQSLFETQDKQTAVTTLGLELRQKEEYADQMRDQIGAFLMTCAREQLNPRSEHRVSQLLRVISDLEEISDDCCSLSFILENGVNENFIIKKKEMDALVPYLNQVENFLNLVKDNLGRRLSTNTLSYARELENEIDLNRDKLRKLGRKRLESGKNVKTELLFIDIVRRIEKLGDYCLEIAEILAV

SEQ ID NO: 88251 - protein, 166 aa, Unknown
  Obtained from environmental sample
  misc_feature (1)..(166): Xaa is any amino acid
MGVIKTALEIALEKTEKVKSDKSSIGQFEVKKRGKKLANEFLEGEVDLASEIKKTPAKDRESLKQGIFDVLVAQIALPNAKEDEKRIEKLGKGLSAVINKGEFNDMYRQLTMLFAQYLKEVSQYKQMITQQYAPKLRQKEEELSRRFGREVHIDPFQDPELSLLQP

SEQ ID NO: 88252 - protein, 75 aa, Unknown
  Obtained from environmental sample
  DOMAIN (44)...(67): 4Fe-4S binding domain
  misc_feature (1)..(75): Xaa is any amino acid
MAKKGKVIIDRELCKGCLLCLRACPVKVLEADSELNSSGCHPSKAARVEKCIACGNCYEVCPDVCIEVYEIEGAA

SEQ ID NO: 88253 - protein, 610 aa, Unknown
  Obtained from environmental sample
  DOMAIN (515)...(593): OB-fold nucleic acid binding domain
  misc_feature (1)..(610): Xaa is any amino acid
AGITLKQAFKDEPRLQGMEADPRYTELFALARKLEGLNRHSSLHAAGVVIGKSALHNLVPIFKDTKTGAIATQYDMNHLETCGLVKMDFLGLKTLDVIRHTEEIIRRRGGEYAHFKVENAPENDEATFRMLGEGQSFEIFQFESDGMRNILKQVKPGKIEDLIALNALYRPGPMAFIPQFVDSKNGRQAIHYPDPRLEDVLKETYGVIVYQEQVMQVARIIAGYSLGQADILRRAMGKKKKEIIDAEKIPFIEGAERQGYSKTKAGQIYDILVPFAGYGFNKSHAAAYSVIAYHTAYLKANFPAEFMAANLTNEIHSANKEKLSECIDEARRMGIAIDPPDVNYSEKLFTIVDGRIIYGLLGIKGLGDAPADEIVRCREDGFYRDFMDFLSRVDIKLVGKAVIEKLIQTGAFDRLGISRENLLGNLERAVEYAQKQKEDKKFGQTSLFGGTDEKEYTDFVFENFPEISRLEKLKIEKQLIGFYFSGHPMDEYRDLWEKIVKVDLGHLETIEPGNQILVGIIKTIRVVVSKSGKMAYITIADYNGEIEMIFFSRVWEVWQGRIQEDQIAIVKGKIDYQKDKDKYSFIAEGLIDSREVETVIAEEEALQRKR

SEQ ID NO: 88254 - protein, 837 aa, Unknown
  Obtained from environmental sample
  DOMAIN (45)...(538): Bacterial DNA polymerase III alpha subunit
  misc_feature (1)..(837): Xaa is any amino acid
IPLVATNDVHYLNREDYIAHDILLCIGTAKFRTDEKRKKYYGDQFYFKTADEMTKLFADCPEAIENTVRIARRCVADVPKIGVKELTQYLPDFDIPPDFENADLYLRHLAGEGLAKRYAQEKTDGGIAWREITERCEYELDVIIQMGFTGYFLIVMDFINWAKEHNISVGPGRGSGAGSIVAYSLRITDIDPLKYGLLFERFLNPDRISMPDFDIDFANEGREEVINYVTRKYGKERVAQIITFGTLGAKAVIKDVARVLGISIPESEMITKLISFDPEITLDKAKEEEPRLRELESDPRFTELFAIAHKLEGLNRHSSIHAAGIVIGKKPLIELVPLFQEREEKGGNIATQYSMNFLEECGLVKMDFLGLKNLDILKHSQELIRRRGGKYANFNMEDIPEDDKKTFKMLGEGKSHAVFQFASDGMQDILRQTKPTSIEDLTALNAMYRPGPMQFIPRFVDAKTGKAPITYPDPSLEKVLKETYGVIVYQEQVMEVARIIAGYSMGKADLLRRAMGKKKKEIIDGEKTPFLEGALKQGYSAQRAGAIYDMLVPFAGYGFNKSHAAAYSVLAYQTAYLKANFPAEYMAATLIVEIKSADRLLYTIVETRKMGINVDPPNINYSDKLFTVVDGRIVYGFLGIKGVGDAPADEIVRGRKDGHYKSFMDFLNRVDIKAVSKKVIELLIQTGAFDDFNVSRETLAGNMEKAIEYAQKMKEDKQLGQSNLFGDSSDADMPDFKFTEFPPVSRAERLNLEKKLIGFYFSGHPLDEYKEIWQDVVSVNLGQVETYKTGNCVLVGIIKNIKQITTAKGGKMAFATLEDYNGEIEVTFFSGPWKGAS

SEQ ID NO: 88255 - protein, 466 aa, Unknown
  Obtained from environmental sample
  DOMAIN (1)...(88): Uncharacterized protein family UPF0004
  misc_feature (1)..(466): Xaa is any amino acid
VNQLESEALADSFRKAGFPLIIPGTVMPGPGIIIINTCTVTSKADQKSRRLIRKALRENPDSCVLVTGCYAQLDPAEIELIEAEAAAGHPDLNRPNRRLFVVGGGQGGANSAGSAKSALLELPSYLLKATAGVPESEQPGGLLPHILEMWIEQAKGGGPFSFKPEEFSFHSRGYLKIQDGCNNGCIYCRVCLARGPSVSLPPENALAELRSFEERDCPELMITGVNITQYNHSGLDLAGLLKYLLEGSASIALRLSSLEPEGINEELASVSAHPRIRPHFHLSMQSGSDTVLRRMGRAYHAQTVEQGAAFLRSVKDNPFLACDIIAGFPGETETEFNQTLALCEKIGFAWIHAFPYSKRPGTAAFSLKNPVCERDTTRRVEALTALALRGRRDYAQDWLGHELSAIVEKGKPDPDGRRRAVSENYLKLLVNCSETYSPGSSLRCIPVSLCDGVDGEKPDAVAILAD

SEQ ID NO: 88256 - protein, 631 aa, Unknown
  Obtained from environmental sample
  misc_feature (1)..(631): Xaa is any amino acid
VQQEGCALEYVPEAMKTEALCVAAVQNSNWTDSVLQYIPKALRTETVYIALVQQDKFSLRDVPDAMKTEAVCLAAVQKNGYGSALEYVPEARRTEALYFAAVQKSGVVLSDIPEALKTEELCLAAFIQDEFAQTYIPEGLKARVEEAFKNAFTTEALCLARVKRSGSALRHVPEKFKTEAVCLAAVQQDGGALYWVPAEKRTEAVCIEAVRHGLSLGSAPQRTYGRGSSGSQWDSLVPSELKGKVAMALNLLSKYPWLSCGGEFGSAISSGSGTSGYGVDLIKKKEEEWTEEYCLTAVQEDWQALEHVPEALKTEAICLAAVQKDGRALEYVPEALKTEALCLTAVQVNSNVLQYVPEALKTEAFCLAAVLNAGNALKYVPEAKKTETVCFAAAVKYYDALHFVPEKLKTEAFFLAAVQKISGAFKYVPEALKTEAICLAAVKQIGWELENVPKALRNEAICLAALIQDESAQKYIPKELKDSVKEALKNTFATEALCLAEVQENGLTLRCVPKEFKTEAVCLAAVRQNGSALEYVPNALKTEALCLTAFIRDLAAQNYFPHDLMAKAKEALKNALSTEALCLAEVQKNGIMLQYVPEEFKTKALCLAAVRQNGRALAHVPENLRTAELCL

SEQ ID NO: 88257 - protein, 164 aa, Unknown
  Obtained from environmental sample
  misc_feature (1)..(164): Xaa is any amino acid
MSLSKEQNEWLKKISSGYENFKKVPKELLTEEFCFAAVQKEGWALMHIPDTLKTETICLAAVQQRPGLLTSIPEAVKTEAICLAAVQKSCNALQYVPDALKTEAMCLASVEKNGLNLQYVPDTLKTEAVCLAAVQNNGCAMRYVPDALMTKTFCLAVVKKNSNA

SEQ ID NO: 88258 - protein, 237 aa, Unknown
  Obtained from environmental sample
  misc_feature (1)..(237): Xaa is any amino acid
MLEYVPEELMTEAVCLAAVQQNGSCLGFVPDAKQTEAICLAAVKNYPTAALEYTSKALRTEAICLAAVQEDGRALEHVPKALKTETLCLAAVQQDGRALEFVPNALKTEALCLAAVENDHYNCALGFIPDAKKTEPLCLVSVQKCGASLACIPDAKKTKALCLAAVHQDGRVLEYVPEALKTEAMCLDSVKQWGWTLQYVPEALKTEALCIEAMKHSDEAIKFVPKNMKSAVKKKSE

SEQ ID NO: 88259 - protein, 186 aa, Unknown
  Obtained from environmental sample
  misc_feature (1)..(186): Xaa is any amino acid
MIMRQEFDKSGRSDEFKIERLVPIKSCSDFSCSIAEYSDYLVNDALRSMNDHIALTWLLTERATGRIAAYMSLVMDAIKLSFTEKELHHLNYPFRTIPAMKIAKLAVDNSFLEKYKGIGSFMIDSAERFAWACNTDYCACRFLTADADMEHDEGVISFYEKNGFIKNNEIYNKNRKTLSMRKDLYR

SEQ ID NO: 88260 - protein, 900 aa, Unknown
  Obtained from environmental sample
  DOMAIN (350)...(415): His Kinase A (phosphoacceptor) domain
  misc_feature (1)..(900): Xaa is any amino acid
MIINPVKSIKKFVNKTFFIFSCILFFIIALAAIVAYTISTHQINLSFIEQQLSIASETIRLRLATTVDSELALVLKMADTPVIRQYFMNPSDQTLKALAETELALYQEHFENKVLFWVNDEDKVFYSTGNEPYIINPDDPATYWYNLTLYETEKFNFNINYNPDLNQIHLWVNVPVFSGVHDIKKPIGMLGIGINLTNFSNFIASSYREFDENITTYMFNKYNEITSSADYELVQNKVRLDEHLSLTGKELIKVAQELSDGESRSFIYDKRIYLINFIQSMEWYLTVSYPAPGLLSLNNAMNTVFFSMLFLILFLFIIINVYIARSENAIAKQNLQLIEANRKTESASRAKSDFLAKMSHEIRTPMNAIIGMTELLLRGELSSEARSYTQDIKQAGNNLVSIINDILDLSKIEAGKLEIVPGKYMLSSLINDTVNIIRTKLKEKPIRFFTNIDGNIPNSLIGDEVRLRQILLNLLSNAVKYTEKGHIGLTITADKQDDKQVLLRMDVADTGKGIKPEHQANLFDEFVRVDMKKNQGIEGTGLGLPITRRLCAAMDGKLSMESEYGKGSVFTVIVPQGVKSKEPFAVVEESEKKNVLVYESRIIYAQSVCWSLKNMKVPHTMVTNQNEFAASLYREKWFYVFSGYGLYERIKPLMEQDDSVFCGGKKPPLALMTEWSTESFIPNVRFISIPIQSLSIANTLNGKSDRQDYFKVSGSTGAVRCTFPYARLLVVDDIATNLKVAEGLLSPYKVKVDTCLSGTEAIELVKQNKYDLIFMDHMMPEMDGIEATAAIRKLETKEESGKSGKQIPIIALTANAVVGMREMFIENGFNDFLSKPIDISKLDEILDHWISEKKQIANDKEQISNNKEQVINNKEQNLDFSIPGVNTAKGMLYTGGTLAG

SEQ ID NO: 88261 - protein, 220 aa, Unknown
  Obtained from environmental sample
  misc_feature (1)..(220): Xaa is any amino acid
ASSATGTLTDDIDGKTYASETIGAYGSFTNDRDGKTYKTMKAPDGKTWMAENLNYKTGESWCYGDDSSNCAKYGRLYDWETALTNCPAGWRLSTYKDWCDLEQAAGREKLTNKDGTVYWGGAGKKLKANSGWNDFCGHDGDESCKSGNGTDEYGFSALPGGAADYDGGYFGNIGISGGWWTATESGGDAFARSVGYYGDSMSERKIGKNNGLPVRCVADK

SEQ ID NO: 88262 - protein, 391 aa, Unknown
  Obtained from environmental sample
  DOMAIN (200)...(295): Methyltransferase domain
  misc_feature (1)..(391): Xaa is any amino acid
VKNVRVIDAIPNLAEHLGEYDIVITHYGITAYEALYAKTAILLVNPTAYHDKLAKAAGFFSAKNLPKINQSFLRKLKNRCVKQAVGLELDKENKNLADLINEFSPKANRSCPVCGGEPSETSIARFPEGTYRRCKKCGVIYIDRIKSLPLNYDQEYFFENYKKQYGKTYLEDFPNLTAMAKRRLKKIKSLIPVTQNDSLLDIGCAYGPFLAAAKEKGFSPCGIEPAREAVRHVQKKLRLTVVHGAFPNTWFPVPTSQSGQYEVVTLWYVIEHFEDCLKALSEIRKVLETDGILAFSTPSFSGISGRSSLYKFLEKNPADHFTIWSPKMCKKALSLAGFKVKKIVISGHHPERFRFFRILAGSKISPFYWILFLISKIFRLGDTFEVYAVKK

SEQ ID NO: 88263 - protein, 306 aa, Unknown
  Obtained from environmental sample
  misc_feature (1)..(306): Xaa is any amino acid
MPSLQKKQKRIRFILLIVVATVLIINVASIVVGAMFLTRDISKTMESDMLVTVDIASQYVTKEIELLKFTVKETASDISDYILNTGLLPGTDRLEKICSKYAVFNGLAVFNHTTLLASCEKTSISPELIKEPFMQAAINGNSVISTTMYNPDGLLVMYVSAPINDDLVLAAVFPGSFFSGLLSNFIFWDTGHLFVCDAEGNTISNYREEWVQSRINFIELAKTDKNYESVALMMKRGINGERGIGKIIVDGTRRMCAFRPVSSREEGWFLGVVAPLNESALNGVPGSSFLMSLITLLLSIPAAIAA

SEQ ID NO: 88264 - protein, 336 aa, Unknown
  Obtained from environmental sample
  DOMAIN (215)...(336): Thiamine pyrophosphate enzyme, central domain
  misc_feature (1)..(336): Xaa is any amino acid
MQCTGAQIVIESLIEQGVDIVFGYPGGTVLNIYDELYKHRDRIRHILVSHEQHAAHAADGYARSTGKTGVCIATSGPGATNLITGIATAYMDSIPLVAITGNVPTGILGKDSFQEVDITGISMPVVKHNWIVKKVEDLAEVIREAFELAASGRQGPVLIDIPKDITALTAEWVPHVNVGASASNKKKGELKDKALSARAKRLDERTTRVSFTSEEIEEAAEMIMEAKRPLLYAGGGVISSGAEEELIALAERLNAPVALSLMGIGAIPKDHRLCTGLIGMHGTVASNKATQKTDLLLAIGARFSDRVTSKPDMFANTAKVIHFDIDPAEISKNMKP

SEQ ID NO: 88265 - protein, 93 aa, Unknown
  Obtained from environmental sample
  DOMAIN (11)...(57): Bacterial regulatory helix-turn-helix proteins, AraC family
  misc_feature (1)..(93): Xaa is any amino acid
MMNGSKNVIYNSISFIESRLSDELCIGELAGQAFFSKTHYKRLFQAVVGEPVMEYIRKRRMQRANMALRETDASVLEISLQCGYTSHEGFSRA

SEQ ID NO: 88266 - protein, 347 aa, Unknown
  Obtained from environmental sample
  misc_feature (1)..(347): Xaa is any amino acid
LILCAQGVMSTIPTTFNRDFPSYTVIGGREVFNSTGLSVVLLNRGGRYARRGLFHDLEKTGFDSVVSVEPEPAHYDLEELSARFPFIRFVIPHTRISLGEQINLAVSELNSPLFFVLWNDLKMIAGGTAHRMAERLTRSVETNGNGKGKVKGKSRFMRLCTVPVIQNSHHDTIPTIIAPVIRQKKIQTRFLNPLSEGLPSLYPFDGVGIYDRERFIQLGGFDGTLKNSFWQLMDFGFRAYLWGEEISLSQTLRFSYEAAIPAEDNSAGGDYSRFYLKNIAPVFRNDCALLPVRRFPGFLLIANNGIFNAWDDFSESRRWVTTNSFRWRCSPKTIASYWNLETPKKVN

SEQ ID NO: 88267 - protein, 335 aa, Unknown
  Obtained from environmental sample
  DOMAIN (161)...(278): Shikimate / quinate 5-dehydrogenase
  misc_feature (1)..(335): Xaa is any amino acid
MGHYGFYSRILCDKFGSFMTYSSALSENVVPGAAWQLDVQELNELYRFRNISKKTKVYGITGNPLKTSISTWIFNTVFGIENIDAVYVPFPADSINDFLELAEEMDVQWLSVTIPYKEAVLPMLVRRSAAVHSIGACNVMFRSADGWFGDNTDCTSFSASILASLGKNNLKWKKVTIIGAGGVARAVAAEVFRLGGKALILNRTIHKAKDLASQYDFRWGGLDEHGIELVYKYSDIIIQATAVGMTGYDVSDPLELYSFTGKEIVMDLVYFPAQTPFLTRAEAAGCKTINGYNMVTYQACHQYNQIMGRDISQQLLSRVINIVGASSWNKIRTEQ

SEQ ID NO: 88268 - protein, 280 aa, Unknown
  Obtained from environmental sample
  DOMAIN (76)...(218): Phosphoribosyl transferase domain
  misc_feature (1)..(280): Xaa is any amino acid
VNDHLMTVFVTVEAARQAGAERVTLVAPVYPYARQHINKGREGLTAGRVGRILESLGVNRIITLDIHSREICNAFDSMRLENLHASYQIIRALYNEPDIINDNLVVVSPDTGAVDRNKFYATALKKPLALLYKERDYSVVPTDAVKNNISTMKMLGNVSGKNVLMADDMLGTGGTLLKAMAFLKDQGAGKVICAISLPLFSGEAINFFDEAYKNGLFYRIIGTNAVYHEEVLKREWYISVNITRLFAKTISRLHRGLSLSSILDNRDIIVKHFHENPEKT

SEQ ID NO: 88269 - protein, 88 aa, Unknown
  Obtained from environmental sample
  misc_feature (1)..(88): Xaa is any amino acid
MLLSVDIGTTSLKAAFIDLDGKLKAFSRFAYPMGSAAAVWEKAFALVLEYLHTQNPNDKIEGICVSGNGPTLVPVSRDGDVFTPLYWF

SEQ ID NO: 88270 - protein, 356 aa, Unknown
  Obtained from environmental sample
  DOMAIN (2)...(122): Oxidoreductase family, NAD-binding Rossmann fold
  misc_feature (1)..(356): Xaa is any amino acid
MQRIGIAGIGNVSGIYLENLTGMFGKRVKLSAVADIARERAEKAAADYNLKAFGSVEEMVNSGEIDIVLNITPPKLHYEVALTAINAGKHVYNEKPICSKREEAAQLIKIAAEKGVRLGGAPDTFMGAGLQTCRKLIDDGWIGAPIAATAAMMKRGPESWHPDTEFFYKEGGGPMFDVGPYYITALVSLLGPVSRVTGSAKITSPVRTITNKQRYGDIINVEVPTHIAGVLDFASGAVGTIVTSFDIYSHTLPFIEIYGTEGTLKVPDPNTFGGPVIVRRFNDEEWYKIPLLKAYPENSRGLGITDMAEAIEENRPHRANAEMAYHVLDIMHGIHDASSAGKHITLKSKCKRPAAC

SEQ ID NO: 88271 - protein, 376 aa, Unknown
  Obtained from environmental sample
  DOMAIN (272)...(376): Beta-galactosidase trimerisation domain
  misc_feature (1)..(376): Xaa is any amino acid
KTTAINTRLAERYKEHPALAVWHISNEYSGECHCPLCQENFRSYLKKRFGSLDVLNEAWWNSFWSHTYTDWSQIESPGPLGDVNVHGLNLEWKRFNTEQIVDFYLNETVPFKKITPNVPCTTNLMSGATGVDNFRLARALDVDAWDSYPEWTGTEKDIETGAFFSFYHDMNRSAKGKPFMLMESSPSATNWRLVAKLHRPGVHMLQAMQAVAHGADTVQYFQFRKSRGSCEKFHGAVVDHEGSENTRVFSDVAEVGKRLATMQGIIGTSTPSAVAVIYDYQNQWILDDIKGLRRGNNRYKETVVNHYRAFWRMGVSVDVIDSAGDLEGYDLVAAPMLYMLRSGFAEKITAFVKAGGTFIATYITGYADENDLCFLG

SEQ ID NO: 88272 - protein, 291 aa, Unknown
  Obtained from environmental sample
  misc_feature (1)..(291): Xaa is any amino acid
AWRNTPHYYRAKKTYTTPECALWKDILYGSGKQLFWYCDPFMRACVDMNQGGALIDLRPYAAKINWPVGIGTRHVQDASYPFLVQSMYRAGFFTHYAGEGTIRSLKIHYNGEEADLCLCRTKAKFSQSGNTRRLTLDPVEIEFSDLKLTLQTVYDFEEGASAIKTTRKILNMSKPVETEFEEYITACYGTTEYPEDMTCVTLTVRSANGGAEVEKVINYNYKCREVTDTGAVYASAEIGAINTRVDFEPSGDAEAYAREGYAFSPMFTLGLKKKISDGGEFVSWLRLKKVK

SEQ ID NO: 88273 - protein, 327 aa, Unknown
  Obtained from environmental sample
  misc_feature (1)..(327): Xaa is any amino acid
VVVALFAVCGLIVTIGRKSRLNVFRSKMFFMAFCVAALVAFALEATTFNFRHYLKYFAGPPTSIKGASETDPTVMLTTDGTHVESIEDGLRFKALNRKVTSIFVDVEFRDNEAVEMLIEWTDEGVTQQYVKRLYKYLPHENYALLQSCGKVQDLTITFYGKPDESIGIADVVIDKPIPFYFSGLRILIVSLLLSVIFTLVNKTLRAKAAYYLFEYRFDPKNKKQNIIYACTVALVVLFSWVCVYTSVADRYEDVSRHYSQYNKFLVDALIAGKTYLDRGNPEALLNAERPYDPIWRKTNGYYETTDKEAFDWAWYKGKYYCYFGGVP

SEQ ID NO: 88274 - protein, 69 aa, Unknown
  Obtained from environmental sample
  misc_feature (1)..(69): Xaa is any amino acid
NAVHQEEVLKREWYINVNITGLFAKVISRLHQKQSISSLLDNREIISRLMVGAKEQQTQHELPFSNESL

SEQ ID NO: 88275 - protein, 929 aa, Unknown
  Obtained from environmental sample
  DOMAIN (792)...(878): Hpt domain
  misc_feature (1)..(929): Xaa is any amino acid
MKLMPEAPKLKPYGCLSILITPLFINDNFWGFALLEDLQNERWFREEDIDMLRSAAFMCANTVIRADVEREIDYAKKFNNAILDASPMGFTIFDENANVIDCNDTLAKLLKTSKTSYIEHFYKFMPEYQSDGAKSTDKVVELVKRALNGENLLFEWTLCTSTGEPIHNEVTLVRAMYQGKYVVLGYQYNLHDRKTREMELARAKNLNDLQLAKLNLVVKATKIALWDMEVVHDDPINPYNVFTWSNEFRRMLGYSDEYDFPNVFGSWSSLLHPQDKEMALDLLKRHILDKTGNTPFDVECRLLRKNSEYGYYRASGECVRDKDGNAIRAAGALVDITESKKLLQEKDRQKAEAEAASREKSHFLANMSHELRTPLNVVIGLTNLILEDEHLAKHVTENLEKINNAGNSLLNIVNDVLDLSKIESGKLTLSSEEYHMSSLLNDIITLTLTRLGEKPVKFILDIPDDLPNKMYGDELRLKQVLTNLLTNAIKYTSEGSITLKVRGEIEDNVIMLMEYAVIDTGSGIPKDSIKNIFLDYSLVDDKANRRVDGTGLGLPITKRLVDLMDGRIDVESEEGKGSTFKFSIMQGYVDDTVLGKDIAEKLRKFQYIDDKRAATQKIVRIDLSYARVLVVDDMQTNLDVASGLLRKYKLQVDCVNNGKAAVEIIREGAPVYNAIFMDHMMPEMDGIETVDRIRALGTEYAKKIPIIALTANAIHGTEKMFFAHDFQDFVTKPIDITEMDAAIKKWVRDAAREEVVIAPEPSEEKQMTIEIPGVDAQKALSLYAGDTGIYLPLLRSYITNTPSTLEKLKTVSMENLKSYVITVHGLKGTSAGIGAQEVRAQAFELENLSRAGDLRSVLALNDKLISDTEVIVANVKEWLDKNDVQEAKPRLKAPDRELLAKLREGCESYDMDTVEDAVKNWKRRSMMKM

SEQ ID NO: 88276 - protein, 574 aa, Unknown
  Obtained from environmental sample
  DOMAIN (16)...(176): Na+/Pi-cotransporter
  misc_feature (1)..(574): Xaa is any amino acid
MTILTLLLRMTGGLCMFLFGMKMMSDGLQKSAGERMRKTLNFMTGNRFMGVLTGFAVTAIIQSSSAFTVIVISFVNAGLLTLTQFIGVLFGTNIGTTVTGWIISLVGFKISIDSLALPAIGIGFIISVTKWKYKHVGDLLIGFGFLFLGLYFLSNGIENSNSLFDFTAIGTIRDNRTLAVLIGLGVGLVMTIIINSSSAAVTLIMTLAFQDVITYEMAAGMVLGSNVGTTINAVLAGIAGNTESKRAALAHVLFNVLGLIWALPLLIPLLNLVEFIFPGDPWAAGPGNTSIPVHLAGLHTLFNVINTVIFLPFVNQYAKLISMLIPDKKQEEKIEHYKFAYLSAGNTESPELNILRAEKEISDMARIVSFMYSRFCTVLRGLHEEGGNDKENTAELCAELLEKEEYIDEMRETLSAFLIECSRVKLNPKTEARISYLMQVISMLESMSDECYSISRLLEKSVDKNYLLKNKEMDELIPYVGLVEEFLSLLEKQLGRNPSSELKIRAAELENKIDKDRKKLQKLGRKRIEAGGNVKTELLFIDLVRRIERLGDYCFEISEENTLKKLINTIINKK

SEQ ID NO: 88277 - protein, 284 aa, Unknown
  Obtained from environmental sample
  misc_feature (1)..(284): Xaa is any amino acid
MKNVNEKHKDTVFTFLFSNPDLLRELYSAIEGITLPPDIPININTLSDVLFRTQRNDISFLINNRLIVLIEHQSTINENMPLRFLMYIAKLYQEITEPEDKFKRKLEKIPKPEFIVLYNGEDKYPDYKELRLSDAFIKTDIKIDVPLELVVQVYNINKGRNQDILSKSRTLENYSRFIDKIREYQKEYQWKYKEKKEILDKPFKSAINYCIKNNILKDFLKKHSSEVLNMLYGEYDPEVEMRVVREEAIEETREEERQYFLEMINKGLTIEEIKERLKQEERTF

SEQ ID NO: 88278 - protein, 596 aa, Unknown
  Obtained from environmental sample
  DOMAIN (49)...(320): Domain of unknown function (DUF323)
  misc_feature (1)..(596): Xaa is any amino acid
VTFDITAIDTTHFIYARSRESANYSAGTVNVSEGINTPSIPSSIISPTTGIEMVSIPAGTFTMGSPNGEKDSQSEEHPPHSVTLNSFYMSKYQVTQAQYQAVMGTNPSNFYSNPQTGENQSKRPVESVSWYQALVFCNVLSVTDGLTPVYSIDGSTNVADWGLAPTSDNPKWNAVQIVDGSTGYRLPTEAEWEYACRAGTTTAINNGNNDYTDVDSVGWYAGNSGNKTHEVGLKSANAWGLYDMNGNVTEWCWDWYDTSFYTTSYSSSPVSNPMGPSTGNYGKVKRGGSFDSAMTYMRSAARGSGYPWTKWDVHGLRLVRKIAENPLLSIDMVSIPAGTFTMGSPVSEGSDDRERPQHSVTLSSFKMGKYEVTQKQWIAVMGAGSDYTSASYGKGDNYPVYSVSWYDVIVFCNKLSIKEGLTPAYSISGKTDPAAWGTVPTSSDATWDAVVIVAGSTGYRLPTEAQWEYACRAGTTTAYNNGNNDYTNAALVGAVAWYYGYSGSEITHEVGLKSANAWGLYDMHGNVWEWCWDWYGNYSSNAQTDPMGASSGTYRMRILRGGSSWTLPEELRSAFRHVSDEFYRGDSDIGFRLVRP

SEQ ID NO: 88279 - protein, 367 aa, Unknown
  Obtained from environmental sample
  misc_feature (1)..(367): Xaa is any amino acid
MNKNKPIVAMFKSIDKNNTSPRTLITTAFPENGGTVTVNPDKNLYSVGEEVTLTAAENPGYEFAGWSGSTASAKNTVSLKMDNSQTLVAVFKPKVKKLTVNAIPGDGGAVYVNGAALDGVANQDAGTEIVVWAREAPGWTFVNWSGSPSVEGRTDNPAVIPVADSDMTITANFRQGPGGGTEPPRSPAATYTLDVQVNGGGRVSLSPNDPDNAGYKIGTRVTATAIPEPGYKLGRWAGAESGTRNSVTITMNENKTLIATFIDENSTGGEDSIPAGNTYTLSTSVNPSNGGGVTRNPNKTNFTLNETVTVTATAANGFTFDGWSGAATGAANPMTITMNGNKTLTANFKSTGGTTPTYTITLDPNGG

SEQ ID NO: 88280 - protein, 415 aa, Unknown
  Obtained from environmental sample
  DOMAIN (199)...(366): Phage integrase family
  misc_feature (1)..(415): Xaa is any amino acid
MHNDFTLFSRVVPSGKKVVYYYAYDGEGKRLGPWTTGQTTRTAARNYCNLLNRKGKLLPELKGIPTFAEFAALFWDWDKSEYLKERRKRRKLTQSYTDKNKKLVEHILVPYFGKMKLDKITGEAIDQWLDVMIKEGKKNSTTNGYFGSLKTMMKWAVKKRIIDRDPFLDVEKLLNEKTDKKIITTDEFKALFVDDWKKVWGNDLLRCTANKVAALTGMRCCEVLGLRGEFVYDDHIYLCGQYDEYGYRETKTKIKHHIPLTAELVKDLRKLMKVNGQGFIFSLDGGATPVTRMHIFKGLKKAFNNIGITNEEIDERGLNIHAWRHFCNTELQKAGLTIQKVQAVTGHKTEGMTERYTHFDPLDFGEVPKIQAELLKRKHKKPEAQISEAVGNECPALTLVKPQEDDKAGRKRKAS

SEQ ID NO: 88281 - protein, 259 aa, Unknown
  Obtained from environmental sample
  DOMAIN (185)...(259): Malic enzyme, NAD binding domain
  misc_feature (1)..(259): Xaa is any amino acid
MSAIKRSFMLVLYSCLSLVSMPYWPMDYAEESLKKHYEWRGKLEIVPKMPVSTREDLSLAYTPGVARPCLEIQKDPQKSWELTGRWNTVAVVTDGTAVLGLGDIGPEAGMPVMEGKCVLFKSFGGVDAVPLCIRSKDVDVIVETVALLAGSFGGINLEDISAPRCFEIERKLKARCDIPIFHDDQHGTAVVTLAALLNALKLTGKKLENISVVTSGAGAAGTAVIRLLLALGLSDVVMCDREGALYKGSPGMNSEKAEM

SEQ ID NO: 88282 - protein, 285 aa, Unknown
  Obtained from environmental sample
  DOMAIN (6)...(267): Lyase
  misc_feature (1)..(285): Xaa is any amino acid
MPGSRAHVTMLGKQKIIPAGSAAKIGSELAHIARELETGKLVIDDSAEDIHSFIEGILTERLGEAGRMVHAGRSRNDQVAVDFRLYLKRTIPELRQELAQTIFTILDKAEQHLNSVMPGYTHLQRAQPVTLAHHLTAWCVGLERDYSRFADALVRMDECPLGSGALAGSGLPLDRKAVAEDLGFSRPTLNSMDSVADRDFALEMSSACAITMLHLSRFCEDIVLWASEEFGFINLAEAWSTGSSIMPQKKNPDFAELIRGKAGRAAGNLVTLLALLKGLPYAYDK

SEQ ID NO: 88283 - protein, 48 aa, Unknown
  Obtained from environmental sample
  misc_feature (1)..(48): Xaa is any amino acid
MNQHKIRNIAIIAHVDHGKTTLVDELFRQSGMFRENQQVAERLMDSMD

SEQ ID NO: 88284 - protein, 85 aa, Unknown
  Obtained from environmental sample
  DOMAIN (11)...(79): Ribosomal protein S17
  misc_feature (1)..(85): Xaa is any amino acid
MSKENKLVRSGTVVSNKADKTVTVRVDRKFQHPLYGRTVKSSKKYMAHDEDNSCQMGDVVKIIESRPLSKRKRWRVIEIVQKSVE

SEQ ID NO: 88285 - protein, 417 aa, Unknown
  Obtained from environmental sample
  DOMAIN (24)...(93): ATP synthase alpha/beta family, beta-barrel domain
  misc_feature (1)..(417): Xaa is any amino acid
MGSIFEKYLETANRIDPIKCVGHIVRVQGLLIESRGPQAIIGEICRIELKRADSQDVKFIQAEVVGLKDEIVQLMVYSDTNGIEIGCRVIASGSCLDIAVSKKLLGRIVNHLGKPIDDKGDIESPIRYPALADPPDPYHRPKIKERISTGIRAIDGLLAAGKGQRMGIFAGSGVGKSTLLGMIARNTSADVNVVALIGERGREVNEFIENDLGKEGLVRSILVVTPSNSPPLARLRGAYVATAIAEYFRDQGLDVMLLFDSLTRFARAYREIGLASGEPPATRGYPPSMFDSMPKLLERSGTSEKGSITGFYTILVDGDDLDEPVSDTVRGILDGHIVLSRSLAQRFHYPAIDVLASISRLATKVSGSETKKAVGIVRRLMADYAGAEDLINVGAYKLGTNPMIDEAIAKRESLEGF

SEQ ID NO: 88286 - protein, 210 aa, Unknown
  Obtained from environmental sample
  misc_feature (1)..(210): Xaa is any amino acid
VKRKAQDEADRIIAAANEKAVQIEADCRAAFEAERKDAEDEGRAAGREAGFIEGKAEVERLVERTQTILQRAQDKRAEILEETEQEIISLVLLISRKVIKVISESQRNVIISNVVQALRKVKGRGNIIIRVNMADLKLTSEHTKDFINLVEGSKSVQIVEDTSIDEGGCIIETDFGEIDARISSQLMELESKILEISPIKSWAKSETVES

SEQ ID NO: 88287 - protein, 56 aa, Unknown
  Obtained from environmental sample
  misc_feature (1)..(56): Xaa is any amino acid
EALRQQALLQAEEEGMDATISVEERTRMELQESVQNMAREHPEDAAQLIRTWLLEE

SEQ ID NO: 88288 - protein, 485 aa, Unknown
  Obtained from environmental sample
  DOMAIN (24)...(93): ATP synthase alpha/beta family, beta-barrel domain
  misc_feature (1)..(485): Xaa is any amino acid
MGSIFEKYLETADRIDPIKCVGHIIRVQGLLIESRGPQAIIGEICRIELKRAASVDNKFIQAEVVGFKDEIVQLMSYGETGGIEVGCRVIASGSCLDVAVSMKLLGRVLNHLGKPVDDKGDIESPVRYPALADAPDPYRRPRIKERVSTGIRAIDGLLATGKGQRLGIFAGSGVGKSTLLGMVARNTSADVNVVALIGERGREVNEFIENDLGKEGLARSVLVVTPSNSPPLARLRGAYVATAIAEYFRDQGLDVMLLFDSLTRFARAQREIGLASGEPSATRGYTPSMFDSMPKLLERSGTSEKGSITGFYTILVDGDDLDEPVSDTVRGILDGHIVLSRDLAQSYHYPAIDVLASISRLAAKVSGSETKKAVGIVRRLMATYAGAEDLINVGAYKLGTNPMIDEAIAKREALEEFLIQAVEEKSPIDETLKALGEIAGVEIPASEMETYVSKMIFRTEEDDDYFEGTVFEPALSDIEIPVEIQ

SEQ ID NO: 88289 - protein, 141 aa, Unknown
  Obtained from environmental sample
  misc_feature (1)..(141): Xaa is any amino acid
MKPFAFRLEKLLNLRKFYEDEAKIELGRAVGVLAELENKITALAAERVRAAAAQFMPNNSAIEIQQYMYYLVRLDNTKELLLKEAAIAEMKVEEAREAFLEASRERKVLDNLKEKKQKEYHKMKLNEETKILDDRRYGTTA

SEQ ID NO: 88290 - protein, 375 aa, Unknown
  Obtained from environmental sample
  misc_feature (1)..(375): Xaa is any amino acid
MNPHIVTSGDDQHIHVSYYDDKDGSIKYRYNRRGTVGTIDGGTGTNADAVNSNNNIPKMWANLDGGLDQEDVDATTYTTGGSINENTRVVRWTNSIAATKTARGNIKAGKHNSIAVTSQGYPVIAYYDETNQRLKLAVSRSVNPVQASNWVIRDYVIPRNDKSSFGTGEFVSMKIDTIAGTNQNRVHIAAMNTSKRLVYVTGILNPTAGTGNSQQDENSGSNVLTPLPGQTSVTVQIVDSVGNVGRWCALSLDGGGNPWISYMDESYLGARDGAKVAFLNKTTFYKGVAGGYCQGQYTDLNGNSLEGWETMHIPTTYSVQNPVESGREHGRLGMECFPAKNYPANNGVTKFWSGAVGYLSTDLGMDRYHIAYYVK

SEQ ID NO: 88291 - protein, 199 aa, Unknown
  Obtained from environmental sample
  DOMAIN (1)...(192): Homoserine dehydrogenase
  misc_feature (1)..(199): Xaa is any amino acid
LRDLTLSGDKIRRIEAVLSGTLSFIFNSFDGKKTFSALVRDAKAKGYTEPDPRDDLNAMDAARKALILAREIGMQLEFANVEIEPILPKDCFSVKNVDAFFTELEKSDDVFEKRRAEAAAKGMALRYIAVIEEGCVKLTLRSEPANSPFRALTDSDNMVVITTERYSKLPMVIKGPGAGAQVTAGGIFADIVRTARTLV

SEQ ID NO: 88292 - protein, 340 aa, Unknown
  Obtained from environmental sample
  DOMAIN (1)...(321): Basic membrane protein
  misc_feature (1)..(340): Xaa is any amino acid
IGGTGVTVRLLTDSSGVDDKSFNAAAWRGILEFYGDTATNPKNKGKVYDWVTTQDQSMYVPNLRMVTDQGYDLIIVNGFTWAESLSTVSNDNPSQKYLIVDVDWVQAGNVMQAAYAEHEGSYLVGVAAALKALEDGVSSPRFGFIGGMPDPVITKFEVGYVQGILSIIPNAEIVDYYVDSWDQPGFAKNQAMIWYDSGVYAIFSAAGNSGNGTIAQAKEYRIAKKNVWAIGVDSDQFEDGLYNEKNSAVLTSMVKRVDSAVIFALKEVKNKTFAPNVIVFDLKANGVAYSDSNPALSKNINERLELIKKQIINGNIVVAATLKDSLKLPGFPKNLRAKDD

SEQ ID NO: 88293 - protein, 296 aa, Unknown
  Obtained from environmental sample
  DOMAIN (1)...(106): Elongation factor Tu GTP binding domain
  misc_feature (1)..(296): Xaa is any amino acid
MDGAILVVASTDGAMPQTREHILLARQVGVPAIVVFMNKVDMVDDPELLDIVEMEIRDLLSKYEFPGDKTPIIRGSALKALEGDAKYREAIMELMKACDDFIPQPVRDVDKPFLMPIEDVFAITGRGTVATGRIERGKVSLNDKVQRVGFGETKEFVVTGVEMFRKLLDDAQAGDNVGLLLRGAEKTDVERGQVLAAPGSITPHTSFEAQIYVLSKEEGGRHTQFAKGYRPQFYLRTTDVTGTITLPSGVELVMPGDNVNITVELISPVAMDQGLRFAIREGGRTVGAGSVTKIIK

SEQ ID NO: 88294 - protein, 56 aa, Unknown
  Obtained from environmental sample
  DOMAIN (1)...(51): AP endonuclease family 2 C terminus
  misc_feature (1)..(56): Xaa is any amino acid
MISALAEVGYNGTLSIEHEDCLMNREEGIGKAIEMLQKIIYKEQVKVMWWEMRAEG

SEQ ID NO: 88295 - protein, 346 aa, Unknown
  Obtained from environmental sample
  DOMAIN (3)...(177): Thiamine pyrophosphate enzyme, N-terminal TPP binding domain
  misc_feature (1)..(346): Xaa is any amino acid
MKAEFLTQHIKQLGIEVLTGVPDSTLKEFCDYINSEETELTHYTVPNEGSAVGIAVGTYLSTGKPACIYMQNSGIGNTVNPVTSIANAEVYSIPIFFIVGYRGAPGTKDEPQHKFMGRITEKMFDCLEIEYEVIDGSISEGKLKEIFDRIKNTLSNKKQFSLIIKKDTFEKRANAAYANSYKLNREHIISEIMKKITEKDLVVSTTGKISREVYEQNNRNQCFLTVGGMGHASMIAFGIAENSPNKRIICLDGDGAALMHLGNLAFIGSRGVENLVHICLNNDAHESVGGMPTAAPNFKYAETAKVCGYSNIFVIQTADEFNNLMNDFNNLGKLTFIEIKVANESR

SEQ ID NO: 88296 - protein, 506 aa, Unknown
  Obtained from environmental sample
  misc_feature (1)..(506): Xaa is any amino acid
MNTLSFNELIKKTTASKAVNSCILAVKEKKFPIEIEGCEGSFNSILAVHLCSAVRESSGSKVFLITPTEADARDIALDFEGNGLPFTLFPCWGTVPYRELSRISAVFGERAKVLSELTQEKPDNSMPGIVIIPQRALLNNLPPGEYIKSLLIRIQVGGKIDTSSLAKTLVNYGYTRVPRVQECGEYALRGEVIDIFMGGDDLAYRILFDFDKVESIKKFDPVNQTTEQNAQTEKPREMKIRPMREVVWTDDRIEILEKNLASFKEFSNGGKEIIEELILHRSVKGEEIFFPFAFEKGASLMDYLGGGTLLLLDRERLDNTKETIFSEYRGMYSQTVRETKCEYPLPERLLLDFGDLIKNHKKTVSFMTIKSAPKDGVCRIDLSCEPSRSFFGNIDYMKDEFASLLSCGWHIIVAAESEVQAQRINMIFVPRQETDQASYLPGVEPSNRKYEVRGSPAFKKYFDNGKTPYRRFFAYGHQTYADTGKRNFWKKKTSCALFEYRAFKTD

SEQ ID NO: 88297 - protein, 439 aa, Unknown
  Obtained from environmental sample
  misc_feature (1)..(439): Xaa is any amino acid
LQNFFYEKPTYATISLLPANQTVYFENAANVVEIPLPKDFPVQKIFSNILQTQPSIIPQQPIPQSQQVLPQQPISQQATPPQVQPQQPIPQQPTPQSQQIPQQQPIPPQGTPPQVQPQQPIPQQATPPPISPQQPIPQPQQVLPEQPIPQQGTPPQVQSQQPIPQPQQVPPQQPILQPQPQQTTPPPQSQPPPIIPQKIEMAFSLHQITVPQNTATTTNTSPSPNTPQPAPKFILQPWPASMIIPKEERNFWLKTDLPLTPQILNIRDTILSFGKLPENPEVVKLFANNLHELSLQTEQGTSISKEQTNLLWRVVQLTYQLPINSQPSTLNSQILKYQPAGNYEGELFKNLPEPVKRELQKELQKELPTGKTWQPETLQKAVEKVLEKYEEPQLSKTIQNEHTSKHNEEIKQILQNLKEQIQWTRIDQDTRLQNDKENV

SEQ ID NO: 88298 - protein, 817 aa, Unknown
  Obtained from environmental sample
  DOMAIN (328)...(739): Alpha amylase, catalytic domain
  misc_feature (1)..(817): Xaa is any amino acid
MQKLCIVLSKFENLKPKKTAVRATDRKALMEFHIRSEIRKEYGLEGSLFSLTGNVILADMRQVRALTQKLNSKVDPAKDPDRFLQAGKLNAMGLIDEILHFLVALYREQVQPDTFETAMIRLEGKLGNGKTRDLMENFCGKFPPKDVYDGKTDVPGYLVGSDGVESCRNLSLEELLLLAIANLNPAFRQFLFLFDDSLLAKETVYPVAIDELKAHLANLPVFGPDGMNLWDLLRAPALASPDSLFGQLEYMRKHWGLLLGKYSGRLLTSLDIINEEDKPSFFGPGPTQVLDFRAYENEYEKFTPDQEWMPRTVLIAKSTLVWLFQLSQKYGKEFTRLDQIPDEELDELARRGFTGLWLIGLWERSQASKTIKQWTGNPEAAASAYSLYDYDIASELGGWGALANLRSRCMQRGIRIGSDMVPNHTGIDSRWITEHPSRFLQLPYPPFPTYTYSCENLSGRGDITVQIEDHYFSRSDAAVVFKRIDNNTGEVRYIYHGNDGTSMPWNDTAQIDFLNPEAREAVIRTIIGVCQQFSIVRFDAAMTLAKRHIQRLWYPAPGHGGAIASRAENAITTEEFNRRIPNEFWREVVDRCAAEAPHTLLLAEAFWMMEGYFVRTLGMHRVYNSAFMNMLKMEENQKYRSTIKNTLEFDPEVLKRFVNFMNNPDEETAVAQFGKGDKYFGICTLLVTMPGLPMFGHGQIEGFEEKYGMEYRRSYRDETPDWNLVNRHEWEIFPLMKKRHIFSGSANFCLYDFFDPNGHVNENVFAYSNSAGEEKALIFYNNCYYQTTGWIRRGAVAIPQKDGTFRQDFLHEAFGLH

SEQ ID NO: 88299 - protein, 389 aa, Unknown
  Obtained from environmental sample
  misc_feature (1)..(389): Xaa is any amino acid
MNVSGARREIEEICSSLAAAGYMVKFSGYSALDLYFRLPGLPFFWIETNADIGVLARYIDNLRFPGVDIADAAVETSGGTCYFRCFEIDEQSKPSFPILSFTYDWQTRRFLDPLGVYPLLKELRDHKFETAPNFAAQSQFKNSRVVMEAALLLARYGFSAETITASIEQSPPPGPEMQRVFLSCLMLSARPELGLELLKKSGFLKEFWPELASLNDVDHSKEFHPEGNVWNHTLETFRYRKPAASGAFDLRLSLALLLHDSGKPISASFASHRFDGHAELGAHTAARFLERLEFESSLIQDIFYLVKNHMLPAALKRLPLTKTAEIMASPLFPTLMELYRCDESSSFKGLNDFYENTAAYQTYLKNIKNPYRSKDGKKIKRSNVYMGTR

SEQ ID NO: 88300 - protein, 282 aa, Unknown
  Obtained from environmental sample
  DOMAIN (1)...(282): Carbohydrate phosphorylase
  misc_feature (1)..(282): Xaa is any amino acid
INWEHWDVIRARGCNDVDLLRNLSLIEEGEVKRVRFADMAVLGSNSVSGVSAAHTEILKKHLFPNYYSQYPEKFFCKVNGVSHRRWLYCANRPLSALISRPIGDGWVRRPEELSKLESFASNPEILKGFGNVKNRAKSELCAALREKVGVVVDPSMLFDVNCRPIHTSKRQVLHILYVLHCYLKIKKGETLSCRRAHIFAGKASPSDFLAKQIIHLINIVAGVVNDDAVAREQMRVVFIPNFSVGWAEELVTAADLSEQLSTAAFEPAGTFNMKFAFNGAHT

SEQ ID NO: 88301 - protein, 379 aa, Unknown
  Obtained from environmental sample
  misc_feature (1)..(379): Xaa is any amino acid
GQSSEGGLGFDFEKLREAARIAIEVSLKVKTGEQVLIISNPRPEVAVIAEALYDASLDAGGRPVLLYQPVKAQIAFAEPATLAAFNAKPEVVISLSDEKLGKDPTGIASPYEYNGVKYDHIFHLQQYGERSCRAFWSPSTTVESFIRTVPIDYAELQRRCAAIKRVLDRAVEVHVSAPGGTDITIGLRGRDAKSDDGNFSTPGSGGNLPAGETFISPENLTAKGRICYDGSISVNEGELIINTPIECLVEDGYVSKILGAGEAACLLKTIETAERNAFEFERDGKLPPSFGEIYARNARNIGELGIGLNPAARITGKMLEDEKAFRTCHFAIGSNYDDDAPSLIHLDGLVKKPTITAFFEDGTKQIIEKDGELDSSILS

SEQ ID NO: 88302 - protein, 314 aa, Unknown
  Obtained from environmental sample
  DOMAIN (294)...(314): SEC-C motif
  misc_feature (1)..(314): Xaa is any amino acid
CGELLEKNPSDYETMLLRAKIAASMRRMDKANAYFTDAVNIDPLNPNVWAAYLRFGLNYAHSQVPNIFYRAMKQDINMFRDEYILYLVGAQDTNLFNNENQLQYLDKFAEFYINDKDPDEEIFSEVMNIMPRFLEKGEFIPFVEKILPTLEKSKHCNDDDKKSFKYIRSSVMLHKLHSDKRIHDVLNDLTVFFLSESKDKNEQLGMEIYIVYNLSLLRPSIKALMNEYPEFFKLNQAFYLDALNEKKEDYLIDKYIAIHKKIRPGFNFYYDDDDDDDDTEDVTPYKRESPKIGRNDPCPCGSGKKYKKCCGASK

SEQ ID NO: 88303 - protein, 340 aa, Unknown
  Obtained from environmental sample
  misc_feature (1)..(340): Xaa is any amino acid
VDEYQDLLRVSVASAANDHRLGANEAPPAIVSMFLGEELTEIIEAIESGKAYKNKEKLDMQIGVSVLPHFPKDTTDRNRTSPFAFTGNKFEFRMLGSSFSIAGPNIVLNTIVAETLREFADSLEKSKNFKGDLAALIKKTISEHKRIVFNGNNYAEEWVIEAQKRGLSNLKTTVDALPQFVSKKSIELFTKHGVFTEVELHSRYEILMEGYCKTIHIEALAMVDMAKGDIIPATLKYQNDLLELLQRKKALGYYDSSLEENLITNISKLSASLLTKLTNLENVILQTKEERDIEAQARFYREKVFSAMVELRIDVDGLETLVSKKYWPYPNYGQILYSVI

SEQ ID NO: 88304 - protein, 647 aa, Unknown
  Obtained from environmental sample
  DOMAIN (128)...(420): Glutamine synthetase, catalytic domain
  misc_feature (1)..(647): Xaa is any amino acid
MSKGTHLELDVANVVANAMKNWAVERGATHFTHWFQPMTGTTAEKHDSFISPTSDGKIIMEFSGKELVRGEPDASSFPSGGLRATFEARGYTVWDVTSFAFIKDDTLCIPTAFCSYSGEALDKKTPLLRSMEAISKQALRILKLFGDTTAQRVLSTVGPEQEYFLIDKEVYLQRPDLIYTGRTLFGSQPPKGQELEDHYFGAIKPRVSAFMKELDEELWKLGVNAKTKHNEVAPAQHELAPIFSTTNIATDHNQLTMELMKSIANKHGLACLLHEKPFAGVNGSGKHNNWSISTDTGVNLLEPGDTPNDNAQFLLFLVAVIKAIDEYQDLLRVSVASAGNDHRLGANEAPPAIVSMFLGEELTEIIEAIESGKGYKNKEKLDMEIGVSVLPHFPKDTTDRNRTSPFAFTGNKFEFRMVGSAFSIGGPNIVLNTIVAESLSQFADSLEKSKNFKGDLAALIKKTISDHKRIVFNGNNYAEEWVVEAQRRGLSNLKTTVDALPEFISKKSIELFTKHHVFSDVEIHSRYEILMEAYCKTVHIEALTMVDMVKGDIFPASVGYQKDLTKLLQQKKALGYYDSSLEEHLISNISKLSASLLKKLTDLENALLQTKEERDIVTHARFYREKVFAAMVELRIDVDGLKHWWQR

SEQ ID NO: 88305 - protein, 73 aa, Unknown
  Obtained from environmental sample
  misc_feature (1)..(73): Xaa is any amino acid
MYFDDHNPPHFHVRYNDDRALVSIEELKVLEGHLPPRILGLVIEWAELHKEELKQDWDMVKTTGKYFKIDPLV

SEQ ID NO: 88306 - protein, 84 aa, Unknown
  Obtained from environmental sample
  misc_feature (1)..(84): Xaa is any amino acid
MVWVVKSELKEDYKVHIEFNDGTAGVIDFYDKLRNDHRQIIRELLDLEKFRTVKTGLDTICWDNGVDFAPEYLYEQLKMQQKVA

SEQ ID NO: 88307 - protein, 110 aa, Unknown
  Obtained from environmental sample
  misc_feature (1)..(110): Xaa is any amino acid
MDQNLTEIVFILDRSGSMGGLENDTIGGFNGFVKKQAEMGETSLTTVLFDDRYEILHNGVDARNVTLTDREYFTRGSTALLDAVGKTINDLGRRLNETAEEKKPGKVIFV

SEQ ID NO: 88308 - protein, 287 aa, Unknown
  Obtained from environmental sample
  misc_feature (1)..(287): Xaa is any amino acid
LELAGAQIFAPDQEFAEKYALSLRARAPQNQLVLLADYVKNYFGPSGGRPHRTLLLLFKGENPCEKLLNTCGHLYTQHVEVDALAGETIRDTYSDLIFSAENPEEVRYFEPAVLTPRSQEEANNDLKMFADFLEGQENIVQNVKHTDPSKIERTLVIIKPDNWKHNSSRPGAIIDMFSRTGLRIIGIKVHRFSLSQALDFYGPVEDVLKEKLAPGFSKKAVEILENEFGFKMSNELSNLIGSKFGEECARDQFHSIVEFMSGKRPGDASKEDMDKQGDIKCMILVYE

SEQ ID NO: 88309 - protein, 477 aa, Unknown
  Obtained from environmental sample
  DOMAIN (236)...(383): GTPase of unknown function
  misc_feature (1)..(477): Xaa is any amino acid
MNAPTHTIAALSTPPGRGALAVVRLTGDGSQEVFAGVIAEKEKFAKEAPRRIGVYTVIDTARTCTDISDNTSHAAIDEVTAVKYNAPHSYTGEDMVEIFCHGGAIIPAKILNSLLSKGAKAAGRGEFSRRALINEKIGILKAESIRELIESQTETHLRSAQLAYFGKQSESIEQLKQEIIATLSDIESRIEFDDDDVTESKHRQISANNQTLTSIVARLQDELRRGDRVKALDDGIIVVIAGPANAGKSSLFNEILGYDRSIVHNRPGTTRDIVSERLSIDGVTVKLFDSAGLRETGDAVERLGIDRTKSAIAEAHTVLWVTSATETFGDGEQEGILEAAGIGGNDYNSASGDLQEAQHVDIYDNYGDSRGKDSLVVIINKIDEKDFSAIIEKKRFCEKHDLKHAETSITQKLNRAHVFDVISTTIKEAMSDVPAPAIIINERHRGIVEAVVGDLRDCLDNFAREEVAAHCLRSAWI

SEQ ID NO: 88310 - protein, 309 aa, Unknown
  Obtained from environmental sample
  misc_feature (1)..(309): Xaa is any amino acid
MNKELSKFSELRAGAGGFDPEKLREAARIAIEVSLKVQAGEQVLIISNPRSEVVSIAEALYDASIGAGGRPVLMYQPVKTQLSFAEPAVIAAFNAKPQVVISLSDEKLGKDPAGIAKPYQHNGTGYDHIFHLLMYGEKNCRSFWSPSTTIESFIRTVPIDYAELQRRCAAIKRILDRAVEVHVSAPGGTDITIGLCGREAKTDDGNFSTPGSGGNLPAGETFISPENLTAKGRICYDGSISVNEGELIINTPIECLVEDGYVNKILGAGEAACLLKTIEAAENNAFEFEKARETASQLRGNIRPQCPQH

SEQ ID NO: 88311 - protein, 247 aa, Unknown
  Obtained from environmental sample
  DOMAIN (3)...(247): Histidinol dehydrogenase
  misc_feature (1)..(247): Xaa is any amino acid
MLVYKNGGHRLFEEDEETAAVVSRMLLDLEKNGMDAVRKYSEKFDAWSPASFELSGAEIHKAVASLERQIIEDTDFCQKNVREFANKQKETMLPLETETMPGVILGHKHIPVNSVGSYIPGGRYPMFGSAQMSIIPAKVAGVKNITACTPPVKGEGFYPATINAMKKAGADRLFIVGGVPAFALMAFGMGVVEPADILCGAGNKFVAEAKRQLYGRCGVDLLAGPTEILVIADDEADPDIVACDLLG

SEQ ID NO: 88312 - protein, 364 aa, Unknown
  Obtained from environmental sample
  DOMAIN (152)...(221): HAMP domain
  misc_feature (1)..(364): Xaa is any amino acid
MLLSYAVFQQLFVRSDTSHLPEYGEISALLNEKISARDWESVRYVVRRFQNLGKTAVFRDDYFVLYSSLPEFTSGLSSTREDVRAFLDSFNQMEDYRFVTLNMKETRVFILNRAIRPPPIFRSVLPLPSMTEPDQPDFSGLPPPFFVPSILIISFIVLLIVFAICMSIVIARTIARSMQVLEDSTRRIAGGELDLNVDVKGNNEITSLANSLNKMRKALKEKELGRSRFIMGISHDLKTPLALIKGYAEAIEDGVAEDPVSRSGATEIIIEKTDQLEGMINDLINFVRMETGEWREQLHEINLTLFLKNFIKTLSVDVELLHHKFISDISLPENLPVSMDERLAQRALENLISNAVRYSPSGSL

SEQ ID NO: 88313 - protein, 130 aa, Unknown
  Obtained from environmental sample
  DOMAIN (60)...(130): Acetyltransferase (GNAT) family
  misc_feature (1)..(130): Xaa is any amino acid
MQIIKIDEHVILRFAKKRDTALIMNFIRELAEYEHLSGLLEVDEINLQKYIFKEKVVEVIIAEYDNKPAGFAMIYTNFSSFLGKPGIYIEDLFVRPDFRGKGLGKHLLSYLAKLVQERNYGRLEWACLDW

SEQ ID NO: 88314 - protein, 145 aa, Unknown
  Obtained from environmental sample
  misc_feature (1)..(145): Xaa is any amino acid
VVLSRRSEALKVLQFIRDETHRFATGLNQRLRSKDLFFPTLESVEGIGSKRAAAIMKAFETVENIAGAEPDEIAERCRLSRAAAKAVRAAARLALEDRKAGRQRLAAGAPKSGGQKRTSAARGIGEMLAAEAAEPEYGGAMSNEQ

SEQ ID NO: 88315 - protein, 349 aa, Unknown
  Obtained from environmental sample
  misc_feature (1)..(349): Xaa is any amino acid
MMVFFMQQKKDGFVYPQKGVAVTVSEQIEQSTLTWDCGKASGTVKAELRGNTLIIRGEGKMRDYSTSAHNAPWYAYRGFITDVVIEKGVASIAAETFWGCTGLSSIDIPYSVLDIGAGAFLGCTGLMSINVAPENINYRSIGGVLFYVKERAFCLVAYPAGKSGVAYAVPSGVTAIERWAFYGCTNLAVVSIPSSVQSINRSFVGCGSLASIEVAFGNTCFRSADGVLFYTGEEGEYILQTYPARKQGAYTIPSGVTKLREKAFLDCTGLTAVTIPNSVMFIENYAFSGCTGLASVAIPRGVLSIEEWVFSGCTGLKSIDVAPDNAGFRSIDGVLFRAVYDKNELMAFP

SEQ ID NO: 88316 - protein, 78 aa, Unknown
  Obtained from environmental sample
  DOMAIN (6)...(73): Phosphopantetheine attachment site
  misc_feature (1)..(78): Xaa is any amino acid
MSAVESEVKKIIAGRLSVSEDKIKPESKFIDDLGADSLDLVELVMDLEEKFEVSIPDEDNDKLRTVQDAIDYINKARS

SEQ ID NO: 88317 - protein, 113 aa, Unknown
  Obtained from environmental sample
  misc_feature (1)..(113): Xaa is any amino acid
YANYAACGECPDKDTCTQGEYRQILRPLYQDTLDVVDERTRQNKGLYRKRQEIVEHVFGTVKAVWGYKQFLCRTKPKVCAEVSLAYLAYNMRRFINIFTGKRKNPVLILGQMA

SEQ ID NO: 88318 - protein, 468 aa, Unknown
  Obtained from environmental sample
  misc_feature (1)..(468): Xaa is any amino acid
TTNDDCVDYNCAEVRLMVYNNDMAQSWSINKNEGFSVRCAMTERHIVMWHTNGGTLLPVPTAVTHGGDIENPVSPGKMEEFAEYVYEGTFYDSAYTMPANPPIITAGQSLYAKWTAVYTEYKFGGWYLDSLLTIPAEFPMKNVKQDLDLYAKWGGAYTVTFNPNGGTVTPYSDTTNIYGKLVSLPRPVRKDYIFNGWYTAPDGGAKVGTGTVFSANITIYAQWRSISNSHIITFDPNGGTVSPTVVYTEEGDKLTWLPTPIRDCVFLGWYTAEGWAVTTNTVFTADAVVYARWRGYRIGFWWAYCAEGHSCDPPRPLLQRPIETGLDGKLASLPTPNCDGSTPCSVFEGWYTERRGGTRVTTDYVFSSDTTVWANLMYTTATYTITFNPSGGTVSPTSAQIVRVYDYFGIFPPGARLTSLPTPTRDGHKFDGWYTAPDSGIEITINTVYNADATIYARWTPVTYTITF

SEQ ID NO: 88319 - protein, 309 aa, Unknown
  Obtained from environmental sample
  misc_feature (1)..(309): Xaa is any amino acid
GLYQEAQNLGKEASTLGSPQNEELNSVFQKHKESVLAEKARLAEEKAKQEAKLKEEEESKKQAPVQAQTQHVQEQTAEMQDLSPESAEEKSYETKEDKLSEEEYHAKLPLLQTIIDKINALDENGDFNEISQSVRQAFYEWKEIVGEKKSQFKNIYKEFRTATSRFQNLQEWASWHAEQIREQLIKEIEELANMPVVLENRTKAFAMLEQWKAAGYMPAPKIQELWPRFKTGLDKVMDSVLPLLKEQEKGQEENLKTKEDICAQIEELAATAGEWAEQLKKIQELQAKWKNTGFVPKVQNHAIWERYQA

SEQ ID NO: 88320 - protein, 67 aa, Unknown
  Obtained from environmental sample
  misc_feature (1)..(67): Xaa is any amino acid
EVAPDRAKALALRWLLMAARKRNEQNMALRLAAELVAAKNNEGGAVRKKIDTHKMAEANKAFAHFRW

SEQ ID NO: 88321 - protein, 278 aa, Unknown
  Obtained from environmental sample
  misc_feature (1)..(278): Xaa is any amino acid
AGGYDVLCGGVNVGQLSNGEGCAITDASNSAYYLITCGSTSGQLAKAWCVEKAYDPAKMICNNGILTFSFTDARDNKVYKAVVIGTQTWMAENLNYNAPSSKCYAEGVDGVSNDSIAKNCAKYGRLYNWATAMALSADCNTSLCASQVTEKHGGVCPAGWHIPSDAEWNVLMKVANPSCSNNSNCAGAGTKLKARSGWNPRDGIPSGTDDFGFSALPGGYGNSLGSFLGVGLYGYWWSTSEDVADDAYLRSIIYGYEGTRWDSYYKYNYLFSIRCVKD

SEQ ID NO: 88322 - protein, 623 aa, Unknown
  Obtained from environmental sample
  DOMAIN (199)...(264): His Kinase A (phosphoacceptor) domain
  misc_feature (1)..(623): Xaa is any amino acid
MADWYNPTERSWYQNAIAANGEIATTMIYSDVIYDSPVLIFSRCVYDDHGRRLGVVGLRIEIDAIGEFVINTASAHGGYGILISEDLVLFAHPNRKLIGKNMREIGASISVLADKLLSGKEITEYPITSYKGEDSVAFLRRLPNGWYLGVNFPRLPYYKSVINLAVILSILGIALASVLSFILIRVDAARNKSDMESRYKSAFLANMSHEIRTPMNAIIGMTELLANEQLSERQMGFIDDIWVSAHSLLSIINNILDLSKIESGKFTLIPVNYDFHALVDNIVSMFTYVAQKKGLEFKFESTVGLPECLYGDDLRLRQVLTNICGNAVNYTEKGHVKLKISISNANLVFEISDTGMGIRKEDIYRLFDAFERMDIEKNRNINGTGLGLSICKSFVEMMGGYILVESEYGQGSVFTVIIPAVSGDKAKIKSAKSMGKEKPLYAPDAAILVVDDNEFNLRVAEGMFNLFKINTKTAFSGKKAINLIQNNEFDLVFMDHMMPEMDGIEAVGIIRKLGSQYESLPIIALTANAIQGAKEMFLSSGFNGFISKPIEIQRLKEVLREWLPPAKIVEEELASLDVDSQYNETSGDFINALGEIDEIDTEIGLSRVSGLKNMYHETLALFH

SEQ ID NO: 88323 - protein, 199 aa, Unknown
  Obtained from environmental sample
  DOMAIN (34)...(192): BioY family
  misc_feature (1)..(199): Xaa is any amino acid
MNDNENLKPALSKWLTKIALIIFFAALTTTGAYIAYPIGPIPISMQNFFILLSGLVLGPLMGSAAVGLYLLAAILNFPVLALGGGGIARFAGPAGGYFVGYLFAAFTAGLIVGAPISGPKADANADTSIKRIIIAEIAGLIVSYVPGLIWLKIRMNIDWAETFLTGLVPFVIVDTIKGIAAILIASRIRRIAADFLYKK

SEQ ID NO: 88324 - protein, 154 aa, Unknown
  Obtained from environmental sample
  misc_feature (1)..(154): Xaa is any amino acid
MSFRRAGISVMYTKGFNPLIKMEFASPLSIGISADCEIASVDFSEEISIENFVPDLNNNLPYGFTIKKAESFLIKSGMKKHSLSSLLWGFAYVKKDGVDYVNQKEEKVYRQNRLNNGETLFSLNRKETLSRNVTNEDVKQWISYFNAYRFLYPD

SEQ ID NO: 88325 - protein, 347 aa, Unknown
  Obtained from environmental sample
  DOMAIN (1)...(223): Methyl-accepting chemotaxis protein (MCP) signaling domain
  misc_feature (1)..(347): Xaa is any amino acid
ETADGAAVVAEKILDIARDSEGLLQINAVMDNIAAQTNLLSMNAAIEAAHAGEAGKGFAVVAGEIRKLAESSSTQSKTTATMLKKIKTSIDSITESSNEVLSRFGIIDEKVKTVSTHEENIRNAMEKQEVGGKQILESMGKLKEISVSVKEGAENMQKSGDHLNTQTTELIRSSTDVVDGMNEIVNGAMKEIKAAVHLVDEMSAENTRNFEQLKEESSKFKVESGSERKKIIVVDDEQTILTMARASLEKDYDVTTASSGKEALSLFFQGYVPNLVLLDLSMPEMGGWDTFLRIRNISKLHQSPIAIYSTSDDPQDRAKAKELGAVDFIHKPAKKAELLEKVSRLVN

SEQ ID NO: 88326 - protein, 975 aa, Unknown
  Obtained from environmental sample
  DOMAIN (611)...(762): Anticodon-binding domain
  misc_feature (1)..(975): Xaa is any amino acid
MKGKKVERRFGWDCHGLPVENLIEKELGLNSKTAIESYGVAKFNEACRAAVLRYVKEWRATITRLGRWVDFDHDYKTMEADYMETIWWVMKTLWDKGYLYEGHYILPYCPRCATVLSNHELNLGGYKDVHDPAITVRFKVADGKKFGADNSNTYLLAWTTTPWTLPSNLALTLGADIDYVLIEDKNEHYILAEARLSAYYKEASEYKIIWRKKGNELAGLQYEPLFPYFKDAPNAFRTFLGDFVTTEDGTGIVHTAPGFGEDDARVLKGTGIPVICPVDAECRFTQEVPDFAGVFVKDADKAIIEKLKNEGKLVKRDQILHSYPHCWRCSSPLIYRAVGSWFVSVEKIKKDMLDANSQIYWIPEHIKEGRFGKWLEGARDWAISRSRYWGNPLPIWRCPDCGKTICVGSRAELKELSGVYPDDLHKHFVDEIKIPCSCGAKMTRVPEVLDCWFESGAMPYAQNHYPFENKEFFDSHFPSDFISEGLDQTRGWFYTLTVLAAALLKKPAFKNCIVSGLVLASDGKKMSKSLRNYTDPNEVINSFGADALRLFLVHSAVVKADDLRYSDDGVREIMKSIIIPLWNAYSFFVTYANIDKITATGAPEKPSNPLDQWILSETQTLVEKVSAALDAYDLSRAVDPILRFIDLLNNWYIRRSRRRFWRSENDSDKLEAYGALYEALKTLITVASPFMPFTTDAVWQNLRLKDDPESVHLTDYPSPNAKRRDSDLEFRMAAVMSAVSIGRSLRSQYNIKMRQPLRKAELVTRNEEEKKALLGMADIIREELNVKEVVFSDNEEDLVEYEVKANFRVLGKELGKDMKSAAAKIEALTHAEIQKIVQGSPLSINVPCEGGDRALVITADKLDIRRIEKANLRVLNEGTLTVGLDTEITRELSMEGDIRDLIRGIQNARKEMGLSVTDRIELCVHGADTLKEAWENFGKSAAEETLAVKTQWAKTDGQIPIEAGEETWQVKIVKA

SEQ ID NO: 88327 - protein, 564 aa, Unknown
  Obtained from environmental sample
  DOMAIN (394)...(419): The GLUG motif
  misc_feature (1)..(564): Xaa is any amino acid
LEIDNISFSEHDGGHITKTYGDLPFTNAITAAHHGTGTITYHSSDENVAAVNDSGQVTILRAGYAVISAEKAADDQYAHAKTTYALMVNPKPVTITGLSASDKMYDGTTTATVTGTAVINGLISGDDVTVIAGIASFTEAAVGNDRTVTFNGWSLGGADADNYTLPAQPASVTANITPNGSADAPFLVANEADLRKVGTGADGWTLSAHYRQIANIAMTTGSFTTIGDNTNRFTGVYDGNGYAITGLTVTAATYNQGLFGVIDADGTVKNVNLSGTITQSGDNNGVGTGGIAGLNYGTVDNCVFSGTVSGLTSNQVGGIVGSNQSTGIVKNSGNNAEVNGRNNTGGIVGLNQGGTIENCYNTGDVIGVSTVGGITNNSSGGTVINSRNTATVTGNTNVGGIAGINQAKIDNCYNTGAINAAEQAGGIAGGNTGSGVYIKNSYNTGNVTSSDSSTSAGGIAAVNQSGATVEFCYNTGNVTSGRIAGGIVGSSSSGTTVQNCVSLGARVTGGYSTGRVVASIGGTFANNKARMDMKIGASGAEAIPTTSIAANGGNGADVSVSGMI

SEQ ID NO: 88328 - protein, 254 aa, Unknown
  Obtained from environmental sample
  DOMAIN (12)...(217): Peptidase family M50
  misc_feature (1)..(254): Xaa is any amino acid
MQQLYFALAIMIGLIVLSILVFVHELGHFIAAKSCKIRVLAFAIGFGRTLFKWKRGDTEYRVNAIPFGGYVLMAGENPDGERSGADDEYHTKPIWQRAVVALAGPVANLIFAFFTLWAAFVHGIDRPAFLDSAKVGIVQKDSPAETAGFLAGDSILSINGAPISSWEQVDTHLSTQLSDGYKIVVQRDGKPAELSLTVERTGAHLPKTLSGGLMPSRYPPVVGGVKPKSAADGLLEIGDTLIALKDIRVSSFEH

SEQ ID NO: 88329 - protein, 180 aa, Unknown
  Obtained from environmental sample
  DOMAIN (12)...(139): 1-deoxy-D-xylulose 5-phosphate reductoisomerase
  misc_feature (1)..(180): Xaa is any amino acid
VTDMCNDNNKKLLILGSTGSIGRSACNCVRRFRDRFSVTGMAAGSNADLLIEQIKEFSPSSIYITDSKNAAMIKDLFGDKISVYSNDDGDGLERIVNETDYDILLNALVGAVGFKPTVAALKRGKRVSLANKESLVIGGDCIRAIVNRNRSPKTPTLLGATPLIPDLLPIDSEHSAILQC

SEQ ID NO: 88330 - protein, 477 aa, Unknown
  Obtained from environmental sample
  misc_feature (1)..(477): Xaa is any amino acid
ELQGRLRTYYNLRPRGNTYRPGQQIITIEAAKTTEYFTIEVVDEEYARLKGDVIVSLKDGATVHRIKAWEILYNRTRNVMTATGNVEYTKEEGATVETFKGDSITVNLDNWSGIFMDGASQKSTVGGSAAFRFSGTVISKNDEGATVLSGADITNPANEEAYWSLHASKLWLLPGNDWAIFNAVLKVGNIPLLYLPFFFYPADEIIFHPVLGYRSREGTFLQTTTYILGRPKSSGSSGNSITRIFGGDSDSEGKVREGVFLRASNEKTQDSSATQLSVLFDAYVNLGAYLGTEMAAPAKGLFGATKLSAGLGLTRDIFISGADYTPFRDSSGESSWNSSRFFFMDVPLRYRFVYSTSFKVSNGSLSLEIPYYSDPYVNRDFMGRSEVLDWLAMLREGVTASDVVSDASISSYEWKLNGSFNVPVAKFAPYVSSFSISNLSSTLTFSQRYSGRYSGPSAPPNPGRAFFFPNRLTILSI

SEQ ID NO: 88331 - protein, 302 aa, Unknown
  Obtained from environmental sample
  misc_feature (1)..(302): Xaa is any amino acid
MVDDDFNPEWLDDEIADEIDSEDTSPETHENTSKIASDVEAEEVSTQPEESSPRTSEQAENKAEAPTPEARLIQKLEDLLTQAKAEIAQSTQKKQEATTKPENAKETAAPDESAALPSPKQAAPRFEAWRSHIEEALNRYKAWAGSQPKQLPAPEAKPKKKAQTPAQKAARDKALAEKQRRMEIERAEKEAAAKAKREAREAETRARVIEKQEWAERKAERNNSPAWQLYHTMKEIARKNGAVSAEARHKFWESVGNNPTPPDAWARKRAPHEVNKWIKRRTKAAGRIDEYLRENAESSCGD

SEQ ID NO: 88332 - protein, 485 aa, Unknown
  Obtained from environmental sample
  DOMAIN (5)...(178): NAD binding domain of 6-phosphogluconate dehydrogenase
  misc_feature (1)..(485): Xaa is any amino acid
MGTTTADIGLIGLAVMGENLVLNMESKGFSVAVYNRTTSKVDDFVQSRGAGKKITGCHTVAELAASLSSPRKAFIMVKAGQAVDDAIEQLLGVFQKGDIIIDGGNSNYQDTIRRTAYVESKGLLYIGTGVSGGEEGALKGPSIMPGGTQAAWNLVKPIFQAIAAKVETGEPCCDWVGENGAGHFVKMVHNGIEYGDMQLICETYDIMKNILGLSCDEMGNIFDEWNRGSLSSYLIEITRDILRYKDTDGQPLVERILDTAGQKGTGKWTGIAALDFGVPLTLIGEAVFSRCLSAVKDERVRASKVFSKPKPVTVADKAAFIKDLEKALYASKVVSYAQGYLLMREAAKEYKWNLNYGGIALMWRGGCIIRSVFLGKIKEAFDKNPGLDNLLMDPFFTKILEDAQDSWRRVVAAAVQSGITTPAFSSALAYFDGYRSERLPANLLQAQRDYFGAHTYERVDRPRGEFAHTNWTGHGGTTSASTYVV

SEQ ID NO: 88333 - protein, 441 aa, Unknown
  Obtained from environmental sample
  DOMAIN (341)...(439): Phosphoribosylglycinamide synthetase, C domain
  misc_feature (1)..(441): Xaa is any amino acid
MKILVVGAGGREHALAWKLAQSPKVDKVFVAPGNGGTTAEAKCENVAINADPASAKGQEELKQFCLREKINISVIGPELPLANGIVDTFRGAGLAIIGPSKDAARLEASKIYSKAFMAKYGVRAAAGSSFTDSEKALDFAAHHFKSSTSSPIVIKADGLAAGKGVVIAHNLPDTRETLAAFMQQKKLGDAGSSVLLEEFIKGKEVSILAAVSVCGGKGYILPFISARDHKRRFEGAQGPNTGGMGAVAPAHDFSQEAQDDFVQSILKPTLNGIRVEHFDYRGFIFFGLMVQKNRCYLLEYNVRLGDPETQAVLPLMDSDLVDLCEAVIEGNEFHLTWKQGAVCAPVVVAEGYPGPYRKGDAVSIDVTALEKTGAKIFISGAFRGLAGGIGSSAPSLLTSGGRVLTVSAFGQNADEAYARAYKGLEAINFEGMGFRCDIGRE

SEQ ID NO: 88334 - protein, 512 aa, Unknown
  Obtained from environmental sample
  DOMAIN (264)...(444): Peptidase M16 inactive domain
  misc_feature (1)..(512): Xaa is any amino acid
MADIEWELNAVNAILPEIGLKEIQAAVKKYFSYNDCIVFLMAPSAEAGTLPSKERIKAIFTETEKAAIKPRKDESLKDELLDAVPPKGSITSEVTDKETGAVILTLSNGAKVILKETKNKNNEIVMYAMARGGTVNASDNEFISANLASEMLAASGLGPYSRIELVNRLAGKQVSNSFWASSYYRGFQGSSTAKDIKTLFEMIYMFFTKIKLDDRAVAAMIDQYKTTLAHQEDDPDNYFSRELRKIISGNHPRFKPLELADLSKISTEQAFSFINRCINPADYTFVFTGNLKLNEMKDLAAGFIASIPNAPSMNTWVDPRITRPADIEKKLYKGKEDRCTVYLGWFAPSNAAFDESTNQTASILSEYLDILLTDEIREKLSGVYSISAGASVSTIPKGEARLEIYFQCNPARVNELITAVLERITAVSAKPLNQDTFNKSKEAILKEHENSIQRNLHIAQSLANSSVLYNTPLSRLNSRPAVIRAVRPENVQSLCREITTSGSVQVVMYPAK

SEQ ID NO: 88335 - protein, 245 aa, Unknown
  Obtained from environmental sample
  DOMAIN (9)...(149): Glycosyltransferase family 28 N-terminal domain
  misc_feature (1)..(245): Xaa is any amino acid
MEICFKDALVITGGGTGGHYYPAIALAEALAEQMPDRQIIFVGARKGIEAMKLPDTRWQHLLLEVEGLSLRSPTKAFHAIRRMLESRHYLLRAWETDRPLAVVGTGGYAAGPALFAAKKLKVPYFIHESNAEPGLITKLTAKKAARVWLGMEAAKVRLPKANCLYVGTPIREAFLRPFKPVSTLGPPFRLLVLGGSGGARAINEALFSIAPALLDAHADWEILHQAGNREMERIGQEQFHQRHNV

SEQ ID NO: 88336 - protein, 97 aa, Unknown
  Obtained from environmental sample
  misc_feature (1)..(97): Xaa is any amino acid
PVSQHCEDICFGHHERWDGKGYPRGIAGTDIPLTARLAAIADVYDALVCARVYKAAFPYSEAVKLITDGSGTQFDPVLADAMPHLQDRFKEIAEKYK

SEQ ID NO: 88337 - protein, 227 aa, Unknown
  Obtained from environmental sample
  DOMAIN (45)...(172): Acyltransferase
  misc_feature (1)..(227): Xaa is any amino acid
MVFLTPFGVAGFLLSLLGLRGPMSVYMYWIGVGWARLLIKMVGCKVTVTGRENIPHRGGLCFVSNHGSIFDIALFLAYARRPFGFVAKKELLFIPFLNIWIYMLGGLFMDRKNFRKAMKTMNAGIERIKKGWAMIIFPEGHRSRGRGLLPFHPGSFKLATQSRAVIVPVALKGTWEVFEKSYRVNPGPVSVTFCKPVNTADIPAEDRKQVLAEKIYNVINEELGTGD

SEQ ID NO: 88338 - protein, 114 aa, Unknown
  Obtained from environmental sample
  misc_feature (1)..(114): Xaa is any amino acid
IDPDTARLIRDIKAAGLRFGILSNIPHDFPRDSVPVFAEAEIAVYSCDLGIIKPEAGIYEKLREKAGCLYEEIVFFDDKVDNINKARELGIQAFLWEGAEHARKVVSGITGAAV

SEQ ID NO: 88339 - protein, 131 aa, Unknown
  Obtained from environmental sample
  DOMAIN (5)...(131): Bacitracin resistance protein BacA
  misc_feature (1)..(131): Xaa is any amino acid
MNIINAIILGIIQGLTEFLPVSSSGHLVLFQKIFKIEEPALLFDTMLHVGTLVAVFAVLWADIWAILRKLKQPLTAYLIIATIPAVIFAFVFRKPLEKAFETGQFLGLSFLLTSALLIMAELLSKRAARGV

SEQ ID NO: 88340 - protein, 255 aa, Unknown
  Obtained from environmental sample
  DOMAIN (99)...(142): SWIM zinc finger
  misc_feature (1)..(255): Xaa is any amino acid
MKSRYGVTPWGSWFIDVLDSYQMGARLGRGRSYANTGKVLSLKLEEGRALAKVKGNYRPFYRVEIIFPPLKEAEQVYKMIENDPPLLARIAAGELPEAFLQKLKDNGINLIPRRWGEMERSCTCPDYGDPCKHMAALYYIIAREIDADPHVLFRLRGMDLSKRFGEAAVHQISPPFTVTFAPDIKDIKLMDEHGLSSVESVARGTAMEPLVLEEIPHCAELITSLLPPAPPFCDRDFTVVMAEFYHRSAHYKSWE

SEQ ID NO: 88341 - protein, 281 aa, Unknown
  Obtained from environmental sample
  misc_feature (1)..(281): Xaa is any amino acid
MNVFDNMLSQHKAITIEQKNNAFREVMQQIVLAGLSRSDFFEHAAFYGGTCLRLFHDMPRFSEDMDFSLLQADKNFDLQNYFPFIREEFLSVGKTIEITKKEKQQNTNIESAFLKDTSLFYDVKFQMERQVKIKIEVDTLPPLDFETENKLLLQPFSFNTRCFTLPCLFAGKVHAFLFRSWKKRVKGRDWFDFEWYVKNKIPMDLKHFLARAKQFGDPDGKIKNEKSLKLALAKRIKSVDIKAVKSDVMPFLKNPQDTEIWSENYFLELVGRVLWRLGGSI

SEQ ID NO: 88342 - protein, 248 aa, Unknown
  Obtained from environmental sample
  DOMAIN (1)...(247): Domain of unknown function (DUF323)
  misc_feature (1)..(248): Xaa is any amino acid
MGSDSGNSNERPVHTVTLSSFYMGKYEVTQEQWVAVMGSNPSAYKGSPASGENQWKRPVEQVSWYDALVFCNKLSMKEGLTPAYSISGSTDPTVWGTVPRDWDSTWNAVTIVAGSTGYRLPTEAQWEYAARGGYGSPGNYTYSGSNTVDDVAWYIDNSGYKTHEVGKKAPNGLGLYDMSGNVWEWCWDWYGDYSSSAQTNPTGAATGTYRVARGGGWYSDASITRSVLRDYGNPHIRVSHVGFRLSRP

SEQ ID NO: 88343 - protein, 92 aa, Unknown
  Obtained from environmental sample
  misc_feature (1)..(92): Xaa is any amino acid
SSEWRCPRVSVKPSIILADEPTGNLDSRTSQDVLGVLKMTSTQFHQTIVMITHNEHIAQLADRVIHIEDGKIKGEASRKWKIIIPRLSAALP

SEQ ID NO: 88344 - protein, 380 aa, Unknown
  Obtained from environmental sample
  DOMAIN (101)...(274): Predicted permease
  misc_feature (1)..(380): Xaa is any amino acid
MQGILNVTQTAMMQEAGSDFHAVFEFVDDKQIDLISRHPSIKEYSVATTYLFIKDSTVEKRYMKVDDVFWKHAIISDSPYGPFSNIEFVDGDFDENNADPYNELYVVFDNAYFLKQKMNRIVSDTGVDAKFYVNNAYTTAVLFEEPSSFLPFALPLILIFICGYLLVYNIYHISVVNDVKAYGLLKTVGTTGNQLKRIIFISTNILYFIALPVGLLLGYAIGYLALTPLLLPLSGIDVVMKTSPFPYIFAAVFVYVTMIISIRKPQKIAGSVAPVVAVRYTSPSAAPLLSKHKAGKSNIRNLAWRSLLRNKGRTAFSILSVTFSIIIFAVLFNIFSNISFDAFVNKYFGGDFTVNYIYPEQLFPDNDSRITETLIDSVRS

SEQ ID NO: 88345 - protein, 135 aa, Unknown
  Obtained from environmental sample
  misc_feature (1)..(135): Xaa is any amino acid
ILHTGVHNVRLVNRAKIILALDTSGERIAERQEAIAERQGVSRRTVNIARRDYLAAGNIKTFLQRKQRETPPVPSKITGEVEARIIALACGEAPKGYARWTLRLLAAKCVELRYSDTMSHMTISTLLKKRNLSLT

SEQ ID NO: 88346 - protein, 466 aa, Unknown
  Obtained from environmental sample
  DOMAIN (43)...(192): Malic enzyme, N-terminal domain
  misc_feature (1)..(466): Xaa is any amino acid
MGIDLNLKNLDSLFPAGFSEEQKAQAKTLFLKNLSMEAHGFYGGKMQTLPKCGIYGFNWLNVWYTPGVSKISTTIRDDNDTSFALSNRGNLVAVVSDSTRVLGDGDCTPPGGLGVMEGKAMLMKYLGGVDAVALCVDSKGQDGRNDPGRLIDFVKMVQHSFGAINLEDISQPNCYIVLDELREACDIPVWHDDAQGTACVTLAAIINALKLAGKKMGDAKIVLQGAGASNTTIARLILADGGDPARIAVFDTKGGLHAGREDIREDNKNYRKWELCEKTNPGRISDIAEAMKGADVLIALSTPGPDTVKREWIRSMADKAIVFTCANPVPEIWPYAAKEEGAFIVATGRGDFPNQVNNSVCFPGILKGALLVRAKKITDGMAIRCAHSIAEFSEKRGIEADNIIANMEETDVFAQEAADVAEQAIFEGVARLELSREEVYSRAKADIAAVRAIVEDMKEMGYIKEP

SEQ ID NO: 88347 - protein, 153 aa, Unknown
  Obtained from environmental sample
  misc_feature (1)..(153): Xaa is any amino acid
MAGLLLIGGFAFRFLPVSALPQVDYPTIQIATFYPGASPDVVASAITAPLERQFGQLPGLNRMYSASTGGSSLITLQFDLNLDIDIAVQQVQASMNAAGTFLPANLPNPPIYSKSNPADAPIISLGISSVSLPLTKVQDMADTRLAQKISQLP

SEQ ID NO: 88348 - protein, 444 aa, Unknown
  Obtained from environmental sample
  misc_feature (1)..(444): Xaa is any amino acid
VTSESGSNQVKVSDRVQAALAEINSTLPPGITLQVLSDNTSMIRATMSQVYSNAIQGGLLAMFILLLFLRNIKATAIIGLSIPISILITLMSMSIFGFTLNLMTMTGLIMGMGMTLDASIVIIENIHSYRERGAKASVAAILGSREMLRAITASTATTLCVFVPLIIYKNDLKEMGLMFSELIFTVVISLTVSIIVAVTLVPSLSGSILKLDTRIQKPIKNKILSIIDGKIEAALVFLEKNYKIALDYCLSHRLIIIALVVLILVFSLFQFSGIGMNMYVRMRTDDNVTLNVMMPRGTAIDVTEKVLFDIEALVKREVKGYNNIVLTATRSGNNQGSIQITLPPPARQIDTPDTIMKKLTPYLNSIPGTRISFRAGRGMGSSSPIEIAVSSKNYAALMDTAQDIQHIIMNYLPEIENPVVNVDEGAPQLQIEIDRDRASSFGLS

SEQ ID NO: 88349 - protein, 408 aa, Unknown
  Obtained from environmental sample
  misc_feature (1)..(408): Xaa is any amino acid
MTLSGIWELKKIAMRNLARHKVKTILTSAAIMVSVAVFIFINGWLRGMIIDSRRNIVNYEMGAAKLQTKLYFEKKDEMPSYENFTDWEIYHNALDSEGYVSAPRYVFSGTLSSVSGSAPIVFYGVDPAFEAETMRYVPYVDFGRYVQNGDFGIALGTFAAEKLKVGIPTRPYRQELEELIVSTSQSDADTEFIRSLYEPASGKKTFWDVNKKTTEGSERMILRKNASRSDLDRYWNLLDASGRNNVRINAVIDIKEDFSGALGHVNQVLDVKVIGIINSPAPLPNGNTAYIPLDILQDETGMMLEGAVTELVIREKNAPDSRLPGKSESAAVITAALEQGLAKEGYIMPDELAVHTWEEYMQNYLGYEAMENTMPQVIAGLLLLLSFLGISNTILLAILERTKETGMM

SEQ ID NO: 88350 - protein, 84 aa, Unknown
  Obtained from environmental sample
  DOMAIN (1)...(72): ABC transporter
  misc_feature (1)..(84): Xaa is any amino acid
EQQRVAIARALVKRPALILADEPTANLDSTIGREILELMLKLNKAEGTTFIFSTHDQMVMDYARRLVRIRDGQVESDEIKENAA

SEQ ID NO: 88351 - protein, 218 aa, Unknown
  Obtained from environmental sample
  misc_feature (1)..(218): Xaa is any amino acid
VEENIKSACGEEAWEGKEKTIRGDGIYFSEENLKDCEERGIEAVIPDSQERKRYNEEGQKMYEAADFIHHEKENELECPQGKRLEYKGESALSGKEGEIFQADAKDCRQCPDRSRCSRSQKPPEKQTQGKRVIITESNKPGSHCQKMRKKMEGEEYKEKYAQRIGMIEPVFANIGYCKGLNRFTLRGEEKVNGQWQLYCIVHNLGKCLNALNERAKCA

SEQ ID NO: 88352 - protein, 325 aa, Unknown
  Obtained from environmental sample
  misc_feature (1)..(325): Xaa is any amino acid
METSELFRNITTLPIISSGLAEEMLAGNFRSVFKGQGMEFDEARRYEPGDDIRSIDWNASARFGTPFVKMYREERELTILILLDVSPSMHTKNNTRTGKTSVNRVHENSVHDITPYEQGLICAALIAFSAEHTDQQLGAFLFDSNIEKIFPPHKGRKHIMSMIMAALRYQKQINPRRDKHGSNIADALAGAQRLLKRRSLIIVISDFFSVNWEHEMASLGRKHDVIALRVIDPPDLPWKGLITLEDPETGAHLEAPAGMDSFKESWLQWHKERSGLWENLCKRAGASFLELTTEEDAPSSLLKFFGSRGFPAHGLGRHEGRKYKK

SEQ ID NO: 88353 - protein, 373 aa, Unknown
  Obtained from environmental sample
  DOMAIN (153)...(367): metallopeptidase family M24
  misc_feature (1)..(373): Xaa is any amino acid
MELYSARLSKVWDWMAEESISLLILEDTEGRRDQSIRWLTGHPSDALLFLSQSRKAVLMAWDVNIAAQYASNAPVMLTEYNKWDRQASKAIAAMALLLEIPAGSKIEIPSVTPYPLFLDYVGQLTNNDIICRERGAGAQLRKFRAVKDEKEIEITRKAAEITNELIELLEKNVRGGKIKTEADAALLIEVEARKRGCEGTSFETLAAGPARSFAIHAFPNWTYSEFGGDGLSILDFGVRLDGYSTDVTLTFTRNLNPKQEKLVNLTEKAAKLALSIAHNGTPAKDIAAAVDALFTKSKKQMPHGLGHGLGLQEHEYPLISNRGSNEWVLEPGMIFTIEPGLYDPLLGGCRLENDVLITESGTEVLTTSHIIRL

SEQ ID NO: 88354 - protein, 68 aa, Unknown
  Obtained from environmental sample
  misc_feature (1)..(68): Xaa is any amino acid
MEFYVKWLNKYGRQDDEKEPIRIILCTKASRNQIKLMDLDKSGIVVAEYWTNLPPKSEFERKIKEILI

SEQ ID NO: 88355 - protein, 286 aa, Unknown
  Obtained from environmental sample
  DOMAIN (2)...(104): 5'-3' exonuclease, N-terminal resolvase-like domain
  misc_feature (1)..(286): Xaa is any amino acid
QTGKKHREDLHEQVPLVKEFLTALGIKCLKADGFEADDIIATLAKMCLNEKRQCYILSSDKDLLQLVGSGIYELRPSKINRKEAGASVLGPAWELIGPEEVKKERGVDASQMLDLLSLTGDNSDNIPGVKGIGDKLAVKLMSRYGSLDDIYKNIAAIEGVTGKKMAEGKESAYFSQSLIRLRDDVFLPIESIDELSAEKLDRGAGAAILIREGIRQSAKQLDPNVKAPAVQNTQKAETQKKDNEAAVEKAVSVSPDRDLLGDGIYKTILDINELKSVLELGERQQF

SEQ ID NO: 88356 - protein, 424 aa, Unknown
  Obtained from environmental sample
  DOMAIN (32)...(423): DNA polymerase family A
  misc_feature (1)..(424): Xaa is any amino acid
MLKKTESLSLFENLEMPLLPVLAEMEGEGIKIEPKALISYGKELAVELNQIQETTWKTVGHEFNLSSTKQLQDVLFVERKLTPGKKTKTGYSTDAAALEELAREDPVPALILRHRTLSKLKSTYVDTLADMTDSEGRLHTNFVQTGTATGRLSSREPNMQNIPVRTEEGRRIREAFVAKPGCLLISADYSQIELVVLAHLSEDKNLISAFMENRDVHARTAALIFGIDESEVKSEQRRMAKTINFGVIYGMSAFRLANELNISRSEASNFISAYFKTYSGVRSFIEDTIKKTEQNGYVTTLLGRRRYVPTINSRNKTEKSAAERIAVNTPIQGSAADIVKIAMLNLDRRLSSLENTQQSGIQSKARFCKARLLLQVHDELILECRQEEAADIAKIVKAEMEQAVKLRIPLRASVETGKRWGDFH

SEQ ID NO: 88357 - protein, 99 aa, Unknown
  Obtained from environmental sample
  misc_feature (1)..(99): Xaa is any amino acid
AIVFEREEGLGIFTISSRTSTKVNLEGEITALDDSGENGFLFLITSQGQNEKRFIAIRHPGLIVNETPFKSKNAFLARKRDRIYLGGDLLMASFELEKN

SEQ ID NO: 88358 - protein, 69 aa, Unknown
  Obtained from environmental sample
  misc_feature (1)..(69): Xaa is any amino acid
AYITDLGMTGITDSVIGMDLKICQERFNKQVQYQMKTAMSGKPAQINGIIAEIDTDTGKALTVQRIQKD

SEQ ID NO: 88359 - protein, 66 aa, Unknown
  Obtained from environmental sample
  misc_feature (1)..(66): Xaa is any amino acid
SDLDSIVKNTKVKSVALVLGNEETGLPQEVKDQCLHLLRIPGTGNIDSLNVAQSAALFLHAVFELL

SEQ ID NO: 88360 - protein, 297 aa, Unknown
  Obtained from environmental sample
  DOMAIN (1)...(195): Phosphofructokinase
  misc_feature (1)..(297): Xaa is any amino acid
LGSARGGGREVVKIVDTLERLNLNMLFTIGGDGTQRGTLDIADEVEKRRLKIALIGIPKTVDNDFTIIDRSFGFNTAVAKAVEAVSSAHNEASSAINGIGLVKVMGRESGFIAAHTALASHEVNFVLIPEVPFNLEGSNGFLHHLEERLKKRKHAVIVIAEGAMQDMLIKDKKFDAGGNVKMVDVGVYLRNKIIEYFGEKKFEINLKYIDPSYVIRSAQADPDDSIYCERLGNAAAHAAMAGKTKLIIGLVNNEFVHLPIKTVITHRNKIDPESSLWRDTLDAVNQSARMVNVFGQY

SEQ ID NO: 88361 - protein, 369 aa, Unknown
  Obtained from environmental sample
  DOMAIN (216)...(327): PilZ domain
  misc_feature (1)..(369): Xaa is any amino acid
MLLSVFVITIAGSFLALFLLSVTDRDKKGWVQFYAKGKDSGFTFKELELLQRLAVKSKLEDPTTLFFSNRQLDTCIRDLIRSLRISGTENDKVNQDFLSKLYDFRQKIEMEKPKIKHGISNSRQISDGQNLRILAKGYGVFKSQVVKNTSTYLAISRPVSEKLPMNFSWQGLKLSVYFWRDEDAGYVFDTAVEDEVFSKGIASIKIAHSDSLFRTQKRKSVRVKKHKPAYLYPVLSEEEINRIEDSPGIKCFIEDLSDTGCALTIGGRAQSGLRIKAQFHLNNSIICMSGTVRSVEYKEDLNRSLLHVEADPLPIEIRNQILGDVFGMLPEDEEELPFRMLGEEAEEMATEIEPEEEGEELFAADTEVS

SEQ ID NO: 88362 - protein, 382 aa, Unknown
  Obtained from environmental sample
  DOMAIN (317)...(379): CarD-like/TRCF domain
  misc_feature (1)..(382): Xaa is any amino acid
VDLWLENLCLQIDESDLLSLPLTKEADKARIFSGILEEKLKFIQNAAAGSKVVVASAEALKTKLPSAKRLKEKSLNLKVGDILREENLQEIFISRGFREQPVVESVGDFSIRGCVIDINPLLREHPIRMELWGNTLESIRTFDIFTQRSLENLESIEIFPMNLHEENDSFAFDFLKDYLIATEDYYSLPLEFSEELSKHSIVNFSVLNNAKSSNQIMPQARSSSGFEGVEKEITQYSAKGGDVYLLAPSQGQALRLYHLSQGSAAKEILVGHITEGFWCCDNSFAILCENQIFNRFGHLTKKKHKSSSLHNAIFADSLTNGDYVVHEECGVGKFLGLARIEALGAQVDCVMIEYADKARLSFPVGDLHKLEKLVGTKTMVRP

SEQ ID NO: 88363 - protein, 148 aa, Unknown
  Obtained from environmental sample
  DOMAIN (4)...(124): Large-conductance mechanosensitive channel, MscL
  misc_feature (1)..(148): Xaa is any amino acid
MKKFLNEFKQFALKGNVLNLAVGVIIGAAFQGVVSSLTENILSPIIGLLTRQNFDSLMLEVFGITLKYGAFITSIINFIIMAFVVFLLVRTMNKILAIGHEKQEAPVTKKKCNYCFSEIDVNATRCPACTSQLATAPAERVKVTDTKN

SEQ ID NO: 88364 - protein, 180 aa, Unknown
  Obtained from environmental sample
  DOMAIN (37)...(173): Protein of unknown function DUF115
  misc_feature (1)..(180): Xaa is any amino acid
VYGEKVLGLVRESAEFIKRLEAGRRTDAFFGKRWVRNFFRNLALFQNTLMYRKMDIPIVITGSGPSLEAVIPRILALRDNIFIIAASSSLQALAAGGITPDMVISTDGGGWALTHLYSFFRQPLASRPKILALSLCAAVPSQCSGVPLLPMNDGSLWQSMALHAIGFPSVLIPQRGTVTA

SEQ ID NO: 88365 - protein, 76 aa, Unknown
  Obtained from environmental sample
  misc_feature (1)..(76): Xaa is any amino acid
MKDRANVSALPGGNRNSNGNFNNAGNNGNWWTATENGGSNAYNRNMNYNNDNVGESYGDRSNGQSVRCVEDGAPVR

SEQ ID NO: 88366 - protein, 187 aa, Unknown
  Obtained from environmental sample
  misc_feature (1)..(187): Xaa is any amino acid
LLAALLAGALAVSCQNPWIVKITDSLLGEKAGDAFTSIADFAAWLNAQPDNSPDNPYIVKLNVSTLGGDVYSSGSVGFILSNSDGKYVYLDLSGSTFSSIGQAAFYGCASLTGVTIGNSVTVIEQNAFNACGSLTSVRFERDTTTIEGTMTFIDPNNTDSLRNAYTSEGRGTYTRSGMSSSMWAKQP

SEQ ID NO: 88367 - protein, 70 aa, Unknown
  Obtained from environmental sample
  misc_feature (1)..(70): Xaa is any amino acid
MRTDTVLKVEAIDLLLRTFGVLETERFITSIKSNNFDYTEWHKNLWEDKSINEIHNMATEFEKKKHNNIS

SEQ ID NO: 88368 - protein, 199 aa, Unknown
  Obtained from environmental sample
  misc_feature (1)..(199): Xaa is any amino acid
MKGIYRFSAIIIAALIAIPAGYGQSQSSDSGMSVEESYLQEAVDLMIVRETSKQDSQEQKLIALAFIGDLVEQGNTSDELRIELERLSLEGTNVQAREKGRLKNDYPEVRRQAARLLGSFRSDEAKIALLRVCVNDNEPLVLQEAVRSLGNIGIDKDGEAIGTIVWVTNKFTNSTAPDNILAIAAIDAIQKIARNTNGV

SEQ ID NO: 88369 - protein, 216 aa, Unknown
  Obtained from environmental sample
  DOMAIN (17)...(206): Protein export membrane protein
  misc_feature (1)..(216): Xaa is any amino acid
MIRIEDKEGERIKSDEIVKVLKGYFGDGCIAVIRSDYVGSSQSKKLIDQVFYLIPLTLLLILIYLVIRFKIQYAIGGVIAILHDLLVIIAYLVWARMEFNTTSIAAILTILGYSINNTIILFDRVRENIRVYPDNTFTDIMNISLTGILGRSIITTLTTMLAVLMLFIFTTGAMKDFALVLLIGMTSGTYTSLFIASGFVNFWETRKKAEAKKKAA

SEQ ID NO: 88370 - protein, 256 aa, Unknown
  Obtained from environmental sample
  misc_feature (1)..(256): Xaa is any amino acid
INAAEMFYLNGNPEVFTGFGAEALYSTLVHEFQHMINHSQKNPKGLTSGTWYNEMLSMMAEDVISPLIEIDSSHTRHPIKSRIPTFLPNYNLVGITEWDNSLNSYSIAYAFGAYLLRNYGGASLLQEILANDSIDTASITAALNTVGGGGLSFEEALRRFGEALVYSGTIPADVQSFDKTVTKIINGHTYTAAKFNVWTDFGSTKLTTFGVSQQVALRPHSLTVHQDAGWKNKSGNFSVTLRKPNDSNIEFYLMVK

SEQ ID NO: 88371 - protein, 677 aa, Unknown
  Obtained from environmental sample
  DOMAIN (18)...(524): RecF/RecN/SMC N terminal domain
  misc_feature (1)..(677): Xaa is any amino acid
MAFVQFSKVSLAFGDRDILKDVSLHLAAGSRACLAGANGSGKSTLMKVLAGELLPDSGDRAVQRGTRISYLPQSGIVHRGKSLRDEAETAFAHIHELIDKAEKIAAALQDAKSDDASSKALLEDHHRLQEQIENSGYYSRSAEISSVLAGFGFSPNDLDRDTGEFSGGWQMRIALAKALLERPDILLLDEPTNYLDIEARGWLENWLAKFPGGCLLVSHDRYFLDVTVNEVYEIFQGNLKRYAGNYSAYEKTRQQELAGLMKRYTEQQEEIAKTEALIRRFRYKASKAAFAQELIKRLEKMERIEIPENLKKINITFPPPPHSPRVALAIEGLGKSYGAKKVLHGLDLTIDSGERLVVAGPNGAGKTTLLRILAGNDNDFEGSVKFGSGISAGYFSQDAAEVLNGSEQVLAFMEANAPTALIPKIRDMLGAFLFRGDDVYKPVSVLSGGEKSRLALLYMLLKPLNLLILDEPTNHLDLHSKDVLLETLNQFKGTIIFVSHDRAFMEALSTKTLELSPGEGASSSRTRLFYGNYGYYLEKIGNGEWGVGSGVLGSGTGVKQKSDEQNRELGTGNSGRGDNKTSGSNGNDIQKSAMEQRAQNKQRQAEIRRLQRQEAELLNAIDGLENEKSRLEAELSLPAVYSNGEKARAVKQKLDECTAALKAKTAEWEAVAALITM

SEQ ID NO: 88372 - protein, 399 aa, Unknown
  Obtained from environmental sample
  DOMAIN (2)...(118): Histidine kinase-, DNA gyrase B-, and HSP90-like ATPase
  misc_feature (1)..(399): Xaa is any amino acid
VGDDQRLAQVITNLLGNAVKFTPEKGSVSLAVRLIQQANNICTLQFSVSDTGIGMTPEQQTKIFHSFEQAESSTTRKYGGTGLGLAISKSIVEMMGGKIWVESESGKGSTFIFTIQVMRGTEEKHGLLAPDINLKNVRVLTVDDDPDILTYFMDIAQRFGLSCDTASSGKKALELIGQKNGYHIYFIDWKMPGMDGIQLAREIKEHGSEKSIVIMISAAEWSAVAEEAKAAGVDKFLSKPLFPSTIAEVINECLGVDKKQAEKSKAAEIAGIFAGRRILLVEDVEINREIILTLLEPTKLEIDYAENGVEAVRMFTEAPRRYEMIFMDIQMPEMDGYEATRRIRALDIPEAKTIPIVAMTANVFKEDIEKCLDSGMNSHVGKPVDIDEVLNSLRKYLSG

SEQ ID NO: 88373 - protein, 625 aa, Unknown
  Obtained from environmental sample
  DOMAIN (558)...(625): Histidine kinase-, DNA gyrase B-, and HSP90-like ATPase
  misc_feature (1)..(625): Xaa is any amino acid
NLGAFAEEIRAQTIELYELASAIEERSSSNASLIADQSKMLLVVIIVVSVAISAILALLIASLIAKPIKNMTEVANNVAEGNLNVNIDTSAKDETGMLAKSFANIVNVVNLLTTDLKDLSNHFHADVKLDAAHFSGAYGEVVESINSFVAAALSAQESAMHTVSAMFESNSHINLLFDDTLNLIDCNPEAVNFLGFNTKQELLDGFDDFIIRAVPSVFSNGQRAQTLAQRLMTAADEGMVKFETELHFDDDIRRLSVDFRKIPYKGSFAVLAYIFDMTEIFRREMQLERSKELNELQLAKLNLVVQASKIGLWDMEVVRDDPINPNNTFVWSDEFRHMLGYTDENDFPNILCSWSDLLHPDDKEVTLNAFAKHMLDKTGKTHYDVEYRLLRKTGEYAYYRASGESIRDSEGNAIRVAGALMDITDTKNMLLVKDRQREEAEAANRAKSTFLSTMSHEIRTPMNAIIGMTTIGKGAKEINQKDYALDKIGDASSHLLGVINDVLDMAKIEASKLELASVEYDFEKVLQKTLTIIHFRVDEKRQKLTANVDTNIPRFLVGDDQRLAQVITNLLSNAVKFTPEGGNIHLAASLLNETDGKCEVRIEVADSGIGISPAQQKRLLTLLNR

SEQ ID NO: 88374 - protein, 429 aa, Unknown
  Obtained from environmental sample
  misc_feature (1)..(429): Xaa is any amino acid
VPREEGPIERPIETYNLNAKDINRVLQNVAGLQTSGKTELGGRRGSADGGFNDGYAEGGSGGLDGMLGGLMGGSGARREAPSRSGNRKKEGAGGKPRGKGQYMPEGERGELRMLTARTKEGEQPTITIKSIKKDNEYLSKLTGDVTEDYQIYLKLRTDYANSPTFYFDMADWFYKNNDRETALRILTSIADLELENASLYKLLGYRFKEYREHVLEKFVCKKVIQWRPMEPQSYRDYALALADNGEDQAALNWLYGLLTKTYSANIRSRSGGIEEVVVMEINRLIAKNANLNTSKVYKRLIANMPVDVRVVINWNMNSTDIDLYVTDPNNEECYYRNRKTSIGGRISADNTNGYGPEQFLLKKAVKGKYRIYVNYYGDRQVTGAGPSTVMAEIYTKYADKTERRQVVCLQMSNAKTIDSKYVEVANFEF

SEQ ID NO: 88375 - protein, 205 aa, Unknown
  Obtained from environmental sample
  DOMAIN (23)...(197): yrdC domain
  misc_feature (1)..(205): Xaa is any amino acid
MMTVYEVHPVNPQKRSMESAARVLSAEGGIAVYPTDSVYGLGACVTNPRGIDRIAQLLEKDKNRPFSFICGDFSQISRYVRLSNAHYRLMKRFLPGPYTFILNATNLVPKRIAPKRRTVGIRMPDSIVALELVRLLGEPLANTSVNISGEPMNDPDEIKEKLRHEADVMLDAGPLNDPEPSTVVDLTGDEPVLVRLGKGRWDDEG

SEQ ID NO: 88376 - protein, 500 aa, Unknown
  Obtained from environmental sample
  DOMAIN (38)...(154): Vault protein inter-alpha-trypsin
  misc_feature (1)..(500): Xaa is any amino acid
DTQNDVVLDTALPDTVASDTILPQAKLPVLNIDGKENPDVYLQSLDIQVEVSGNIASTRYTMVFKNRTDRILEGELTFPLPDGRTVTHYALDINGKMRDAVPVEKARATEVFEEIEQRQVDPGLLEMVEGNNFRTRIYPIPAGGTRTISIGYEEELTLERGLLYYRLPMAYPDSLKKFAVKATVWKGDLKPLVPKSDDELRFDIAGESYVAAFSHENYRPSRALIFALPAPADIPQVMMQPAQGSYYFFASVAPRMEMRKKQWSSDLAIIWDVSLSGSQRDLQREMEMLNMLFAENKDANVHLYFLNNTFKKIAKGNWKKSKSILEKAVYDGGTDFSKINLKDIEGDEILFFSDGISTLSNADFIGNAKVNRPIHSIVSSSKADYSTMKLIAGKTKGKFVNVNALSSGKLKDELMNETLQFLGTEHGNALREVYPSIATPVQGNFSVAGISETNDAELTLLFGFGNKVEKRLKVKLDAKNASNQGNVYRIWAQKKLRNWI

SEQ ID NO: 88377 - protein, 496 aa, Unknown
  Obtained from environmental sample
  misc_feature (1)..(496): Xaa is any amino acid
DKTAHDELLLNDRKKKEVEDAFTATVKEIRALQSQPSNIPADMLDLRDKIASAIGISSAALPFAGELIEVKQDESQWQGAIERVLRGFALSLLVDERHYLALSNYINNTHLGKRLFYYRTARHTDSWQNKPVPSDSLFFKLKIKDGNYTEWLNTELRQRFNYSCVESVQAFKTAERAITCEGLIKHNKTRHEKNDLYAVDDRKNWVLGFDNSEKLSLFQQQSQELAEEISTLDAKINSLSEQNSKNTKRALQCQTLVNIQWQEIDVLSSIEKISVIERQIHEIRDGNKELREISERINEQKSIASLSEKELIEAKSKYSSTIIQINKSNDELNEKQNDLSIVPLTPFQKEGLDGYYARFTDNIRLDNLDKTTRSVIQELNKESEEVNSNIAECKNEIEKFFVDFKRNWPMEAGDLDATLSGAPDFFSKLNRLETDGLPKHEQRFFDLLQNQSYQNLTALNAHLTNARKTIMERMDLVNDSLSKVPFNQSENRNTYL

SEQ ID NO: 88378 - protein, 115 aa, Unknown
  Obtained from environmental sample
  misc_feature (1)..(115): Xaa is any amino acid
RQQLAQAESHGEQAAVSKDEIVENLSIYERTGSTDKAGFDKRVHASIEKIKKNYILQKIRGSDDRFEVSPTLKLLFSAEEIQALTIIYQRIASDGLQEHGDALQEEEDYKPEEEE

SEQ ID NO: 88379 - protein, 168 aa, Unknown
  Obtained from environmental sample
  DOMAIN (4)...(126): Rubrerythrin
  misc_feature (1)..(168): Xaa is any amino acid
MNDKLLATALKVQRKEITEYHVYTKLAGFCKDPHNADILRSVGEEEKRHALYWQGKTGVDVKPSRFNVFWSVLKARVLGLTFTLKQMEKNEGTASRNYMELVKGFPEAENIARDEAVHENKLLNMLDEERLHYAGSVVLGLNDALVELTGSLAGFTLALGSTRLISIA

SEQ ID NO: 88380 - protein, 98 aa, Unknown
  Obtained from environmental sample
  misc_feature (1)..(98): Xaa is any amino acid
MNIFESIMLICFGFAWPLSIYKSFVSKKTAGKSLLFLIVLQIGYVAGILFKLTEYRSNLKINPDETISINLYLYILNFIMITVDELLYLRNRKLEAIK

SEQ ID NO: 88381 - protein, 292 aa, Unknown
  Obtained from environmental sample
  DOMAIN (19)...(292): Putative modulator of DNA gyrase
  misc_feature (1)..(292): Xaa is any amino acid
MEVYMFSDLLSPHKASFKDYTELRAQVNTTRAVTFLAGNMVTNTQNSIGGVSARVYRGGTYGFASGAEYSDESIKNVLAAAAKNAAFMNTHVNKGLEPLPTVAPGKVGLKKDLSEDVEQSVLIEFAKALDSLLVERYKNLSSRVVTVNCLDIEKLLAVSDGADSHFYQPRSFVYVQMSVETDDKMPVELFYPIGGFGRFSDLFSDPALLTEKLDKQYEQLMQKREGVYSSAGLRKCVLGPELAGMLAHEAIGHTVEADLVLGGSIAGNYMGKQIASELYQWWILRTPLLASH

SEQ ID NO: 88382 - protein, 132 aa, Unknown
  Obtained from environmental sample
  DOMAIN (1)...(132): RNA pseudouridylate synthase
  misc_feature (1)..(132): Xaa is any amino acid
IAVNKPAGLEFHGQNSLDDIVRSFLTDKLPPSLSFKPGPLHRLDKPSSGIVVFSTSIEGARLFSSLMRDRKIRKTYLAVVEGTVKGEEFWQDDLFRDKEKKKTFVSHTAGGGKNAVTKVTPLAFDGNYTLIK

SEQ ID NO: 88383 - protein, 394 aa, Unknown
  Obtained from environmental sample
  DOMAIN (336)...(394): His Kinase A (phosphoacceptor) domain
  misc_feature (1)..(394): Xaa is any amino acid
MKNILRKNYVFVATAILIVSAYFISGVLIYANKQYNAINRENMEEAVNIIKRFTPPEVFTDNDAAAQWIARLDVSGQYRITLINRNGQVIFDTEADSANIENHLDRPEFQAAVKDGIGFAIRRSATLGKHYLYTAAAINDPAGNFTGVLRFSRLIPDFFTRLLSSTFPFLVFGFLIILGICLSLYHFTKYQSHLVQVNLNAELEKKTAELNQIIEKAEAETRHREFILNSMFDGVLTLDNKLNVIHANQRLCSLFDANGEYRNVSLIEFSHSAELEDAAKIVLSTGRSYEFTLKRYNGKLQQFQGFAAPLDIGSLTPPGIVMVLGDISRLVKLEQIRKDFAANVSHELRTPIQVIQGFAENIINSPPDDYKQILHFAEIIRKNARAMDDLTSDL

SEQ ID NO: 88384 - protein, 233 aa, Unknown
  Obtained from environmental sample
  DOMAIN (157)...(230): Transcriptional regulatory protein, C terminal
  misc_feature (1)..(233): Xaa is any amino acid
LSAERILIIEDDPEIREMLKFAFIREGWQLNMVSTGEEGLKIIESKETDCIILDIMLPGMDGLKTLKKIRENIKFQTLPVILCTARGEESDIIAGLELGADDYVVKPYSPRILAARIRAALRRNENAKTQSEGSQNKTLRYGKINLDIERHTVHLDKKPLDLFPTEFALLVQFMSNPDIVFSRQRLITAIRGNDYPVTDRSIDVQIMGLRKKLGDSGDMIETIRGIGYRFKTE

SEQ ID NO: 88385 - protein, 336 aa, Unknown
  Obtained from environmental sample
  misc_feature (1)..(336): Xaa is any amino acid
MAMLIAWQVCNKVSYPHDKRFSKNVFIVAPGITVRDRLKVLLPGGGSNYYIDFDVVPTSLIDKLYKGNVIINNWQALAWDDEEAIKKKKSVDKRGPKSDEAYARQVLGSMANSQNILVINDEAHHAWRKNPEIKGKYEGLDKKEEQEATIWVSGLDRIHKARKILTCYDFSATPFAPSGKKNESEALFPWIVSDFGLNDGIESGLVKTPRMVVRDDNTPNARNFRSKLNHIYADETVKDNINQPAESTVPLPDLIIQAYNLLGSDWLETYKKWEKNGMDVPPVMITVANRTETSSRIEHAFKSEKILIKELCDPEYLRRIDSKIMEQAVAGNISVD

SEQ ID NO: 88386 - protein, 450 aa, Unknown
  Obtained from environmental sample
  DOMAIN (33)...(396): Glycosyl hydrolases family 28
  misc_feature (1)..(450): Xaa is any amino acid
MTEYDIVSFGGIGDGVYDNSNAFQAALNTIKEAGGGVLRVGEGTWRTGPIEIYSHTTLVLDEGAVISLISEPARYPPVLTRWEGLECYAMHPCVFATGQEDIVIRGKGIIEGNGQYWWNKIREKNIGGQRQPQSPEELALSALNPGYENQPSGGGGRKNQFLRPPLVQFYNCSKMRLEGITLRNSPFWTLHPVYCTGIVISALSIINPPDAPNTDGMDIDSCEDVLIENCHISVGDDAIALKSGSGEDAVRAGRPSRRVTVRDCKVESGHGGIVIGSETAGGISEVLAENCLFRGTDRGIRIKTRRGRGGTVQDLEFRKLTMENNLCPLAINMYYRCGASLEDGYFSTEALPVSATTPAIRNIRIADIKATGCRASAGFIAGLPESPIEKISVTRCEFSTNERSGVSPDESDMFLGLPQVSEKSIRLLNVKDVQFSEVKVSGPAEAFIYR

SEQ ID NO: 88387 - protein, 179 aa, Unknown
  Obtained from environmental sample
  misc_feature (1)..(179): Xaa is any amino acid
RQYNLERARQLLAEAGYPNGIDIEATVRESNSAWVEIYQIFQEQYKLANIRLTIDRVDAAGWTQKRSSGHVQYYMMNWYADFLDPDNYLFSIYHSGTANFFSTGFRDKYFDEQLAIGRTLQLSEKQKFYSELESYLLNEKIAGWPLYTPTGYILRSNRVKDVYIKKDFLFTFEIGYLVE

SEQ ID NO: 88388 - protein, 181 aa, Unknown
  Obtained from environmental sample
  misc_feature (1)..(181): Xaa is any amino acid
MAKYILIRLAQAALVLLLATIVTFGLVIVAPGDPVLLMLQKRADDATIVRVRHELGLDKPLLVQYTDFLYKAVHFDFGKSYSNKIPVKELVMQAFPVTLKLGLFSLLFAAVFGITVGTISAVFRGKIIDKIIMLLAIFQISAPVFWFAMLLQILFGLNLRLLPVSGMSHPLWMVLPVTVLG

SEQ ID NO: 88389 - protein, 79 aa, Unknown
  Obtained from environmental sample
  misc_feature (1)..(79): Xaa is any amino acid
MFTTIITPRFGDIDALGHVNNIVSAGWFELARNHVIKIFNPAMEIKREAFPLILVHSDYDFMGQLYFNHDVEVRTWITK

SEQ ID NO: 88390 - protein, 508 aa, Unknown
  Obtained from environmental sample
  DOMAIN (164)...(330): RNA polymerase Rpb1, domain 3
  misc_feature (1)..(508): Xaa is any amino acid
SISDMLKGKQGRSGQTFFGKRVIYSGRSVITVGPDLKMWQCGIPTKMALELFKPFIMKKLVDKDVVFNIKKAKMLVEQETPEVFAILDEVVKEHPVLLNRAPTLHRLGIQAFEPVLVEGKSIKLHPLVCHAFNADFDGDQMAVHVPLTQAAQMECWTLMLSARNLLNPANGKTIVFPSQDMVLGINFLTRIKKNAKRPGSLKPETKDKIPYYSCAEEVLMAVDRKALDWEAAIRIKPTKFPVWDKAGNEAEIKSDGTIITSAGRLVFNEEMPERIPFINYELKDKELRALIEHIFDGKGSWTTVKMLDAIKATGYRYATVFGATIGIDDIVVPKEKTEMIEKANREVENIQTQWRKGIMTQEERYNKVVEVWTKTNEDLTNIMMKTLEADRDGFNSVYMMANSGARGSRNQIRQLAGMRGLMAKPSGDIIELPIRSNFKEGLSVIEFFISTNGARKGLADTALKTAEAGYLTRRLVDIAQDVVVNEDDCGTINGIAYSAIKDGEDIVS

SEQ ID NO: 88391 - protein, 170 aa, Unknown
  Obtained from environmental sample
  DOMAIN (45)...(170): Phosphoglucomutase/phosphomannomutase, alpha/beta/alpha domain I
  misc_feature (1)..(170): Xaa is any amino acid
MDAKAIIERAKDYVSGERDEGFRAEVEKLLAGGNDKELEDRFYRDLEFGTGGLRGVIGGGYNRMNTLVVKSATQGLAAYLIKAFPDKAKAGKLSAAIAFDSRHYSAEFALSAALVLGANGIKTWLFSGLRPTPELSFAIRYLGCDTGIVVTASHNPPQYNGYKAYGTTAP

SEQ ID NO: 88392 - protein, 257 aa, Unknown
  Obtained from environmental sample
  DOMAIN (63)...(166): Methyltransferase domain
  misc_feature (1)..(257): Xaa is any amino acid
VKRDAERVPRQAVFSRICSSAGAPEKPPVCEKWREGFSPSGGRIEQGTDNKPQTPDPGPRSLLDIGCAYGAFLAAAKEEGFSPQGIDPAEDAVRYVTQTLNIPAQQGYFPLPTPDSRFPTPYSSFLLPPSSFEVITLWYVIEHFRDCVPALAEIRKLLKPGGVLAFATPSFAGISGRSSLKRFLENSPQDHWTVWSPAVCGKALEKAGFKVKKIVSSGHHPERFPFFGKFAHNRDSLLYRLLLVISKIFALGDTLKC

SEQ ID NO: 88393 - protein, 269 aa, Unknown
  Obtained from environmental sample
  misc_feature (1)..(269): Xaa is any amino acid
LAFLARGRSAELPLLADFSPQILRFTDKGRVLGEVVIRYQFLGREREAVRSVILATNNRNMVTEGDAAAFAAFISPTSPETVEYGKFIAGLARNDRRNGHNQNLQYAIWLLEGLRAGGIILGSTYADKTEAQFPAETLAYKIGNARDLALLFAGCLESVGIPAAFVQMEDDFLVAVSMNANTSAAETLFNGTGKILIVDDRVWLPLSMTAFNEGFTAAWTRGVKVLDENFNAGKQVDFAMVEEAWTVYPPAPLLEQGGRVIRTDAAAAA

SEQ ID NO: 88394 - protein, 258 aa, Unknown
  Obtained from environmental sample
  misc_feature (1)..(258): Xaa is any amino acid
MAKTSRKNSFIRVALVAFAVSSLLFLTSLDNKFFDLFLRFLPSLTENEKVFILTLDDDSISYAGGFPFRREVMADVVVLLKELGVQTIAFDLSYLDESPYRLDPAYAADVFGRYLDTNFARLNEASTTVIDRIGPATSRSERELYKQDMENLHRSVRGELETSLSLLTRDVDEYFAQAIAFSGCSWLTLTMIRPEEIFEGVEITANDEIDQYLANYIALENITDTGDSKTRDMAAVMPAIQKLLSRAKGAGFVNASPD

SEQ ID NO: 88395 - protein, 231 aa, Unknown
  Obtained from environmental sample
  DOMAIN (1)...(231): TatD related DNase
  misc_feature (1)..(231): Xaa is any amino acid
MICASSAAVLEEFEYCERLSNQAKADNAAPLLPCFAVHPQMPLVMGSQNLIEESLSALDTLAAQKRLCAVGETGFDLYNIAFKETEKIQDELFEVHLETALRYDLPLVIHSRRAMHKVFAFSSKLKKCKAVVFHSWSGTAGEGEALLKRGVNAFFSFGAAIMLNHREAMRCCAAFPPTSLLTETDAPFQPPRGREFSCYADIKAVLGTMEALRGQTEMEKIIETNFRAAFC

SEQ ID NO: 88396 - protein, 300 aa, Unknown
  Obtained from environmental sample
  DOMAIN (3)...(297): Dihydrodipicolinate synthetase family
  misc_feature (1)..(300): Xaa is any amino acid
MTGFRGAYTALITPMTESGEIDYEGFRRLIQFQITEGIDGIVPLGTTGENPTLDEDEEDKLIEIAVKESAGKIKVIVGAGSNDTKHMVKYVERAKKFGADAALVVTPYYNKPNDSGMLRHFEAAAKPGIPIIVYNIASRTGKNIPTPLMKEIAKIPGIIGVKESSGDINQMGDVIREIAMPRKNSQDKFWVLSGDDSMTLPLISMGGEGVISVVSNLLPAKVKAMTKAALDGDFEKARAIHFELLPFIKAAFIETNPAPIKQALNWAGLPAGPARLPLGKLAPASEAVLKKAMIDLGFKV

SEQ ID NO: 88397 - protein, 84 aa, Unknown
  Obtained from environmental sample
  misc_feature (1)..(84): Xaa is any amino acid
MVMLILQVGRMLSLGFEKVLLLYTPANSRTSDILDTMVYRTGLAGGMPNYSYATAIGLFSSVIGLILVTSANFASKKLTGESVY

SEQ ID NO: 88398 - protein, 281 aa, Unknown
  Obtained from environmental sample
  DOMAIN (18)...(241): Xylose isomerase-like TIM barrel
  misc_feature (1)..(281): Xaa is any amino acid
MKYIGPHVSATGGVHNAPINANAVGATGFGMFVKNQRQWKAKPLDPDVIDAFKSNMNLYGYKPESVLVHDGYLINIGNPDTAKREQSVTALIDEVERCAALGLTRLNIHPGSGLGIITTDECAAVIAESINKILDKTKNSGVAIIIEATAGQGNLLGGRFEELAMIIDKIEDKSRIGVCIDTCHIFAAGYDIRDKQNYEKTMASFDSIVGFKYIRGLHLNDAKAAIGTHTDRHESIGKGHIGIDAFRMLMEDSRFDGIPCILETPNEEIWGDEVEMLKKWI

SEQ ID NO: 88399 - protein, 97 aa, Unknown
  Obtained from environmental sample
  DOMAIN (34)...(94): KH domain
  misc_feature (1)..(97): Xaa is any amino acid
GKQIILNTREEVPHAVFVEIESYKETAQKHEIVAGIHVETIGQKGIIIGSGGALIEKIKRFARKDIERLVGMRVSLKLHVKVTPGWRDDNNFLRMMQ

SEQ ID NO: 88400 - protein, 137 aa, Unknown
  Obtained from environmental sample
  DOMAIN (1)...(104): GTPase of unknown function
  misc_feature (1)..(137): Xaa is any amino acid
MNTVLQEQISIATSLPQTTRRNIRGIYTSPDMQLVFIDTPGMHKGRHALNDVMREQAVSAVSSGMDLVCYLVDLSRDFGDEERDCAECVTELSVPVLIVFNKIDICENPDARIRSFLSTYKQFEKSPYIKLSATAPK

SEQ ID NO: 88401 - protein, 569 aa, Unknown
  Obtained from environmental sample
  DOMAIN (351)...(536): ATPase family associated with various cellular activities (AAA)
  misc_feature (1)..(569): Xaa is any amino acid
MNTLKNNAWLFFRKLLSEGKKVSECNDILGSLEEIVGISKKHGIDKCLTLGKANLDFVAEKLGISPLQAVLFSHFMERSALPKIILSEIADSLKCSKIRVIKYLNECEELEKKKLIRCIRDRDDDCISFRVPRNVKTALGKNIAFKPEKNENISIDKFFTVLEELFDDRGNGELTYDSLKTELLELINMNMHLLLCKKIMSYGLNEDDLVLLSLFCFLFYEDRDDHILFSDLYFLYDDKTDAKYVERNLSDGSHILIENKHVEFVNDNGFVDNEAWKLSDMAKKELLCELKIEKKNDHKNIILHKTIQSKKLFYNEKESESIQKLISLLKEENYRKVQGRLSENGMRKGFACLFSGTPGTGKTETAYQIARETGRNIMMIDISNTKSCWFGQSEKKIKEVFDNYRNAVENSELAPILLLNEADAVIGKRKEFDGSRGAVDQTENAIQNIILQEMENLSGIMIATTNLTRNMDNAFERRFLYKIEFAKPCLEARQSIWQSMMPSLSSDDTEKLASRYDLSGGQIENIARKVEVDLVINGGEVSLDTLARHCMDESSNQFNAVKRIGFAHE

SEQ ID NO: 88402 - protein, 339 aa, Unknown
  Obtained from environmental sample
  DOMAIN (31)...(317): Protein kinase domain
  misc_feature (1)..(339): Xaa is any amino acid
MAELRAGDTLETTIGFKKVTVKRPKSKKPGEGDELGDGGQGWVYLVDYGDKPMALKWYKPGVLKNPGKFYANLQNNIKKGAPTKSFLWPLDLVKKGDDFGYIMELRPPDYKDFSHILLGKELVNDQIVKLRWPGISPKVTAALNITAGFRALHSNGYNYQDLNDGNFFINLSDPAKYGDVLICDNDNVAAHPSGIAGKARYMAPEVVLGSDPDNKTDAFSLAVVLFMLFVNNHPLEGKAVLEADPWNDEAEKKFYGKDPVFILDPYDKSNAPVPGIHQGAVKRWPFLPQYIKDLFLKAFSKEAMKDKAYRVLERDWIQAFVRMRGEIWKCPLWREVYIA

SEQ ID NO: 88403 - protein, 280 aa, Unknown
  Obtained from environmental sample
  DOMAIN (19)...(247): Xylose isomerase-like TIM barrel
  misc_feature (1)..(280): Xaa is any amino acid
MKLGVMTVLLGGKTADEAFSYLSSLKKVQTVEIGTGGFPGTAHLNPKEFLADSGSAAAYKEMLKRYNLEISALSTHSNHVHPQKEIAVKAHEDFINTCKVAEKLNVDTVVTFSGCPGDHEGAKYPNWVTCSWPEDFTRVLDYQWNEVLIPYWKSAVKEAANYGVKKIALEMHPGFCVYNPSSLLKLRAAIGDAIGANFDPSHLFWQGIKPAEAVRALKGAIYHFHAKDTKMNTANININGVLDTGHYGNILDRSWVFRTVGYGHDYNEWKDIISTLAAVG

SEQ ID NO: 88404 - protein, 109 aa, Unknown
  Obtained from environmental sample
  misc_feature (1)..(109): Xaa is any amino acid
MQKLLAVFVVLLFALVGLGAGSLFYAYKQWEKISPLKEPVLLEIPKGYGAEQIGRLLQKNGVIESAKSFKWWCSFHPGNANFKTGWYKIPAGQNIEQLVNLLSSGKTAS

SEQ ID NO: 88405 - protein, 396 aa, Unknown
  Obtained from environmental sample
  DOMAIN (1)...(244): Respiratory-chain NADH dehydrogenase 51 Kd subunit
  misc_feature (1)..(396): Xaa is any amino acid
VIDLVQRSGLRGRGGAGFPTGMKWSFVPRGNKPVYIAVNADEGEPGTFKDHFLMREDPHRLIEGLIIAGWALGARNAYIYVRGEFLPAIEALTQAIREAYEAKLLGKNIGGTKYSLDIAVHRGAGAYVCGEETALINSLEGQKGQPRLKPPFPAVNGAWNMPTCVNNVETIMALPWILENGPEEYQKLGTPKAGGTKVFCISGDVKKRGVYEARLGIPLMELLESEEYCGGIVGNLKGCIPGGSSTQVLTVEECKKANMDYESLAAMGTMFGSGAVMPFNDTRSIVQMLNTLGKFYSHESCGQCTPCREGTGYVQRIISCIANGQGKDGDLELLDSLCKGFTGTTVCPLAAALAAPVQSYLQKFRSEFEEAILNNPEHTSPRLNENYRPQGWWENK

SEQ ID NO: 88406 - protein, 435 aa, Unknown
  Obtained from environmental sample
  DOMAIN (123)...(349): Methyl-accepting chemotaxis protein (MCP) signaling domain
  misc_feature (1)..(435): Xaa is any amino acid
MTVRVGLERRDEIGMLSKALDSLSARLQTIFKNLRHNSDTLAGSAAELTHISRQLAGGAEETASKTVNVSGSIEQVSANVRDIAGTAEESATSVVNVTSVVEKVAGNINAIASNAEQASVNASEVAGATEEMSTNISTIAAAVEEMSASINQISVNAEDARKVANEATSRAREATSTMGKLGAAAKEIGQVTDVIKKIADKTNLLALNATIEAASAGEAGKGFAVVAGEIKELANQSAQSADDIAMRIEGIQSGTNKAVTVIKDVSQIIEKINEGVDAISKNVKQQTKASDEIARNVAQANSGAKRVAGAIGEVASGSKDIAKNAGQASVNAKRVSDSIVEVAKGSKDIARNAGEAAKGVDRVSKSVNEVATGSKDIARNAGEAARGASNVSSNVVGMNRAAKESSQEVSRVKQNADKLSQMAGQLRTAMDKFKV

SEQ ID NO: 88407 - protein, 536 aa, Unknown
  Obtained from environmental sample
  DOMAIN (89)...(233): GAF domain
  misc_feature (1)..(536): Xaa is any amino acid
GCAETFGFASIFVAPVFIDNVSWGLVLFADRNNERFFDNESAEMMRSAAFLFVNAITHDEMEREAKYRDHLLRAANQAATFLLNSDIESFESNLLQSMKVMSEAVKANRMYIWKNYTVDGRLHCKQLYEWSETAAPQKGKEFTLGLSYSDNSPGWEKILSSGKCINNLVRNMPLEEQKVLIPQGIVSILVVPVFKNDQFWGFVGFDDCYNERIFTEDEETILRSGSLLFTHALFRNEMTLNLRNTSVKLESALEQATAASRAKSDFLSTMSHEMRTPMNAIIGMTSIGKGSSDMDRKNYAFGKIEDASSHLLGIINDILDMSKIEAGKFELSFVEFNFEKMLKKVSDVIAFRMDEKKQQFFVRIDRNIPVTFIGDDQRLAQVITNLLSNAVKFTPEGGRITLDALFVEEKNSIVTLRVEVRDTGIGISTEQQSRLFNTFQQAEGGTTRKFGGTGLGLAISKRIVEMMDGQIWIESELGKGAAFIFTIKLEKTQSDTRHIPSRSISMANIRALAVDDLPEVLEYFKEIAQRLKFHCD

SEQ ID NO: 88408 - protein, 375 aa, Unknown
  Obtained from environmental sample
  misc_feature (1)..(375): Xaa is any amino acid
LTITNESSYDIEGVKWSNGNADFGSIKIAGSVEVPVDTGSGYVFFTRVSDKLNVRTEYVSVKQGERKKYIIADTTIVVELGYGDNKKPLGTIKTANPNPSSSSVAKSSSSAGVSSSSSSSLAQSSSSVAVSSSSVLPSSSSSVPPSSSSLAQSSSSAVVVSSSSKPSSSSSVTPSSSSVGCTAANNTSTQYCSNGTMKNYGSLTYQGQTYKTVVIGTQTWMAENLNYNTNTTGSKCYNNDETNCTKYGRLYNWETAMTVCPSGWHLPSDSEWDALIVAVGGSLIAGKKLKADSPLWDNNGKGTDDFGFAALPGGYFSSNGRFEAINISCNLWVSTEYQDNPNYANFRLIGRSGNDVISADILKSWYYSVRCVQDD

SEQ ID NO: 88409 - protein, 69 aa, Unknown
  Obtained from environmental sample
  misc_feature (1)..(69): Xaa is any amino acid
MRKEYDFAKMKGKPNPYAKLLKKRLTINVSTQIIDYFKTIETSSGIPYQSLICSYLADCAMQKRKIAWG

SEQ ID NO: 88410 - protein, 113 aa, Unknown
  Obtained from environmental sample
  misc_feature (1)..(113): Xaa is any amino acid
AIDGSEGSRAVPVEFRDFETGANYRASLVSYVEGLGANLKSSFFINLERTARDGSKKSYTVGNPQIKRSFVASYIIRKVMITPHDGSMIFLIEMKRQEGGDNNIRYMVEALRL

SEQ ID NO: 88411 - protein, 479 aa, Unknown
  Obtained from environmental sample
  DOMAIN (215)...(435): Methyl-accepting chemotaxis protein (MCP) signaling domain
  misc_feature (1)..(479): Xaa is any amino acid
AFWNEVSHFADVIINGKAATSVRYSPGAKKDILYIFEPVIMSGFETTPWSLSLGIPVEDINRPINTMIRFVIVFVFILLALAVVITLLVANGIVKPILGVTATLKDISEGEGDLTRTVAITSKDEVGDLAAYFNKTLGKIKDLVLIIKKQAHMLSDIGNDLSSNMTETAAAVNQITANIQSIKSRVINQSASVTETNATMEQVIANINKLNGHVENQSRNVSQASSAIEEMVANISSVTNTLVNNAANVTALKEASEIGKTGLQEVASDIQEISRESEGLLEINSVMENIASQTNLLSMNAAIEAAHAGEAGKGFAVVADEIRKLAESSGEQSKTIGTVLKKIAESIKKITKSTENVLTKFEAIDSSVKTVTEQEENILKAMEEQGTGSKQVLKSVGDLNEITRHVKSGSDEMLDGAKEVIQESTNLEKATQEITGGINEMASGAEQINVAVNHVNEISNKNHQGIEALIREVSRFKVA

SEQ ID NO: 88412 - protein, 595 aa, Unknown
  Obtained from environmental sample
  misc_feature (1)..(595): Xaa is any amino acid
LFGIWAVDAIGQCYIGRHATGTMGNYNTRTVNSGAAFRQSLYDFPCPVTLGKNTPSFGLHRYKQGLRFVPTDDEGFTLRGDKQRLVYKGRRRSHRFTILGDTAFEYDCILEREPESNVISLRMEGAENFDFFRQPDFVKEPFLKGSYAVYKKEKLVGEGTGKLCHIHRPEIIDARGRRCWGDLFVVGNELRITIPENWLAEAKYPVIVDPTIGSSSIGSQITRVDPNNNGYDRPKLDNEFALTKYLVPQTGSGSCNAYVYTYDDDCDWALRPCIYTNVNNKPYARKSRNENIIDVTVYPPKWPVGWKTNTFRINGSITAGDYVWFGGWAHYFWTRFDYGGDCYKGQFSDLYEDYLEEYGLDPYIVFHSWVVYCNIIWSWYFTYNASSGQSYVRTLTQGVSLPDNRILTGNYKRNLIQTASNSSSLNRLPLFFRNVAETIKATMSNGNSRSISRQCKENVNANSETDRNFNAIRKAQDTLNGIDNHSFTFFYVRSVPDIVLAGHNFGYSRGFLRGLMDYAGSIAQTVCRAGYYRNNSETVQTTGAVFRGLLIFARIVTKVFIRDYFLGRFLKSKAELPIKSCVCREITLESRITER

SEQ ID NO: 88413 - protein, 247 aa, Unknown
  Obtained from environmental sample
  DOMAIN (17)...(221): 60Kd inner membrane protein
  misc_feature (1)..(247): Xaa is any amino acid
LEKVLKWLLQIFHKVIPNYGVAIILVTLVVRLLMFPLTKKGSESTLRMQALSPKIKEIQAKYKDNPQKMNAEMAELYKKEGYNPLSGCLPMIIQIPIFFAMYNLFNNHFDLRGAMFIPGWIPDLSAPEAIYNFPDGFKLPILGWTAIRLLPFIYVGSQLLYGKVTQTPDQQGNSQMKFMLYVMPIAFFFILYDVPSGLLIYWIMSNVLTLVQQVIINKFILKKKAVAAEAEPKLVIAPNIPRKKKKK

SEQ ID NO: 88414 - protein, 83 aa, Unknown
  Obtained from environmental sample
  misc_feature (1)..(83): Xaa is any amino acid
MRIPLLIAADNVRAEGSFFHLSVTSRPIVIAIGPERGWSDRERDLFESSGFLRLSIGTRALRTETACTAAAALAMEKIEESGL

SEQ ID NO: 88415 - protein, 162 aa, Unknown
  Obtained from environmental sample
  DOMAIN (4)...(162): Aminotransferase class-V
  misc_feature (1)..(162): Xaa is any amino acid
MRKVYVDYNATTPLRPEVKAAITEDLEIFGNASSMHASGRLAHARVEQARNAVKTLIGAKDGTIVFTSGGSESNNTFFQTMRRLIDSSASKGRNEFITTAIEHPCVMNSALDLKKLGFKVTILPVDEYGKLKIDELEKTLNEKTLFVSVMAANNEIGTIQDI

SEQ ID NO: 88416 - protein, 55 aa, Unknown
  Obtained from environmental sample
  misc_feature (1)..(55): Xaa is any amino acid
VNIDDFISGSLPVDSYIRPNKIFTADKNIILSIAGHLNENKIRDTINNIIMIISS

SEQ ID NO: 88417 - protein, 188 aa, Unknown
  Obtained from environmental sample
  misc_feature (1)..(188): Xaa is any amino acid
MREEFPPYLEPLNEEQRRAVLHTGKPLLILAGAGSGKTRVITTKIAWLIREQGMDPRSILAVTFTNKAAREMAERAVLIEPRAQDTMLRTFHSFGAWFLRRNGNFAGLDSSFVIYDDDDVVSLLSGIMENDPKPEVKQCARNISRAKDYFLSPDDPLLANIDSRKKFRVSTQVMKSGWRRSAMSILGT

SEQ ID NO: 88418 - protein, 1117 aa, Unknown
  Obtained from environmental sample
  DOMAIN (1025)...(1058): Tetratricopeptide repeat
  misc_feature (1)..(1117): Xaa is any amino acid
VANEKADIESLSLPFDDLQLPTTEAPPFEFIRHEPPPLDDLDLGEGGASLDINSFLDNITGDNAAPLADAPADAPADNAVSALDDFLKEIDSSPPPPEPDAGADDLSSFLSGMQDQGTADAPADVPVDDDLSSLLGGGQDETPPDFSPEDDLSSLLGGGQDETPPDFSADDDLASFPSGGQDEGLPDFSTDDLSSLMGGDQEEAAADTPADVPDGEGGIPDDLLSGFSDEVESAPDDTGLPDFSQEGFGIEESGADETQEEPENDDLDGIDLGGESRDSMPDTPAEADAGLGDLGDFNVDSIDSGASDESPEISESADSGAETDTSLPDFPDFDGIDLGGESQDSPTAAAEPEADNQDLGGIDLGGESIDFTPEAASDDFSSDSLPDFNLSGGDDLGAPADSFDTSGADASALDTNFDIPASDMDFSAASGAAPDAGTDAGAVHEFGDLGADFASDSIELDTGTGAEAGAEVEGMDSDSGFSGGDVFGGDDFSLTGLDDILNKTKVSAPKPVEKKGLFGRKKQKEEEKEVVKAEDNIDEISLSQEDVDNLLKTLSTYPLNLRIACEELIAEQVILPEQLSKLIRLLVNGASVRETAAHVEVITGKPVIIPKSFEKSSGAAFEAEQASFAYIFVHNLLPVIRLFTFIALMAGSIMYLSYKFIYIPLKAESLYKRGYERIPEGEYQRANELFHDAFTLHRKKKWFYAYAEAFRDQRRYMLAENKYDELLRYYPRDKKGVLDYAALNTYYLMNYEKANKLLQRELLDYAPNDYDGLLAAGDNFLDWADSNPVKFHDRYEDARFSYARLIEQYGWQPQILERMLKYFIRTDNLKETLQLRVWFENDPKKRKLSTPTLAELGGYLLDKQLEKTPGTVPNPYVESIESVRNMLLKAVMQDQYLPESHYHLARYYHNLGNIHEERLTLENAIRAFDLAKQESVKRRLYRVDTHYRYANLLVNSKEFFPADEQAVRGIELFEDFLNRNLIPPTSQLGQLYALRGDLEYFVKSGNMEAAIANYKKAEGYGYAPPEVQYRMGAAYYQREDWKNALDYLFKASKELPLNRRVLFAMGNAAYQRGDYFAAQGYYNRLLDILEVQRVRLPVLLPNDNIQFLETGERLMMA

SEQ ID NO: 88419 - protein, 183 aa, Unknown
  Obtained from environmental sample
  misc_feature (1)..(183): Xaa is any amino acid
MAEKDIGFVYILKNEAMPGIYKIGVTGRDELDTRIDELYVGKTNIPLPFECVFACKVENYRDVEKIIHNAFKDSRVNPNREFFSIQPDRVIPLLKHLQIDDITTDINNKIDKQIDNNDKESIKNIIKKRPKFNFVEMDIPIGSKIVFYDPDNPVEVEVIPGNRVKYKEKEYTLTALSSELLKV

SEQ ID NO: 88420 - protein, 90 aa, Unknown
  Obtained from environmental sample
  misc_feature (1)..(90): Xaa is any amino acid
MSEDNITIDAATAKHKMMTTSPVEPLICKLAVPTITGMLVSSLYNMADTYFVSSLGTSAIAGVGVVFSLMSIIQAVGFFFGHGAGNLISR

SEQ ID NO: 88421 - protein, 274 aa, Unknown
  Obtained from environmental sample
  misc_feature (1)..(274): Xaa is any amino acid
MRFRKYIFFYVIAVLFFSCENKSNKNEITVDYDLNSVDESEIKTIHVFVALCDNKYQGITRVSAALGDGQNLNTNLYWGARYGIRSYFKRSDEWKLLTAQKKKGIIMERLIFKHKEKNYYLIADAYEGKYIKECTLDFLNSGSGNKKETLKINGKTLGTGGSASLLAYIGHDGLMDFQLSETFVNTDNIKRDMIILACYSKKYFTPVLERANVNILVWTTNLMAPEAYTLHDALTGYVIGETNEEIRERAAAAYAKYQKCSINAAKGLLVTEKR

SEQ ID NO: 88422 - protein, 299 aa, Unknown
  Obtained from environmental sample
  misc_feature (1)..(299): Xaa is any amino acid
MARSINDLHAVRMSIGMGVVALFDFVFMATAILIIIFVQDARSALVSIIPLPLVTILILLFGSMVGKKFFAVQNAYSKVSDHAQETFAGISVIKSFVKEWWFIKKFADSNEDYQKANMELVRLFGFFFPFVSFLSGLTVLIMLGVGGLRVINGLMTPGSLVAMFRYLSMLIWPLMGAGFMVNMIQRGAVSLGRINEVLNTTPSIRDGEKTCAAQSTQGVPALEISNLEFAYRENESVLKGVNLKVERGEWLGIMGRTGSGKSTLIKTFMRMTDPPQGAVRVFGLDVCDWQLEELRKLFA

SEQ ID NO: 88423 - protein, 372 aa, Unknown
  Obtained from environmental sample
  misc_feature (1)..(372): Xaa is any amino acid
MYYDYRERAAAIPSHRFLAMQRGEREKVLRLSLELPAEGVTERLCAALVKHPRSAAAPYLREAAFDALDRLLLPAVKTALRADMRERADAEAIKVFGENLAALLLAAPAGRKTVIGLDPGFRSGCKLAAVDDTGKFLENATIYPHEPRRDRDGAKAILLALIQRRKPRLIAIGNGTAGRESEEFVRAALKEVPDEERPLCVTVSEAGASVYSASDAAIKEFPGLDVTVRGAVSIARRLQDPLSELVKIDPKSIGVGQYQHDVNQTRLKESLDEVVESCVNRVGVDVNLASEELLKYVSGLNKLTAANIVDYRNRNGAFSSRADLKKVTGLGDKKFQMAAGFLRIPGAKNPLDNSAVHPESYGIVKKMAEKLN

SEQ ID NO: 88424 - protein, 369 aa, Unknown
  Obtained from environmental sample
  DOMAIN (263)...(296): Tetratricopeptide repeat
  misc_feature (1)..(369): Xaa is any amino acid
MTNKRVHFLSVPESLRGKIEGISQDCGFSINPDIPIPVEIPENDEKLNLEELNWEMIVSGMLHVISGGPGVYVPAENGEWIDYYRDFVLALRPNILGELMEAAILKARNYDFDPALEILEGLRGLFPASVVVKLNRALAMEERASLFERRGRPEAEAAFQEAQAAYEDVLAIQPPFPEAYFNAGFFYLGRKDFRNARECLSVYIENSDNEEKQKQAHAIVKNINENGLEDEDLNAAYQLISQEKEEAGMLRIRDFIEKYPSVWNGWFVLGWALRRLGRWKDGAAAFSKAVELDGSVSDVRNEFAICLMECGDLKGARRELEAALRIDPENIKIISNLGVLAVKSGNVNEAAAFFRAVHELDPEDAIANQ

SEQ ID NO: 88425 - protein, 800 aa, Unknown
  Obtained from environmental sample
  DOMAIN (736)...(793): Bacterial regulatory proteins, luxR family
  misc_feature (1)..(800): Xaa is any amino acid
MNRKSAKKNLFITAPGGYGKTTAAQQWLSFVRGAVARLRMGNEDNNTGVFYKKLIYSLLKLVKKEKSAKSAEFMLDTFLETLKQMPVKNTRCYLLIDDLHIIKNNDILNSLPLIAGRLPSYVCLCLVSRSMPPQPLLDTGLFETLTKDDLLFSQEEVEWLGTEKKRELTAGQINDLLETTGGWAMYLSALLSGEQTYKMPQTLIQYLETRVWNLWDDETKKLLVKLAVPVEITPDLCERLTAEADGKSILDRLVKKEGVFLTLIGNDTYHFHDIFRDFLLERAVLLETQEIRRLNNAAAEWYYERGDYHSGAQYYIRNNDHEGIIRCLTAASQYHEDLGVMSVEAYINFTIRYVKDLPAEFIAENPYLIYKLITTAYHNGDINEYMRYANILNERQAEIAAKYPALFQTFSLSGVINPHVPLKEHAKELLKKIEQMPKIAANTNTNIGTMTQNLPFFHRSLRDLSECYELKAEDLELYKAAIGVLMSEDYDVMEQALFAGIHYERGQLMDAARHALIGKKTCGEGTHPEIHFSANMILTAVLYAMGDFRDAGKIMAQTKDYIEKKARFLYPNFKALQTERVIRLGDITAAKEWLAVYANSAERLPFYQICRHFTSLRSCIALEDYKAAVDFGKRIQKLADDYKRPLDRIESGILTAIALWKKGDKYNAAAEMEQALHIAAPYGFIQLFINEDKEILPLLWMIRKKTDIELRQAEFIDTLTQRISGFDEGRKEPEQAPRLPVMRRKMLEYLNKGMSYNEIADKTGIVRGTVKRHILLLYKQLEVNSGEEAVIKAKMLGLLE

SEQ ID NO: 88426 - protein, 842 aa, Unknown
  Obtained from environmental sample
  DOMAIN (136)...(214): Cache domain
  misc_feature (1)..(842): Xaa is any amino acid
MKTLFGKLLISFGVIILLMIVSVLASFFLVYSKSYEKQIIAENSRQALFVARSLQSFINAAYNEVEDLAFNNDVISMNTQRQTPVFVSTIKRRDYFELLYAQGMDGMQTGRSSGNLGNRKERWWFVQMEKLKKPFVSESYYSVGTNMPCASVFYPIMDEQQMTGIMAGDIKLSALHDMVVETADTGSYSFILDGKGVVVAHPDRTYQEELYNYAKLTKTVTLKDAAGKPMQNAQGNLTEEQSFSISKAYIAAISDMMSGNTNSAKFNEGGKTVYVSYRPVVMDGSSDPWYVLSVRDRDIAMRSRNTVITVILASSAVIIVIALFIVFFIARTISSPVKSIRLVLEKVKDGDFTKKVTVQSQDEIGNLADYFNLTIENIRNLVGTIKYKINGLNHTSFELSVNMGKTSTAVEQISSNIDNMENLVVKQENGALVAGEAVGAIKTNIDSLNKMIEQQAESVDMSSSAIDEMTANIHSVTQTLAENSKNVGFLVEASEYGKTGLQTVAQEIQEIARDSEGLLEINSVMDNIASQTNLLSMNAAIEAAHAGEVGKGFAVVADEIRKLAESSSNQSKTTAVMLKKIKTSIDNITKSSNDVLARFGAIDSSVKTVSEHEQNILHAMQEQETGGKQILESISVLRDITASVKKGSDDMERSGETLVKETDEFIKTSQEVAEGMNEILAGINQIKVSVNHVNEMSQENNRNFESLKQETDKFNDTVGNEKQKVLIVDDDSIHLEMVETVLQNNYDVSTAKSGKEALGLFYQGLVPQLVLLDLIMPDMDGWDTYKRIKAISGLHDTPIAFFTTSNDPKDVKHAHEIGAVDYIKKPYDKDDLLRRVERILKK

SEQ ID NO: 88427 - protein, 629 aa, Unknown
  Obtained from environmental sample
  DOMAIN (565)...(622): Bacterial regulatory proteins, luxR family
  misc_feature (1)..(629): Xaa is any amino acid
LLETTGGWAMYLSALLSGEQTYKTPQTLVQYLETRVWDVWDDKIKKLLVKLAIPVEITPDLCERLTTEADGKNILERLVKKEGVFLTLIGNGVYRFHDIFRDFLLERTALLENQEIRRLNDVTAEWYYERGDYHTGAQYYIRNNDHEGIIRCLTSASQYHEDLGVMSVEAYINFTIRYVKDLPAEFISENPYLIYKLITTAYHNGDMNEYMRYSDMLYEKQAEIAAKYPALLETFSLARVINPHVPLKEHAKDLLKLIEQMPKTTAKTNTNIGTMTQNLPFFHRSLRDLSECYELKAEDLKLFKASVGVLMNKDYEVMERALFAGIYYERGQLMDAVHHALIGKEACLEGIHPETRFSANMILAAVLYAMGDFRDAGNVMEQTEVFIGEKARFLYPNFKALQTERVIRSDNKEAAQKQAQDWLAVYANSAQRLPFYQICRHFTSLRSYIALEDYKAAVDFGRRIQQLAADYKRPLDRIESGILTAIALWEKGDKYNAAEEMEQALLIAAPYGFIQLFINEGKEILPLLWMIRKKTDIDSQQAQFIDTLTQRISGFDGKLREHEQAPHLSVMRCKMLEYLNKGMSYNEIADKTGIVRGTVKRHILLLYKQLGVNSGEEAVIKAKMLGLLE

SEQ ID NO: 88428 - protein, 291 aa, Unknown
  Obtained from environmental sample
  misc_feature (1)..(291): Xaa is any amino acid
AAEAAGATVEDAVTSEIDESAIAAALGEESAGGVSGDDVENRLDTMFGGGAAEAAGATVEEDITAEIDESAIAAALETEAAAPLVDESALIIDGNDATPADADAPPPEPEAAGKLPSSIVLDENGVDVAMTPTSEDIEDRIDTLFGQSDPTVPKEPLVIDEDEIATAEAVTAEDVMTETGAAELTEGDMTGSDVEARLSEMFGGAAVDTTTAMTVEEVMAVDIDEPEAVGTDEVVGVDGVVDIDGVVDTGDIAGIDDVAGVDAVDSAVGTDEVAGIDSVVDVDGVVDIGSC

SEQ ID NO: 88429 - protein, 266 aa, Unknown
  Obtained from environmental sample
  DOMAIN (2)...(253): Pyridoxal-phosphate dependent enzyme
  misc_feature (1)..(266): Xaa is any amino acid
GIFNPSGSVKDRAAKAMILDGIKRGLLTKDKILLDSTSGNTGIAYAMFGAALGYKVHLFMPANASEERKKIIKAYGAKVIETDPLEGSDGAYRLAMELAEKEPDLYFFPNQYDNFENSKMHYETTGVELYNQCKPTHFVAGTGTSGTFMGVSKRLKEFDSSIKVMLMQADSPFHGLEGMKHMESTITPKIFDKSIADLYSEVKTEDAYKTARRLALEEGLFVGVSSGANVYAAMELAKTLPAGSRVATILCDNGYRYLSQPLWRDI

SEQ ID NO: 88430 - protein, 1082 aa, Unknown
  Obtained from environmental sample
  DOMAIN (279)...(361): Cache domain
  misc_feature (1)..(1082): Xaa is any amino acid
MAIYSGNGAIIGNLRPDRVGKLLPEVEALYGIYQKNANQAVLDGKPFNCSSYSNSLNKNVRIEMAPFRIGNSTNYWSVMIAATEEYIMRDVIAMKNFVIVMASIAAAAAVVILFLLLNSAVRSIINNAKKYRAIFSYTIVLVVILAFALMVALSSVFMSNIVSRQLESNALAALDYLETNIVVDLKEPRTLLGGASETVRKMILHGANEKEVHAYLNEISDFLLSDEEQLADFDGLFGYFNVFGGVLLDGQDRDPPKDYNPLARPWYKESVAAGGRIVFIQPHFSVMSMQPTTIIAYGRAMFDDDGNLLGVVALNMNFERVKEYITQANLGKSWFGVLLNENFDIIFHRDQTLEGTNYADVNSNTANLVALLKSGNDSVSEYGMKNYVDIPSVTFIRKLENGWYLGIVTPKDEYFTEVKRVRLLLILLGATLSLIFSFILAHIITEKRRADKKINEAEKAIVANRVKSDFLAKMSHEIRSPMNVILGIVEMQLEKKDLPPETLIALSKMQNSGHLLLNIINDILDLSKIESGKMELVTSNYDIPSLINDTVQFNVIRFDSKPINFVLNIDENIPVSLFGDHLRIKQILNNILSNAFKYTDMGEVELSFSAEVSGAGKPVILVLNVSDTGQGMTQEQLDKLFDDYTRFNIDPKRQIQGTGLGMSVTKRFIDMMNGEITVKSKPGKGTEFNIRIPQGYVDSAVLGKEGTNNLQKLCAERESKDSDNEIVREYMPYGKVLVVDDMEPNLYVTNMVLAPYGLTISTAKSGQEAIDKVKSGMTYDIIFMDHYMPEMDGVEAAKIIRDLGYKHPIVALTANALVGQAKIFLENGFNGFLSKPIDTRQLNSTLNKFVRDKYPVEIVEAARQLKRPDDDNEEEDEDLLDLSGVKALVVDDFKPNLNGEAAMLKEYKMQVDCLLNGQEAVDRIKSGEPKYDIVFMDLLMPVMDGIEATRAIRSLGTEYASTVPIIALTAMPDDDAADQEKTLLDSGFQKIIYKPFTLETVDTFIKDWIGDKIKNCTIPPGKKEKFMEIDIPGVENEKVKKIYGTKFNIYLDVLRSYLDVVPKSLEEMSHVSKETLTSYVTN

SEQ ID NO: 88431 - protein, 177 aa, Unknown
  Obtained from environmental sample
  DOMAIN (1)...(85): Response regulator receiver domain
  misc_feature (1)..(177): Xaa is any amino acid
LASNGEDAVEKVKAVEPVLAFLDIMMPIMDGFEAAEYLRSLGYKIPIIAVTATFLPEDEEKCKKSGINDVLTKPIKFMEIKMMLEKWLVPEREPQAFDPMPAVPKASAASGPEIFNAEEMLGAFLNEVKVVLPLLSRFIERTSSQLENFPVLKAAGDWETARRNAHTIKGSALTMGS

SEQ ID NO: 88432 - protein, 779 aa, Unknown
  Obtained from environmental sample
  DOMAIN (315)...(381): His Kinase A (phosphoacceptor) domain
  misc_feature (1)..(779): Xaa is any amino acid
MVALSSYFMTDIVKRQLASNAHAALNSLETDINTDLREPRTVLGNQSEGVRNMILRGAGKEEVRTYLNNITEYIIQNEEKQLSGFDGIFGFFDVFGGVMLDGRNRPPPDNYNPRERPWYKEAVAAQGEIVFLHPHTGAVKPTVVITNSRGLFDNDGNLLGAIAMDVEFNRIREYIVNEDSEKFWFGILLNEQYEIIAHREQSMEGTKYEDVNSDAARIVAELKMGHNVSEFRMRNYQNDMSITFVKKLENGWYLCIVTPKEEYFAEVKRVRFILILLGAVLSAIFSVILFRIIKEKQKTDAKTNEAEKAIVANRVKTNFLAKMSHEIRSPMNVILGIVEMQLEKKDLPPDTMIALDRMHNSGYMLLNIINDILDLSKIESGKMELAPVNYDVAGMINDTVQINVIRFDTKPIHFTLEVDESVPSTLFGDALRVKQILNNILSNAFKYTDKGEVILSIYAEKSLAFAHGSNHSVTLVLNVSDTGHGMTPEQLDRLFDDYTRFNTDGIRLIEGTGLGMGITKNFIEMMKGKIDVTSEPGKGTEFTIRIPQGYVDSGILGKDGTENLQKLCAEREARENAGGIIREYMPYGKVLVVDDMEPNLYVTNMILAPYGLKISTAKSGKEAIEKINKGRVYDVIFMDHYMPEMDGMETTKVIRGLGYKNPIVALTANALVGQAKIFLENGFNGFLTKPIDTRQLNATLNKFVRDSYPVEVVEAARKLKKPDEDEDEDEDEGEGEGEGGDEDLPDLSGVKALIVDDFKPNLNGEAAMLKDYKIEVDCL

SEQ ID NO: 88433 - protein, 350 aa, Unknown
  Obtained from environmental sample
  DOMAIN (23)...(341): pfkB family carbohydrate kinase
  misc_feature (1)..(350): Xaa is any amino acid
LSNKTELLCIGNSIVDVFVDIDNSLALKYGILDPIQHIGGDKAEALLTEPSIDFAKSVKSSGGGAANVAKIASMLGMDAAFCGCIGQDELASIFEEEIKEAGVSSMLVRSNEKTGLCFVCNLGSETRFAASPRAALELNESHISEDLISGAEAVILDGFILDRRPLVQHILRLASHKGIPVALDAASIMQVKSKAEEILTYSRNYPLFIFMNADETITFYNTIKKGPEERLDITDREKEALIMRDICPMLKMITDGELYPIIVIKLGGRGALVVAGGNIYREETYNVASPKNAVGAGDAFCAAFISAWIRQKSLSDCAALGNKVAREILEVPGTHIKIGKLKSFAKTLQR

SEQ ID NO: 88434 - protein, 261 aa, Unknown
  Obtained from environmental sample
  DOMAIN (1)...(244): Recombination protein O
  misc_feature (1)..(261): Xaa is any amino acid
MSRTAVYSALVLRNRPSGESNSEVTLLTAEEGIIKATVFGGAKSKLRAHCAPYNSGQVWIYRDKSKEYAKISDFDVHSWRAGLRELYERTMSAAAVADTILSSHGGGGELGTALNMAIETLDTLETATEELCGRLLIHFLWRWSGFLGIQPHLDSCAACGKDSGFQSANNGNTNNNTEASSNILWFSPREDAVYCAACAANQQDLLQLNPGSRRWLTAVSALQTAQVPRYSMDKKSYEEAKSLTTAVLTSAIGKKLNSWDW

SEQ ID NO: 88435 - protein, 165 aa, Unknown
  Obtained from environmental sample
  DOMAIN (71)...(160): Protein of unknown function (DUF1636)
  misc_feature (1)..(165): Xaa is any amino acid
LISQQELHNVLNVYPTDRRYALAILQDMQRAFHYIPREGLKAAAEYLGCGLSELYSMATFYKALSLTPKGKHIIKVCDGTACHIRGSVTLLDALRRRLGVEPGETTKDGLFTLETVNCLGACAIAPVMLVGEEYYGSLTIEKLDSVLQVYEQSKDKKGGSADEKH

SEQ ID NO: 88436 - protein, 65 aa, Unknown
  Obtained from environmental sample
  misc_feature (1)..(65): Xaa is any amino acid
LDVPDEMVIIHQETPRPHGPHGAAGVGELPLSAPHAAIINGIYNACGVRIKHLPAYPEKILAGLS

SEQ ID NO: 88437 - protein, 312 aa, Unknown
  Obtained from environmental sample
  DOMAIN (116)...(185): HAMP domain
  misc_feature (1)..(312): Xaa is any amino acid
TQADRDKILKNLDDKNNEINKNVEEQMKTSLAAGQEILKKVGDLTDKYIDQIRGYIKGCKNYSPSGTCEDDFTAEMSETANKMSEAVSAAKESKVKRVSNISDEASAQAAASIRAAIIILVVVLILAVGLGIFLTFSITTPLKVVVAALSKIEKGDMTARADLERGDELGTLSKALDSVASRLQTIFRNLRQNADTLASSAEELSSVGRQIASSAEENVAQAASVASASEQTSVNINAMASGAEEASVNANEVAGAAEQMSTNMNTIAAAIEEMSASINQISSNAGEANKVANQATVKSGDATGVMNELGLA

SEQ ID NO: 88438 - protein, 274 aa, Unknown
  Obtained from environmental sample
  DOMAIN (47)...(115): POTRA domain, FtsQ-type
  misc_feature (1)..(274): Xaa is any amino acid
MAGDYVLDTDAPSAPSGFERFIKIFIVIAALCLGAELIWLLGISPFRPFTKIDITGIDGIDRAKVLSIAGISDSSSYFSTDTTAIENALMEISVIESAKVFKFFPGRMRIVLEARKPVAFALAASESGTVPVVFDSHGVIYEVGGKSLPDFYPVISGLVIDNPVPGMRLPGLFIPFLKELEKIEMSAPELLSAVSEFRINRKLFDGFDLILYPAHKRIKVIMSELNEDLLRYALLMVDVLSSRESGIDTLDFRSGNIASYIPVDVQTSKEAYPE

SEQ ID NO: 88439 - protein, 199 aa, Unknown
  Obtained from environmental sample
  DOMAIN (12)...(199): Domain of unknown function (DUF362)
  misc_feature (1)..(199): Xaa is any amino acid
MVKTKVAIANTKADIGKPSEYSRSQLDIVKEMIRDVAAKSMGGMQNIVKPGDKVFIKINTVVPAPANNGFTTDPRMLEALIELVKEQKPGRIRVGERCAQGADTMAAMIGCGIKDVTDRQGVELLPLEKDEWTMYKIDRPVSFNEFPVPKSVKEADCYIGLPKMKVHIHTTLTNALKLQFGNLPDYAWMAKCHRDDIYQ

SEQ ID NO: 88440 - protein, 231 aa, Unknown
  Obtained from environmental sample
  misc_feature (1)..(231): Xaa is any amino acid
GDTGSRYYYEIENEISSAAVSEAVINLRKGELSDCFKIGDNWVIFRIEEEIKPADFNDYSVMDRVKSYLKSFDRGRMEDWAVAKTKEFIKDAQNSGFDTAVLQWSLNKFSFGPLPLNYAGVDLFTSLESFSDSGIPRQELQSLSRNENFWKIAFSAKLNTPSEPLVQGDNVLVLFPVEETNIDETTKENIASSYTSYWVNMLAEQSLQPYFMSNPRLDDRFWDTFFKYFSP

SEQ ID NO: 88441 - protein, 557 aa, Unknown
  Obtained from environmental sample
  DOMAIN (162)...(340): Protein of unknown function DUF115
  misc_feature (1)..(557): Xaa is any amino acid
MQGRPFVRNGITLLSGYDPVMRCERIADAVSVRDKTLYFCPSPLYCYGLEKFLLRLGAQAPNSAVLCVEADPELYELSKTGLTSFLSSNRMFRLTDICEAANLCALVRELWGARAFRRIEIVKLTGGWQLSDSLYDSLFEALRREIAVDWGNAMTLAKLGRLYIRNALRNLSLLPRFQSIANLSFGSSPLLVLGAGPSLDETLDALEHHFSGNLHYPNKRPFKIVCVDTCLGALKDRNIVPDLVVILESQYWNLRDFIGCKGWNVRSAIDLSAYPASARILSGEGFIFMTPWTSLRIFERLKDSGLCPLVISPLGSVGLTAAEAARRISRGKIILSGLDFSFTADKYHARSTPGHRSRLNAQNRMKGIANTAAFDAASFTAVSKAGVNIKSSHVMRNYRDLFEQEFAGDPRLFDITGTGLPLGIKTLSYEEAVSVLSADTGNNTLKSEDARAREKPEKEKALLTEKLKIFINDEKKRLIELRNILTGEAAPDQMRLSSLIEECDYLYAHFPDFAGGLKPVLDEGSANQKTLSFLKRVRAEIDPMIKLLEKTKELTFN

SEQ ID NO: 88442 - protein, 99 aa, Unknown
  Obtained from environmental sample
  misc_feature (1)..(99): Xaa is any amino acid
GTDKNLDFSPLAQVIGKAKAVILLAGSGSDKLRDLLGGAGLCCLGPFDVLENAANAALELAAPGDRIALSPGCASFGMFLNEFDRGRKWKETIKGIVSG

SEQ ID NO: 88443 - protein, 77 aa, Unknown
  Obtained from environmental sample
  misc_feature (1)..(77): Xaa is any amino acid
MNIGRILGIEFDRPYTMANRVVRDVSDVLSTLVYRVGILSNQFSLTAAIGLFQSIICVIFLVTANSLAKRFGERGIW

SEQ ID NO: 88444 - protein, 379 aa, Unknown
  Obtained from environmental sample
  misc_feature (1)..(379): Xaa is any amino acid
GKQLVYRDQDPRSLKIYSVVSYRTAIAQRNIFIRKDWLDKLGMPVPKSMGQFEQALKAFRDRDPGNVGKNRVVPLGVNADVRWGLSDFINHFVDPKLSDRDRWVNSIADRYITMPGFKRGVQEMNKWYNDGLIFKDFPLMTTADDFYNQIKSGVVGSFCQNWDFPYRTDMNILVDLRKNVPGADFIPISITNNKSVMDKPGLRIFIPQFSPNKDSALRYLNWLAKPENYKFLQIGNEGVNHKMVNGIPQTIATPPQHPWFMNSPNNIDITIPMNGVELGSDAANARVLGLSYGTISPDVISNAYVVSTTDARGPAVWQATTKVNQYSGDLREKADDLVSLAITAKPANFAKVWDDGIKDWMNSGGREVLAERNALYPKK

SEQ ID NO: 88445 - protein, 502 aa, Unknown
  Obtained from environmental sample
  DOMAIN (92)...(173): Bacterial Ig-like domain (group 2)
  misc_feature (1)..(502): Xaa is any amino acid
ISGIGTFTNNGSRRQVTVTPKPGKSTGVVTVKYNGNTVAPSAVGTYTVTFDVEAAEGFNAASGLSAGTLTIKAASSGGGGGGGGGGGTPTPTVTGVTVSPSTASVEKGETRQFSATVNGANNPSQTVTWTVTGGVSGTGINASGLLTVAANETAASLTVKATSTANTSISGTASVTVTAPPITAEPGSIDNPILIAPTGQLTSEGWKKLLADIAYEDKYVSLDLSKCDWQGTEFSVDDPWGGSTTPYIVSLILPDTVQKVLGKPDSGSVNNYNQSYSNLRTVKGTNVNSVGDRAFAKCKSLVSADFPVATTIGESAFSDCTSLTSVSLPAATAIDIAAFWGCTSLASVSLPAATAIDIAAFWGCTSLASVSLPAATAIGWYAFIGCTSLTSVSLPAATTISYYAFSDCTSLTSVSLPAATTISRLAFNRCTSLTSVSFPVATTIHGEAFSGCTSLTSVSLPAATTIGEYAFYRCTSLTSVSLPVATTIGNDTLSSCKSLTSV

SEQ ID NO: 88446 - protein, 277 aa, Unknown
  Obtained from environmental sample
  misc_feature (1)..(277): Xaa is any amino acid
MARCMYMVGVRRSDVFQNMSSYGLFTGGLGIHAGAERLGCMTIPAGAGNTLRQIRLIKDFKTTVIHIIPSYALVLANTLRESGEDPSALPPRIALIGAEPHSEQTRRRVEEALGVKAYNSYGLSEMNGPGVAFECREQNGLHVWEDAYIAEIVNPETGEHVAEGETGELTLTTLCRAGMPILRYRTRDLTRFLPGGCACGRMHRRIDRIQGRTDDMFIIKGVNIYPMQIEQVIMDRPEVGQNYLIVLENEGPREHLQVKVEIRDEYFVEDMRALHGL

SEQ ID NO: 88447 - protein, 275 aa, Unknown
  Obtained from environmental sample
  DOMAIN (1)...(93): Thiamine pyrophosphate enzyme, N-terminal TPP binding domain
  misc_feature (1)..(275): Xaa is any amino acid
MVTAMYSASADSIPILCITGQAPKAKLHKEDFQCVDIVSIAKPVTKMAMTVLEPGQVPRVFQQAFHVMRSGRPGPVLIDLPFDVQVAEIEFDVDAYEPLPVYKPAASRKQLEKVFDMLMASKRPVIIAGGGIINADASDLLVKFAELTGVPVIPTLMGWGSIPDDHPLMIGRIGIQCSHRYANQSFLRSDFVLGIGNRWANRHTGTLEKYTEGRAFIHIDVEPTQIGRVFNPNLGIASCARAALKGLVAIAGERKASIPNYAAWAEECLNRKNDA

SEQ ID NO: 88448 - protein, 288 aa, Unknown
  Obtained from environmental sample
  misc_feature (1)..(288): Xaa is any amino acid
MEIRKDSGKNQSNRQMVTYGSLNDGNISFLFSDNDLEVHADFLPPLMNGTPLNLRIITDILESVNLVYGVKWDAIELALEECNASRRQVRDVLIAVGEKSEVEIAEYYELNHIFHKKPERKTDHKERIDYREISPFTIVKKDQVLATLKPRRPGKEGMTVRGIPVPFGSITPEGVTSGNNTRIEGNSIVAAIHGQLIIENKTVLNVQDTLVIKGAVDYSTGNIVFPGDVFINGPVSDGFKIFAGGSLTIKQTLDLTRVVTKGDILVSGGIVGKGAALIKSGGSIRTKF

SEQ ID NO: 88449 - protein, 276 aa, Unknown
  Obtained from environmental sample
  DOMAIN (30)...(258): FGGY family of carbohydrate kinases, C-terminal domain
  misc_feature (1)..(276): Xaa is any amino acid
LIPGQTGLSADIPVAAGAGDTAASVLGAGLFRNDQILDCAGTASVLCCAVDSYSPDIKHKTMMMMRSPEDGRYFPLTYINGGGLTIRWFRDNFTGKPPLSYKELEKEAATLPPGSEGLTFIPHFAGRVFPSNPNLKGSFTGLDLKHGPAHLFRAIMEGISCEYAYYLSVLRDLYPNSNFERMTAIGGGASSELFVRIKADVLGIEAIRTDVGDTALVGSAAIAGYGAGVLDDYRTAIRKTIRNKPAILFDAGYHEKYKPVVKKYMAAIEAMNNLYK

SEQ ID NO: 88450 - protein, 113 aa, Unknown
  Obtained from environmental sample
  DOMAIN (24)...(113): Alcohol dehydrogenase GroES-like domain
  misc_feature (1)..(113): Xaa is any amino acid
MKAVKLFGPNDIRVVDCGIPEINDDEILLKTAAAAICGTDLRMIANGYKGVDEAHPLVLGHEIAGIIEQVGKNVKGYEKGMRVALAPNIGCGICDWCVSGNSHLCPEYTALAS

SEQ ID NO: 88451 - protein, 159 aa, Unknown
  Obtained from environmental sample
  misc_feature (1)..(159): Xaa is any amino acid
MRKETDRSLVNGYLKASERNIVNKKGDTVLLNGWGLGNWLLCEGYMWLSHSKRFDRPRIIENVIHELTGSVFSEYFWKEFRTRYISKEDICLMAELGYNSVRIPFNWRILLKDEPGLNWIDDGFALLDKCINWCEEYGLYAFLDMHGAPGGQTGANIDD

SEQ ID NO: 88452 - protein, 415 aa, Unknown
  Obtained from environmental sample
  DOMAIN (177)...(356): Integrase core domain
  misc_feature (1)..(415): Xaa is any amino acid
MGLSMQEKKALTREISKRYQKAGKKEKTEILNELVKTTGYNRKYALHILANWGKTVVAGIDGKPAKVAASHGKRRKGGGRKPKYSGDFVIALRKIWAFFWYRCGKILAPFMREQMRFLERPFHITEKDKELLLSVSPSTIDRLLKQDRKKLALKGKSGTKPGKLLKKQIPVRTYYADADKKPGFFEIDTVHHCGTSDSGEFCLTLTATDVYSGWVELRPTLNKAHKWVFEALLDIKSSLPFPLAGIDSDNGSEFINSALLKWCQDGRIQFTRSRAYRKNDNCFVEQKNFTCVRNFVGYCRFSAEAERDALADVYRSLCPLLNFFMPTIKLISKERVGAKIKKVYDKKILSPYQRLMASDDISAEAKAELDRRFAVYDPVMLQGEVHKAVDALVSINRVANLEGGKALAASALQAI

SEQ ID NO: 88453 - protein, 345 aa, Unknown
  Obtained from environmental sample
  DOMAIN (166)...(292): Miro-like protein
  misc_feature (1)..(345): Xaa is any amino acid
MEKFADEAIIEVSSGSGGNGCVAFRREKYIPKGGPSGGDGGRGGDVVFTVRRNVRTLAHLRHKHTFKAKNGQDGRGAGCYGKNGEDIVIPLPPGSIVREAETGALVRDFSEEARDKDDFVFLKGGNGGWGNIHFKSSVNQAPRKALPGQPGQTVQLKVELHIMADIGLVGFPNAGKSSLLDRFTNARPKIAAYPFTTKIPNLGVLSVGESGDTDIRDVIIADIPGLIEGASQGAGLGTRFLKHISRTAALAFLVDLSDDNYLSAFDVLQNELASFSPELVQKKRLLVGTKTDLPETGGRLAELAAKYPNEKVFGISVFSGEGIKELALEFLRLADGLADKEASQA

SEQ ID NO: 88454 - protein, 512 aa, Unknown
  Obtained from environmental sample
  DOMAIN (338)...(480): RNA polymerase Rpb1, domain 2
  misc_feature (1)..(512): Xaa is any amino acid
MLNQLDKKTQEIAGVSIRLASPETIRSWSFGEVTKPETINYRSFKPEKDGLFCEKIFGPVRNWECNCGKYKRIRYRGVVCDRCGVEVMHSKVRRERMGHIELAEPVVHIWFLKSTPSHISYLLGITNSNLERIIYYESYVVIDPGDTNLRKDQLLTEEQYSELVEQGKKFDAKMGGQAVLELLAKVEVEKLVIELRHLVKRETSEQRRLEHLKRLRVAEAFNRSKNDPQNMVLKVLPVLPPDLRPLVPLEGGRFATSDLNDLYRRVINRNNRLKKLLEIKAPEVILRNEKRMLQEAVDTLFDNGRRTFSVKGEGKRPLKSLSDLLKGKQGRFRQNLLGKRVDYSGRSVIVVGPELKIHQCGLPKLMALELFKPFVIQKLEEKGLVQTVKSAKKFVEKERPEVWDILEEVIKDHPVLLNRAPTLHRLGIQAFFPVLVEGKAIRLHPLVCSAFNADFDGDQMAVHVPLSAESQLECRFLMLSANNLLSPASGHPVMTPTQDIVLGIYYLTKMSP

SEQ ID NO: 88455 - protein, 325 aa, Unknown
  Obtained from environmental sample
  DOMAIN (1)...(324): Basic membrane protein
  misc_feature (1)..(325): Xaa is any amino acid
FGLLKKQDQKKSAETFDLALVTDLGTIDDKSFNQGSWEGLAQYAKEKGISHKYYQPAEQSDDAYLTAIGLAVQGGAKVVVTPGFLFETPVFVAQDRYPNVNFILVDGVPHSADYSEFKTGKNTVGVNYAEDQAGFLAGYAAVKDGSRKLGFVGGMAVPAVVRFGYGFVQGAEYAAKELGLASGSITINYHYTGAFAATPEAQTLAASWFNSGVDVIFACGGAVGNSVMAAAEQAGKKVIGVDVDQSGESPTVITSAMKGLQVSVYDCIADYYNGKFPGGLTLVFAADNKGVGLPMQSSKFKNFSQADYDSIFDKLATGSIPRMDN

SEQ ID NO: 88456 - protein, 355 aa, Unknown
  Obtained from environmental sample
  misc_feature (1)..(355): Xaa is any amino acid
LGIFVIFWMLLNAISIISAEKFFPFIYTLRISFVSIIPFSVFWFILNFAHIRTYKYRFALPVICIFPALDILLIITNPLHHLVFPDYAYPVPARGPLFWVHTVVDFFVVLLCFIVLIRYVLKHARDEPLVIITVFGMSLPYILNILYTTEIQRFIPYDITPLGFFITFMLFAITSYKSQLLNIKALTMNNIYAIIKDAILVFNEQNRIMDANPAALSAFSGFSFDSGQSTLEKFFVYLHGQNAKCTPDDLFEPLIKGNTERNGEIKLYRSDGQIKTFMVTLKTIMVRKKPSGYILIMSDVSVYHSMISEINIQNARLAELRKEAEAASMAKGAFLANMSHEIRTPLNAVIGMALI

SEQ ID NO: 88457 - protein, 83 aa, Unknown
  Obtained from environmental sample
  misc_feature (1)..(83): Xaa is any amino acid
MDIQMPIMDGYEATKQIRAIEAEMIKNEETKGNKEPYKQTRIVAMTANAYKEDIEKALASGMDGHLAKPIDINAVMHTLAELI

SEQ ID NO: 88458 - protein, 349 aa, Unknown
  Obtained from environmental sample
  DOMAIN (174)...(346): Glutamine amidotransferase class-I
  misc_feature (1)..(349): Xaa is any amino acid
MTAYLVLENGTVMKGEYFGAQGEITGEVVFATGMTGYLETLTDQSYYGQIVLQTFPLIGNYGVIPPDFESANVGARAYIVKHPCENPSNFRCEGTLDAFLKERGITGLYGIDTRALTRIIRENGVMNGKITAAPPTETDIAETKAYSIKNAVAAVSSKTVTKTMPTQTVKKRVALMDFGAKRGIANALAARGCEVWSFPHDTNAQEILKIKPDGIMLSNGPGDPAESANSGIIETLRILQKSDVTIFGICLGHQLLALANGYSTRKLKFGHRGANQPVKELATGRVYITSQNHGYAVVADNGSFVNVNDGTCEGMDYGNCFSVQFHPEACSGPLDTSFLFDNFIKRMNK

SEQ ID NO: 88459 - protein, 84 aa, Unknown
  Obtained from environmental sample
  misc_feature (1)..(84): Xaa is any amino acid
MNLTSDNVIAYFQPILSADSNSVYAYEVLGRYVDDDGNVNSLGPFFMDPEISHEEALRVDRIVRRYAMKKYAEEKRNEYLFINI

SEQ ID NO: 88460 - protein, 224 aa, Unknown
  Obtained from environmental sample
  DOMAIN (19)...(96): Helicase conserved C-terminal domain
  misc_feature (1)..(224): Xaa is any amino acid
VFFLHNRIETLREIRIKIQRLLPEMLVETAHGQMDAQDLEDVMHRFIHGGFHVLVSTTIIENGIDIPNVNTIIIDRADMYGVSQLYQLRGRVGRSDRVAYAYLFYPKEKALSEVAMKRLQVISDFTELGSGFKIAMKDMEIRGAGNLLGREQSGDIYSVGFDLYIRLLDEAVKKLENTHYEAETETLMELEYSGFIPDTYIDSAQEKMEVYKKIAAVRQREELK

SEQ ID NO: 88461 - protein, 831 aa, Unknown
  Obtained from environmental sample
  DOMAIN (603)...(765): Type III restriction enzyme, res subunit
  misc_feature (1)..(831): Xaa is any amino acid
MAKIARSAAVREALKALKNGKFPLQIEHAEGAFPGILISLIYAAAGGRILAVVPTDAEAALLEQDLRSTNVPVSIFPWWGGMPYRDMAPLSAVFGERMRVLAGLATGNNGIVIASERAFLTPLPPPDYIKELLVTLKPGSGIAIGKESMDFDPTALAEILVSYGYTRVPRVQLRGEFALRGEVLDILMGEESEAYRILFDFDRIESIKRFEPLTQSGMEKKPELVIHPFKELVWTEDRIEALKANLESFEEFPSNGKEILEELKTRRTINGEEYLFPLAFEKPATLADYFFPSTDKGEGKGEALGCALVVYLERERLENAQESLEKEYQSLYSKTRRSKEIPLPSRILLNFKELSSSIPRCVSFTLLKGAVEENTQCINAACDPPRSFFGNVNYLKEEFASLKKQGWDLAVAAESDVQAGRIAELLRDEDVSVGALPFSSGFALPDIKFMLIQENEIFGRRRRPPKSLKTARSAVIDTFVELNPGDYVVHVNYGIGLFKGIERIKALGHERDYISIEYAGEETVFVPIEQVNLVQRYIGNEGSPPRLDTLGSKSWENRKGRVKKSVEDIAEKLLALYSRRRQSQGFAFPKDTEWQTMFEAAFPFEETEDQLRCVEEIKADMESPHPMDRLICGDVGYGKTEVAVRACFKAIMGGKQIAFLAPTTILAEQHYENFQERFSQFPVKLAMLSRFVDKKSVRKILEELKNGEIDLLVGTHRIIQKDVAFKNLGLIVIDEEQRFGVKDKERLKELKTNVDCITLSATPIPRTLHMSLLKIRDMSLLATPPQNRHPIETTMRNLTKSALQGPYVRKRSGEGRCSSSTTALKPSARYG

SEQ ID NO: 88462 - protein, 281 aa, Unknown
  Obtained from environmental sample
  DOMAIN (127)...(281): Glycosyl transferases group 1
  misc_feature (1)..(281): Xaa is any amino acid
GYFYQRHNKCGCNPGHTKEDCYKCTRVEKEANLAIKTYNRGLFGIDPKTAEFQDKWIEVLKFERLDEDIPQDKILEFTQTSTEKINRNCDHILTASKKIYNIAAANNIDKNKMQVLYIGNEIAKEQLKSALSSYDPKGSLKIVFFSDNIDNEESGYRFFLDSLESLSRIDASQIDVMFIINQYEHETIYKKLKNFRSIKIKLINDSNDIKKLMKGCHLCVAPVMWEENITQIATEIIACGVPILSSSFGSVSELCKSELFIFEGGNTDDFIKKLFHFIEKP

SEQ ID NO: 88463 - protein, 378 aa, Unknown
  Obtained from environmental sample
  DOMAIN (3)...(164): Subtilase family
  misc_feature (1)..(378): Xaa is any amino acid
AVALAKWKKANYPHTIVANFSLGGAFANQFGIDMVELALENDILMVCSSGNDYAGISSFPGSYTGVVRVGATEYRDRRVSFSNRGKDLSVVAPGSAVWSLGRASNASYSSMSGTSMAAPHVTGLVGYMLTFAPDLKPDQIRTYLERNADPIGGQKGFDPRFGYGRINTYKTIGAVIADMSANPPRTPASNYAMTPVKVTVNTGAGAPFNTALVYLHNCSQDGTITSYAGIAQTGTSYAGTRDNAATPPENGVAWFNMLKPGYYKVTSGYSVQDLVTKDVVTAAAESPVFEVKSGLGVAPITLTLDSAPMLYVQTYESMGTPGSSNPDYPGDWIDTQIAIYDEDGLLDEFDEGGLDTFSFGLTTPGTYWIQIFPWSICY

SEQ ID NO: 88464 - protein, 390 aa, Unknown
  Obtained from environmental sample
  misc_feature (1)..(390): Xaa is any amino acid
VLPLAIAGTAEAVTHDSGYAPQPAPRPESSSSAARARAALGAEMDFFYEYEPTAGKAAADVINTAISGAEAAAAGEQFEFTIKNPVSIARQMSAMLPLTDASIEARKLLIFSGASGTNRNQNPRLGAELTNTSGIKLPAGPITVYDGGTYAGDALIEFWNEGEKRLISYGEDLSVIGAITNDSSNTISSVTISGGVMTITRKQEYLKTYTFKNNAALDKLLVIEHPKNHGTTLDYPKADEETPALYRFNITLPPAGLTFNVRELRPIMQRVTLALLRPDEFLSFTSSQELPANVREALQQAVNLRSTLNRSQTAVTDTEKQRTGFVSEQDRIRKNLEAAGGTTQQGQEYLKRLISLDDSIDKIDAELQKLRENVKTAQKAYEDYLGNLKL

SEQ ID NO: 88465 - protein, 212 aa, Unknown
  Obtained from environmental sample
  misc_feature (1)..(212): Xaa is any amino acid
MNKIATLLLLCTLLCVVACEQKYEPQIGTFTDTRDGKVYKTTKIGEQVWMAENLNYEASGSKCNDNKPANCDKYGRLYNWETAMKACQGGWHLPSKAEWEILMVAVGGKIFGHRIAGKYLKATSGWKDYEGGSGNGNDKYGFSALPGGFCLRAVGNPELFVRSGHVGRWWSSSTTDGDGDGAYTIGVSNDLKNTEYIGYLKREFFSVRCLQD

SEQ ID NO: 88466 - protein, 288 aa, Unknown
  Obtained from environmental sample
  misc_feature (1)..(288): Xaa is any amino acid
RGHSRDIGNRAHWWTSSIYYPSLYIDRNYMNYDYNDVVVLFVGMPPDKDLYSVRCLQTNTQPQKITPPACPANDLQKGSFTDARDGKEYKTVKICEQTWMAENLNYEAEDSKCFGEGGKVYNPKTKKDITLSKAEIQANCKKYGRMYNWETAMKVCPDGWHLPNNAEWDKLYRFADGTSGTKRPYMSKTAGKFLKAKSGWKSEDGKSGNGEDKYGFSALPGGLGNASGSFSDFGAYWWSSSRYAYHRSIQHRSEYAYWNKGGSNQSSNQSLSVRCLQNTPTPPKGSAK

SEQ ID NO: 88467 - protein, 178 aa, Unknown
  Obtained from environmental sample
  DOMAIN (76)...(138): Ribonuclease B OB domain
  misc_feature (1)..(178): Xaa is any amino acid
MPKRSTPPLDASAVLDMLRRLQRPARLDDALRALSLHRRKKNDLLILLGALAEEGRIIPFRGGKWAHADIIRMARGALAIQKNGCGFVTPEQPGLPDIFISRHDLGEAWPGDRVEVALLPGKTAHAAGAKPEGRVIRVLERRQTELPVLATRRATPRGIIALPADKRLALKLDVDIGM

SEQ ID NO: 88468 - protein, 507 aa, Unknown
  Obtained from environmental sample
  DOMAIN (397)...(487): Helicase conserved C-terminal domain
  misc_feature (1)..(507): Xaa is any amino acid
MVPFGGRDCLGYIINQKDSPPHGMTSETIKRIRRVVDKEPVFDGRDLELAKWMAGYYFCGLGQALQAMIPSGKRASDFSSLAGDEEITASPLALSDEQQRALDAIIRKERHEPSGAAALFYLFGITGSGKTEVFLRAAEAMLKEGKSVIYLVPEISLTHQTADVIWKRFGNAAATIHSGMSPAARLSEWMRIRTGQVKIVVGPRSAVFAPVLNLGLIIIDEEHDGSYKSGNTPRYHARQTAMKRCAAEGARLVMGSATPSAEAWKLMRDGAIKRLDLSRRLSGGQVPEIIPVSLEKTDGCLTRELKDEIRVTAQMKKQTILFLNRRGFAYYYHCRSCGYELTCKHCSVSLTWYKSRNKAVCHYCGYSVTPPSVCPQCGSLEAGFSGFGTEMIEEEVRRTFPDLRIMRIDADSTEKKGSLKKALDLFKAGEVDILLGTQMVAKGLNFPGVRLVGVILADMGLQLPDFRAAERTFSLVVQVAGRSGRYFRDGKVVVQTLRPWDPAIVKS

SEQ ID NO: 88469 - protein, 269 aa, Unknown
  Obtained from environmental sample
  misc_feature (1)..(269): Xaa is any amino acid
MKSKKIAALFLTAAVLCAVLVTTGCSVRAEAQPVNQPKITPPTPAQSAGQGAAQGAVVYMTDKITPEGLLAVYNALGLEASGKVAVKISTGEPGNPHFLSPLLIKNLVQKVNGTIVECNTAYGGKRANTAAHYQVAKDHGFTAIAPVVILDEKSEINIPVTGGKHLKEDIVGARFKEFNFHIVLSHFKGHPMGGFGGALKNMSIGYASSAGKAWIHTAGKSRSGFSGVQNDFLESMAEAAKAVADQNKGRMLYINVMNHLSVDCDATAD

SEQ ID NO: 88470 - protein, 337 aa, Unknown
  Obtained from environmental sample
  DOMAIN (10)...(337): Permease family
  misc_feature (1)..(337): Xaa is any amino acid
KLQEKGTTVQREIFAGITTFLTMAYILAINPGMLALTGMPWGGVFTATAIASAVATFVMAITANLPIALAPGMGLNAFFTFTVVLGMGYSWQLALTAVFLEGIIFIILSLFKIREAIIDAIPANLRKAVAVGIGLFIALIGFANAGIVVGNTGTVIGLGNVTTGEPLLALLGLIIMIVLFTLKVPGSILLGIIITTIIGIPFGITNIPEGWSPVGTPAAPLFFQFEITPKEIISFKFFIVFFTFLFVDIFDTVGTLVGVTTQAGLIDKNGKIPKVREALLADAIGTVVGASVGTSTVTSYVESASGVAAGGRTGLTSFTTAILFLIALFLSPLFLLI

SEQ ID NO: 88471 - protein, 496 aa, Unknown
  Obtained from environmental sample
  DOMAIN (320)...(441): Shikimate / quinate 5-dehydrogenase
  misc_feature (1)..(496): Xaa is any amino acid
GINTAISPIWRSYGVDCLDADERLYLRRFPELAGVPVILTVRRDVDGGYFNSGEGARLKLLANGLAYANADSRFNFAYVDIEEDFNAPSLEEAARTFGTRIIRSCHDLDGTIDDIPAKIKSMKRAGDEIVKVAVSVKSTHDVLNVFRASSTFIKQDKILICMGHYGIYSRILAERFGSFLTYSSALSENVIPGAPGQMDVRELSELYHFKKITKDTKIYGVIGNPLKSSVSPWFFNTIFNLENADCVYVPFPVTDINDFMDLADGLEIQGLSVTVPYKEEVLPYIEEKSAIVQSIGACNTMYRNRRGDAWYGDNTDYAGFTMSLLNFLGRKDLKRQKITIVGAGGVSRAVAAEIYKMGGKALILNRTVHKAANIASRYNFRWGGLDNHGIELMSKYNDVIIQTTSVGMEGHDESDPIELYNFTGKEAVMDLIYAPPQTPFLKRAAAAGCRTLNGYDMVIRQACLQYVNFFGREIPKKHLTHIDSLGGNKWDKIASG

SEQ ID NO: 88472 - protein, 511 aa, Unknown
  Obtained from environmental sample
  DOMAIN (338)...(459): Shikimate / quinate 5-dehydrogenase
  misc_feature (1)..(511): Xaa is any amino acid
LAKICLCLTGKTIKQNLELLDKYRKFADLAELRVDCLDSEERLYIRRFPEMAGIPVILTVRRNVDGGHFTGGEGARLKLLANGLAYANADSRFNFAYIDIEEDFNIPSLEEAARTFGTRIIRSCHDLSGTIIEDISAKMKAMKHAGDEIIKIAVAVKSTRDVLNVFSASGSFTNQDKILICMGHYGVYSRILAEKFGSFLTYSSALSESVIPGAPGQLDVKELSELYHFRKITKKTKVYGVIGNPLKSSVSPWFFNTIFNLEDIDAVYAPFPVTDVGDFMELAKEIDIQGLSVTVPFKETVLPYLGEKSAIVQSIEACNTLYRKDDIWVGDNTDYAGFSSSLLNFLDRKNLKRLKVTILGAGGVSRAVAAEVFNMGGKALILNRTANKAKEIAELYKFRWGGLDNSGANLMSKYNDIIIQTTSVGMEGYNESDPAEFYTFTGKEAVMDLIYTPAQTPLLKRAAAAGCRTLNGYDMVIRQACFQYINFFGKEIPKKHIDSLGENKWNKITQS

SEQ ID NO: 88473 - protein, 348 aa, Unknown
  Obtained from environmental sample
  misc_feature (1)..(348): Xaa is any amino acid
LILPMKKVCLVVQDKHQDEALAKLREAGIVHLEMSKPAPEKFTAVMERKTQTENAIGLIRQFKIPKVKPQPQSVGGFERRKDNGPRRGRRTSDRLGIEELEPYSADAVNAPDRPELIKLMNNLASERKNLEERIAFLAREQTRIMAWGEFNPDDLKALVSDGIPVYPYEISPAFFKNIPQDVRYIKINEDKAAVRLLVLDKEIPDVPPFKLPESSLSKTGAELHELTGKLDALNERIKNFADRRPLLDKEMAEINSKITFELARAELEKVDGIPDEHSLSCLSGYVPAEDMGKMKVAAAENNWALAVRDPGPDDYVPTKLRNNPLANLISPLTGFLEVVPGYNEVDIS

SEQ ID NO: 88474 - protein, 272 aa, Unknown
  Obtained from environmental sample
  misc_feature (1)..(272): Xaa is any amino acid
MLLRSLNAPLTAIHGIAARMMNENAPRFTRLGIQNVSGLLCHYPRDWEDRRFTVPIAEFGRAKVCTEATVLAHDWIWFGRNRTPKIFIEDESGRAVLVGFNRPWLAKQMEVGNCYRVWGSFEYKRGEIQSSNFEFEEASKAENFNTMLPVYPLCAGLRQAMLRRFTTAAIEQYAALLENELPGEIIERDKLLSKAAAIKAYHYPSSPEELEQARKTLVYEELFYLEVIVGKRALERRGIGNRERGTGTGEQGTGTREQGLGTGEQGTGTGDS

SEQ ID NO: 88475 - protein, 424 aa, Unknown
  Obtained from environmental sample
  DOMAIN (5)...(272): Nucleotidyl transferase
  misc_feature (1)..(424): Xaa is any amino acid
MSDVVSIILGGGKGTRLFPLTQSRSKPAVPFGGKFRLVDIPISNCINADLRQIYIVTQFNSASLHQHIGQTYLFDSFSNGFVEILAAEQTFEHSGWYEGTADAVRKNFPHFRTHKPAYYIILSGDQLYRMDLKELLKNHIDSGAAITIACTPVNRGEASALGILKIDKNCRITEFMEKPGPTKDITDYRVPPELKVEKKIDGDAYLGSMGIYVFNAKAMDDGLENELTDFGKEVIPQAINNLKVNAYLFDGYWEDIGTIRNFYETNLELTALRPKFDFYDEDRPIFTHRRNLPPSKINFGNMNQSIAAEGCIITNGSITDSIVGIRTIIETGSSLNGVICMGADFYETESQKAYNAEARIPNVGIGRGSIIKGAIIDKNVRIGEGCRIGVDNISRTDGNYGHYHVVDGIIVIPKNTVLYPGTVI

SEQ ID NO: 88476 - protein, 473 aa, Unknown
  Obtained from environmental sample
  DOMAIN (141)...(280): ATPase family associated with various cellular activities (AAA)
  misc_feature (1)..(473): Xaa is any amino acid
SDFLGTEHLLFAAMREQDSSVQSYLSHKAVDVDMIRVVVQTTFNRPSVARSDRPFVAANGCPSYFIHRDRPGRYPDQYAVAGAERQPRVRPATYPVLTPTLDTFSRDLSALARAGKLDPVIGREDEMNRIVRILARRTKNNPILVGEPGVGKTAIVEGLAQLLASDKAPEALAGKRILSLDMGSIVAGTKYRGEFEERLKKITREITQSGSVILFIDEIHSIIGAGGAEGTIDASNMLKPGLSRGDIQCIGATTLSEYRKHFEKDPALERRFQAILVEETSVDETLQILHGIRKKYEDHHKVSYTDAAVELTVKLAKRYVTGRFMPDKAIDILDEAGAMRKLEYNDSDEPPEIAGIETEINNLTEEKSVLVNAQDYEHAAVVRDKVRVLRSRLESARIAWEHAYNKEQLKVDEDDIRRVVSQATGIPLMHLAEQKSKKLLHMEAEIHKRVIGQDDAVQRICSAIRRSHAGVSS

SEQ ID NO: 88477 - protein, 292 aa, Unknown
  Obtained from environmental sample
  DOMAIN (196)...(292): Glycine radical
  misc_feature (1)..(292): Xaa is any amino acid
GSIRTGYLYDMQSFDEVKAAVKSLARYLTRAQVSINHYTEYLTMYHCPLPGLSISMEGCMETGRDCTWGGCKYNSYGGTASGLATIADSLTAIRYMVFDKKLCTARELYDAVTANWEGYEPLRQRILNEVPHYGNADPYADEQMKWICDTYYEICGECYSTRTRVFKAGLYSAADHVNQGYHTWATPDGRKTGEPLADAASPAQGRDRNGPTAVVTSARCYDHSKFMDGLALNLRFHPSALKREDGIAKLRDLTKTYMNSGGMEIQYNVVDSATMRAAQKDPDSYRNLVVRI

SEQ ID NO: 88478 - protein, 204 aa, Unknown
  Obtained from environmental sample
  DOMAIN (1)...(186): Mechanosensitive ion channel
  misc_feature (1)..(204): Xaa is any amino acid
MILNIFGVNTASLIALLGAAGLAIGLALKDTLGNIAASISLFFLGSYRLGEFIEFGSFMGTVKEINLFTTIMETPDGICISAPNSCIWGNPIKNYSRNGKRRMELFVHIAYSDSLNAAFTVLNNIIAAETRFLKTPAPQIVVQSLEDSFVNLCVRAWAGNNDYWDVYWFQMRNIKEKIEEAQLHFPFPQQDIYICARQDSNLLP

SEQ ID NO: 88479 - protein, 278 aa, Unknown
  Obtained from environmental sample
  DOMAIN (171)...(277): Semialdehyde dehydrogenase, dimerisation domain
  misc_feature (1)..(278): Xaa is any amino acid
MAKIPVGILGATGMVGQQYIALLNDHPWFDVLYLAASPRSAGKKYKEAVAGRWHLSKTYAPHVGDIIVEDANEVSRAVAAFKKNKCSFVFSALEMGKDETRALEEAYAAADIPVISNASAHRWTPDVPVLIAEINPHHADIIPIQQKKRGWKNGFIAVKPNCSIQSYMIPLHALVQAGYLAKKIIVTTLQAVSGAGYPGVPSLDIIDNIVPYIGGEEEKTEKEPLKIFGTILNGQIQNAVMPKVSACCNRVPIVNGHTACVYLDFGLKKPKSMEEIKE

SEQ ID NO: 88480 - protein, 362 aa, Unknown
  Obtained from environmental sample
  DOMAIN (98)...(286): Adenylate and Guanylate cyclase catalytic domain
  misc_feature (1)..(362): Xaa is any amino acid
LFFILTARQAPVIRASTGFVSALFIFIVSILLFRFTGIYWGPLGAVLAMIGAIITREVISYSGSEKEKKFLRTAFSTYVSDDVVKEIISDPSRLQLGGTKRRMTAIFTDVRGFSTISEQLDPEHLVSLLNKYLSAMSDVILAEKGTIDKYEGDAIIAFFGAPLELKDHALHACLSAIAMKKLETELNKTIMENNLSPLPLLTRIGINTGDMVAGNMGTANKMNYTIMGNAVNLAARLEGVNKQYGTWILASEYTAREAGDSLLYRKLDRVRVVGINEPVRLCELIDLADQADEQQKKLVQVFHEALDYFEKRDWTQAEKGFQETLSIVPGDSPSVLYLDRCKGFLDNPPEDNWDGVYNLTSK

SEQ ID NO: 88481 - protein, 196 aa, Unknown
  Obtained from environmental sample
  misc_feature (1)..(196): Xaa is any amino acid
MGELLSDTRRTLVQLLSGPSLDERRHSKLWSVLLRDENIIRRRLADLFLELVIDRDLQVAFTRQFDTGDLEDAKLLRRSQLTFIDSVLLLYLRQQLAQAASHGERAVVSKEEIVEHLSLYDRQGNTDKAGFDKRVLASIEKIKKYNIIQKIRATDDRFEVSPTLKLLFSAEEIQALTTVYQHMTTDESHDGGGEEE

SEQ ID NO: 88482 - protein, 248 aa, Unknown
  Obtained from environmental sample
  misc_feature (1)..(248): Xaa is any amino acid
MLFENEQFRMSRLQVFNWGTFSGLHDIPISPKGFLFVGGSGSGKTTLLDAFSALLVPPRWIDFNAAARESERKGKDRNIVSYIRGAWAEKEDEASGDISKHYLRPAKTWSALALSYQNEIGQIVVIAQVFWISNNSNATADVKRYFFNFERTFSLNEFDDFGKSNFDIRKLKQLFPDAFIHNEFTPYCERFRRLLGIENEVALRLLHKTQSAKNLGDLNTLFRDYMLEKPETFDAAETLVNEFGELSA

SEQ ID NO: 88483 - protein, 205 aa, Unknown
  Obtained from environmental sample
  DOMAIN (1)...(191): Glycosyl hydrolase family 26
  misc_feature (1)..(205): Xaa is any amino acid
KLLKDKDIPVLWRPLHEAAGNWPQDNPNNPWFWWGASGSEPYIALWEFMYDYLSREKGLNNLIWVWNGQKKDWFPNPDTVDIVSFDYYVTDFSPQTPQNYGSQKVVFDRTAAMVPESESRMVALTENGAIPDPDNCKTDNAMWLWFMVWNDRYGSSQDETHKDNFWTGEHHNTKAHKEKVYKHDLVITLDELPDLTKYKGLGTGD

SEQ ID NO: 88484 - protein, 490 aa, Unknown
  Obtained from environmental sample
  DOMAIN (149)...(331): ATP-grasp domain
  misc_feature (1)..(490): Xaa is any amino acid
MVDTCGGEFEAKTPYFYSIQNGTENEALPFIQKSAKQRIVVLGSGPIRIGQGIEFDYACVHCVWTLKSLGYEVVVINNNPETVSTDFDTADRLYFEPLCVDDVMSIIEIEKPLGVIVAFGGGTAIKLTKKLHERGVNIIGTSADSIDVCEDRQRFDALLENLQIKRPKGYGVMTEAQALDAAEKLGFPVLMRPSYVLGGQNMIIAFSTDDIREYMEIILRSKQENPVLIDKYLEGMEIEVDALCDNCLSPDGKGGDVLIPGIMEHIERTGIHSGDSIAVYPAINIDDALAERILDVTKRLCMALDVKGLVNIQYVLYENDIYVIEVNPRASRTVPYLSKVTGIPMCELATKMSVGQKFSTLGISPGIGKIPPYVAVKVPVFSFEKLAGVDTHLGPEMKSTGEVLGIGKNLQEALYKGLIAAGYKIKKRGGILITVRDSDKAEIRDVAEKFVRAGFSLYATRGTTRYLKEKGFEVQPIDKIWIIRKSIRKP

SEQ ID NO: 88485 - protein, 158 aa, Unknown
  Obtained from environmental sample
  misc_feature (1)..(158): Xaa is any amino acid
MGEVWEYDEKSGEYYLHLFDKKQPDLNYKNPRVIEEIKNILRFWLDKGAAGFRCDVINVLYKSNLEDGRKSMTVCGIEHYKSQEGNHAILRELRRDVLDHYDCFTVGETVMVDLDEAKLLCGESRKELDILFYFEHLEIDRRIARFIPKKFRARKLLE

SEQ ID NO: 88486 - protein, 603 aa, Unknown
  Obtained from environmental sample
  misc_feature (1)..(603): Xaa is any amino acid
MAAVLATGSASISVNSDETEARLLFVPNPEGDGWDVAAVNKLAADKNLGANPDQKAVETFLSKASRAKNSEPLEMVYAQGILPEKPVPEKVNWAALPVPEDMAPYQEEVLEKAGAPQVFRVVVEKIKHESTVKKGRSLIPGKEETSVTWEKKETREKVNVDAKVLEVKYAEKGAVLGSVSPPVPGKNGRSIFARPIPPEILENPNFLLGNGIVKERNELTAQVSGFVRIGDNWADIVPLAKHSYKINTGSDGLTLFFNFEPGDKRFTPPTGEQILAEAVVMGGGEENFVSAVELDNAIDEAIKTGTPVEAFALFNPQEAEARVDINQDKTRAALYLRKGVAGAQPLEMKAISLAIKESNIHGFDSEKLKTVIHEFMESNEIVLSDYVLVEGVSSTRGEDRYVKVSVKAFPEEGKKPVIMRLQDWFSRDVSKAPKLNINESLNFAFVENGQIIAKISEGKEGKDGKDVFGNVIPGLPGNDPELKLLAGLELHGSEIKAAQDGMLLFKASEKSFIGEVIVYQDARIGIHISEDAMEVKGDFFLEAGPGIPITIENVKKVIASYGINKGIDWLGLEKALRPYPRAWKHSGPYCRARRKSHSPGRFR

SEQ ID NO: 88487 - protein, 93 aa, Unknown
  Obtained from environmental sample
  misc_feature (1)..(93): Xaa is any amino acid
YRIADKIIQSEDDSFGLSDKDIEDRFQEAGIEAEIDFEAKMDYVEDLLHSGALSHGDLIETVKSQQLEISKLKKENNFIKLKLSKAFAKGFEP

SEQ ID NO: 88488 - protein, 263 aa, Unknown
  Obtained from environmental sample
  DOMAIN (108)...(219): Domain of unknown function (DUF955)
  misc_feature (1)..(263): Xaa is any amino acid
MAKLGWIEKFRDKILKLDALLRFFAIASPQRWETIWGHELQAAFRKKDSSPKDAAIISAWLRKGEINAQQQSCEPFDKQKFRNSLAEIRSLTAIEESKVFVPKLKSICAASGIAVVFVRALPKLGIYGATRRLNDKYIMQLSLYRKSNDQLWFTFFHEVCHIIKHSHGELYIEGHGQEDEKENEANAFARDMLIPPKELSNFLASTFNPTLPQVKRFASQIGIAPGIVVGRLQHDKILPMSWGNDLKFDMSGQVEGVIYILFN

SEQ ID NO: 88489 - protein, 202 aa, Unknown
  Obtained from environmental sample
  misc_feature (1)..(202): Xaa is any amino acid
IHDHKELILHALSICDSDISDIKIIQEKVAMPSLPLRLQFPSHSQEQKISLACFETVHSLSSETTFDIESEESTGTVQLFNMLFLLLDVVCNGKSIMLDEFDLSLHTKLADFVIDLFHASSKSQFLFTSHNTNLIDVKRFRRDQILFTNKRPDGSTEVYSLYDHKDFRENMDAEKGYLQGRFEAIPYVDSSVANLKKLLGNI

SEQ ID NO: 88490 - protein, 604 aa, Unknown
  Obtained from environmental sample
  DOMAIN (94)...(495): Alpha amylase, catalytic domain
  misc_feature (1)..(604): Xaa is any amino acid
MLSLHSKIREVCAHPLGRDIVDKLLLELGKPAWLVDNPIVGNMSIGGIKKFMPRRLGPGFISTLLDLLNSEPDAPADNPVTPRPAWWKEAVFYQIYPRSFGKNGASCVLRGILSKLDYLRDLGVDAVWLSPVYDSPNDDNGYDIRDYYKILPEFGAMEDMDALIAGLHERGMKLVMDLVVNHTSDEHPWFKAALRDEKSPYRDFYFFRKSGGRPPNNWTSFFSGPAWNYYPKQDVWALHLFSKKQMDLNWECPALREEIYKMVRWWLAKGVDGFRLDVINYISKNPGLKNGDPFIGSLLTYTGIEHYFYGPKLHEYLKELRAKAFDPYNAFSVGETPGIGVQTGRLLTDDYRRELDLIFIFDHLVSPGHTRFDNHRYSKSYLKRFYQTHLNADLGHGWNTLFFNNHDNPRMASKIDPEGKYTAPLTKLLAVLQLTLRGTPFLYQGDEAAVCNVKFSSIDEITDVESKGLYAELIKTMPPDKAFKQILAGTRDHARAPIDWEEHERLRGTPDSIWCFYRDLIILRRSSKALIYGDLEFLRPRDKKILCYTRRLGNECFYIEANLSHDKGRCKAKPDMVLLFGNYGKTAGKTLRPYEARIYHTKEK

SEQ ID NO: 88491 - protein, 484 aa, Unknown
  Obtained from environmental sample
  DOMAIN (220)...(442): Methyl-accepting chemotaxis protein (MCP) signaling domain
  misc_feature (1)..(484): Xaa is any amino acid
MRDVDVVYGKYMDEAVKAVQNGENYRCTSFSPALNTNLAINIQSFPMGSSGRSWSVMLAATESYVLKEVKFLTKITIIIAAVAIVIAAVIVFLTLSATTAPIVEVANTLKDISEGEGDLTKSIPVKSDDEVGDLSRYFNKTIQKIRGLVLLIKQQAGVLSDIGNDLSSNMTETAAAINQITANIQSIKSRVINQSASVTETNATMEQVIANINKLNNHVENQSRNVSQASSAIEEMVANISSVTSTLVSNTANVNSLKEASEVGRAGLQEVATDIQEISRESEGLLEINAVMENIASQTNLLSMNAAIEAAHAGEAGKGFAVVADEIRKLAESSGEQSKTISTVLKKIAESIIKITGSTDKVLARFELIDSGVKTVSLQEENIRNAMEEQGQGSKQVLQSASSLSELTMQVKSGSHEMLEGSREVMNESRNLEKMTQEITNGMNEMATGADQVNVAVHNVSEISAKNRESIDNLLKEVSRFKVE

SEQ ID NO: 88492 - protein, 666 aa, Unknown
  Obtained from environmental sample
  DOMAIN (111)...(206): Glycosyl hydrolases family 2, immunoglobulin-like beta-sandwich domain
  misc_feature (1)..(666): Xaa is any amino acid
MQGFFTWEGVCWYRREFLLSGIDGNAAYVYFGGAYRSTQVYVNGTEAGGRASRYSSFEVDITEFVKQGKNLIAVRLDNGCEAPDRWYSGSGLYRNASLKILRVTHIKTWGVHVEAKQNDVTVTTTVVSRVQSATGSVILQILKPDGSLAAKDAVTFDMSGKSEITVKQKLRIKTPALWSSENPNLYRAVVNLETGAQGIPEEVNFGISTVKIEYKKGMTVNGKKVKLKGVCLHHDCGITGSAYYDEAWRRRLLTLKSIGCNAIRTSHNPPSQEFLDLCDELGFYVVDECFDKWKSGYYAAHFDADSKRDLTDFILRDRNHPCVIMWSVGNEAEAQGTDSMLAIQKSLVDIVKSLDSRPVTCALAPHANPRTLVGAPVDELVKLTKKLAKDVDVLGLNYHEPLYQAYTAGINKPILGTECYEFYSSVGTNFEDVSTKNPWRFVLENNNVIGQFIWAGIDYLGESPWPAKGWTGSILDVCGFMKPNAFFRKSIWTDEPFVYLAFYDQERKPDYARGRWSFPSMASHLNFDHFHRKNVKAAVFSNCEETELWVNGKKMGRRKGADFENGIIEWPLEYNSGSMEVKGFNKGKEVCSYILKTAEKAQKIKLLPDKTKLKAGEIAHIEINITDKSGLLCPNEEELIGFTLTGDGEFLGACSGDLCSNLGFTL

SEQ ID NO: 88493 - protein, 156 aa, Unknown
  Obtained from environmental sample
  DOMAIN (10)...(109): Flagellar hook-associated protein 2 C-terminus
  misc_feature (1)..(156): Xaa is any amino acid
MSDVYIPGVKSRFNSEKIVEDLMKIERIPRDRTQNNLDNLRVQKTYWQEVGRRITSLRDSSRLLYSFQNPFNEKLGRSADDSVITATATRDALEQSLSFTVKQTAQADRFLSQPLDEKTRIEAGNYSFSVGNDEISINYRGGTLRNFAETIITEAE

SEQ ID NO: 88494 - protein, 111 aa, Unknown
  Obtained from environmental sample
  DOMAIN (8)...(110): FlaG protein
  misc_feature (1)..(111): Xaa is any amino acid
MSVVASVGFNSVSPMLFPEQERTVRQPAVEHQPEKKPKPQVHHSTTADLEKIGLAFNRRLQFVVDHSSNQVIIKVIDKETDKVVKELPPEELQRLHSNLKEAIGLLFDEMV

SEQ ID NO: 88495 - protein, 211 aa, Unknown
  Obtained from environmental sample
  misc_feature (1)..(211): Xaa is any amino acid
MHVFNKKEFIELNKHKCSELHYLDFNGINIVLGEKSGELYSHFSAPFGGFSSLQKNPSLEIMESACEKLYEWLKEKNKKCHITLPPPIYNESLVSLSFYSLQNRGFSIEYTDLNYSLNLSKSLQPSPNFCRDLKVALKKNMLFKKCESISENEIAYEIINTNRKERGYPPHLSFEELQKTKKVCDIDCFLLYLDEIPIAGAFVYLTAPEIA

SEQ ID NO: 88496 - protein, 293 aa, Unknown
  Obtained from environmental sample
  misc_feature (1)..(293): Xaa is any amino acid
MGFFDRQGRGRALLTVAAAVCFGLTAAGCGGNAARLAKGAASKTAFTDERSGQTYKTVKIGKLTWLAENLNYPTENGSWCYDGDDSKCAQYGRLYDWKTALTVCPSGWRLPDTADWNDLAKAAGGSDEAGKKLRSKRDWRDNGYIVGDDTYGFSALPGGGRNAEGAFSDVLEVGRWWTATEGADCPMDYADCNAFTAGKAYSRYITLDYSNLMDNGSDQKYGYSVRCVVGESKAANIETDDISISVFGVDEEDFKKKYKSYESFIQHDEYAQRIAFVPNVRVKDFSWLSMGVM

SEQ ID NO: 88497 - protein, 113 aa, Unknown
  Obtained from environmental sample
  misc_feature (1)..(113): Xaa is any amino acid
VHNYGTGKITVSQDTATPTLVTSANTSDTQGTIVLSSSGTATAARLEMTGGTVENTSTTTGNAIRNSSTGAVTISGGTVRATGASTYSIYNSSTGVVTVDPTATIEGARYPAP

SEQ ID NO: 88498 - protein, 287 aa, Unknown
  Obtained from environmental sample
  misc_feature (1)..(287): Xaa is any amino acid
FYDWDREVDTSAEDYYRWTQWIFLKLFEKGLAYEAESPINWCPSCKTGLANEEVKDGLCERCGEKVTRKRIRQWILKITAYAERLLADLDLLDWPEPVKLMQRNWIGRSEGANVTFKVDKSTLKNNEDLSFEIYTTRPDTLFGVTYMVLSPEHPLVDKLTTPEQKQAVASYIEAAARKSDLERTDLAKEKTGVFSGAYAINPVNDQKIPIWIADYVLISYGTGAIMAVPAHDERDWEFAVTYKLPIVEVVSREKNLTGNGAMDTNEGIGNGELGVGSRDDNKNIQRF

SEQ ID NO: 88499 - protein, 792 aa, Unknown
  Obtained from environmental sample
  DOMAIN (669)...(790): Anticodon-binding domain
  misc_feature (1)..(792): Xaa is any amino acid
MVKYPFETIEPKWQKYWAEHKTFKAAEDPAFPKDKRCYVLDMFPYPSAQGLHVGHPEGYTATDIYCRYLRMNGYNVLHPMGFDADGLPAENYAIKTGTHPAVTTAANVNRFRAQIKALGFSYDWDREVDTSVEDYYRWTQWIFLKLFEKGLAYEAESPINWCPSCKTGLANEEVKDGLCERCGEKVTRKRIRQWILKITAYAERLLADLDLLDWPEPVKLMQRNWIGRSEGANVVFKVDKSTLKNNEDLSFEIYTTRPDTLFGVTYMVLSPEHPLVDKLTTPEQKQAVDSYIEAAARKSDLERTDLAKEKTGVFSGAYAINPVNDQKIPIWIADYVLISYGTGAIMAVPAHDERDWEFAKEFKLPIILVVSADKPQAGKDYSKEPAECTSADGYSVNSGDFTGLPTEEAKKRITQWLEEKGIGKRAVNYKLRDWIFSRQRYWGEPIPVVHCEKCGIVPLSEKDLPLKLPQVKSYAPTGTGESPLAGITEWVNTTCPKCGGKAKRETNTMPQWAGSCWYYIRYLDPKNDKAFAAKDKIDYWLPVDLYIGGVEHAVLHFLYSRFWHKVLYDLGLVNSVEPFQRLVNQGMILGEDNQKMSKSRGNVINPDDIIKEYGADSLRVYEMFMGPLEVSKPWNMAGVTGVSRFLERLWAISEKPVNDAKPGSEQAGGAELQKLLHRTIEKVTKDTSTLNFNTAISAMMIYSSELVKLNEIPRSMWEPLVIMSGAYAPHLGEELWEKLGNKESVSKSRWPSFDPTLTVFDEVTIVVQVGGKIREKFTAAAGTAKEELKKQP

SEQ ID NO: 88500 - protein, 294 aa, Unknown
  Obtained from environmental sample
  DOMAIN (133)...(166): Tetratricopeptide repeat
  misc_feature (1)..(294): Xaa is any amino acid
MILADAAAVEGKERERRTFLDKVIALEPNNVRALNDLANISLKNQNLRVAANYFDKVLAVEPNNGEALVGRATVYRYTREQRNAERLLNKAMSLHPDWARPLHERARLYKSAGLYNDALDDLNAALSLEPNNYWVLVDCGQILMEMNRLQEALKYINRAIAVEPDVFMAYVYSAAIKDETGDYSGAEKDYLSLTKLKPDYYFGFEALGVLRMRNKQWAAARDAFLDAYKQAPREYTYALLAAINWMRAGKQTDPKQFLAQVLRTVPKDTPEYLLLKLYYDLSGDSNVAASWKAR

SEQ ID NO: 88501 - protein, 288 aa, Unknown
  Obtained from environmental sample
  DOMAIN (19)...(260): Ribosomal RNA adenine dimethylase
  misc_feature (1)..(288): Xaa is any amino acid
MTLNYNSASALRAFLDQEGLGMQKKFGQNFLINPETRKALVQALDAKSGDEVWEIGPGLGAMTAMLLENGLKVKAFEIDMGFIRVLKNIFAENKNFILVEGDVMKTWRTHQAAPFLFGNLPYNVAAALLADLIENDCIFSRMVVTVQKEVALRMAATAGKPDYSSFSVLCASAYKVKPLMTIRPSSFYPQPNVDSMAVLLEKKASQKYPAVFYPLVRALFASRRKTIKNNLLTFLSSRFGDSLQNKSAVQEFTASVLQSNSLNGTERAESLEQETFLSLALSIDNMRL

SEQ ID NO: 88502 - protein, 118 aa, Unknown
  Obtained from environmental sample
  DOMAIN (14)...(116): Cell division protein FtsA
  misc_feature (1)..(118): Xaa is any amino acid
MSLRRHILSNEELVVGLDIGTTKVCAVIGEIDGNGLLEITGVGTSPSTGLRKGVVVNIEATLRSVSQAIEAAEMMSGREVHEVWTGIGGSHIDGINSRGVVAVTGRGRETREIEATIS

SEQ ID NO: 88503 - protein, 541 aa, Unknown
  Obtained from environmental sample
  DOMAIN (141)...(229): MGS-like domain
  misc_feature (1)..(541): Xaa is any amino acid
MALNVKGLVNIQYVLYENDIYVIEVNPRASRTVPYISKVTGIPMCELATKVSIGETLSSLGYSSGIAKIPPYTAVKVPVFSFEKLAGVDTHLGPEMKSTGEVLGIGKNLEEALYKGLVAAGYKMKKRGGVLITVRDSDKAEIIDVAEKFALAGFSLYATRGTARYLAEKGFEVQATDKISDNKDNNTATLLESGKISYIISTSEKGRDPANDSVKIRRRACTLGVPCLTSVDTANALADGLLSGYSEINTELVDINRLRSEQTKLAFTKMHTCGNDYIYFNCFEMEINSPESLSVFLSDRHTGVGGDGVVLILRSSFADAKMRMFNLDGSEGSISGNAIRCVAKFLYDNGIVKKRDMRIDTKSGVKELYLSTRNGAVSSVTVDMGRAELRPEKIPVNLAGENVIAKKVTIGGKKYEITCVSMGNPHAVVFHDNLDDLDLSEIGPLFENDALFPDRVNTEFVRVVTRNRLKVRLWERGSGETLASGTAACASAVAAVLNGHCDKDTDIKVQLPGGDLIIRYTDEAVYMTGDCIKVFDGTVDI

SEQ ID NO: 88504 - protein, 284 aa, Unknown
  Obtained from environmental sample
  DOMAIN (2)...(58): DnaJ domain
  misc_feature (1)..(284): Xaa is any amino acid
LNYYELLNIERGADANEIKRAYFSAVRLHSPDSDPEGFKAIRLAYETLYDPKKRAEYDGYFVTSGDAQNDLLAARSLIRENKYKQAMDFLTELNEKNPDSADVKRLLAEVLWYLKKSGAADKMCEDLLEHDPSDCKTLLLRAKIAKSRRYVDKAGGYYIDAVKADPSNPRAWSEYMRYAIKNAPHDVPNIFYRAMEQDINMFREDYILYIVGANNKNLFNIEYNLKYYDKFAEFYINDKNPEENIYPQVMTLMTRFLEQAELIPFVEKYCPRLKKSNNTRIKTK

SEQ ID NO: 88505 - protein, 356 aa, Unknown
  Obtained from environmental sample
  DOMAIN (1)...(350): Protein of unknown function (DUF1703)
  misc_feature (1)..(356): Xaa is any amino acid
DIHIELRDELKAFYGVLKSCDDYLRFVFITGVSKFSHVNLFSGMNQLVDLTFAPDYADICGLTQEELEAGFGPEIEGVLESTGRNREEYMDELRLFYNGYRFSKAPLTVYCPFGLLKHFDNGGEFSDYWYETATPSFVVDLITNNKVNILDMSDMQVVQSDFGKYDIDNIPPMPLLCQTGYLTISDYDADYGEYTLDFPNNEVRACFAGSLLAQYSVVSSADRLDAKFIRAIMHGDLNAAMDTLSRFFAAIPYEIVDDKEKYFQLVAHLIFMMLGFNCRSEVRIAAGRVDTLVVTRDFVYCFEFKLDGSAEKALAQIDTKEYAVPWTGSGKKVFKVGVNFDSKKRNIVEWVSAVSG

SEQ ID NO: 88506 - protein, 552 aa, Unknown
  Obtained from environmental sample
  DOMAIN (334)...(453): Carbohydrate binding module (family 6)
  misc_feature (1)..(552): Xaa is any amino acid
MTDSRVFRRYAGGLFFLAAAVFCACTQVPEYCGDGDSPFDFKNQYCQDGVAHPKTPDKPPQTYTLTVNRNPAAGGTTDPADSQTDITAGTSVDISATADTGYTFTNWTITGSGVIASANNASTSVTVNGNVTVRANFTQNQSQYTLTVNRAPTAGGSVKVANNDYTAPVTVNGGTATSISAAAASGYTFTNWTVTSGSAQINNANSASTTVSLSGNATITANFTQNPTTPTKYTLTVSRLPDNGAGTVKVSNADYSAPVQVDGGTAVNIAAASAANYKFTNWTVATGTASIANAGNATTTVTLSSNATITANFTSTVVTPPGGGSGRTDTIKVEAENYTSNNGANMQTGAIEGGGLCIGYIENGYSTTYNNVNTPKAGNYTMLFRIATGTERSSFTVSVNGQNVGTVSTNNTGGWDTYVTVAIGSDVKLNAGNNTVVLNFQNAVNVDYFLLLGEPTVTSPPPNSVKYNAAKAANARTQIALRPAVRGFAAALPTGHGFTSYKVIDLQGREVKSGRIGGSTTELSVTGLKHSVVFLRLEGKNQTPLSLKVVTY

SEQ ID NO: 88507 - protein, 169 aa, Unknown
  Obtained from environmental sample
  DOMAIN (22)...(169): Electron transfer flavoprotein domain
  misc_feature (1)..(169): Xaa is any amino acid
VNIVVCIKQVPGTTQVKINPETGTLIRDGVEAVVNPFDEYAIEEAVRIKERAGGTVKVITMGPPQADAALRSAIAVGADEGYLVSDRAFAGSDTWATSYTLSSAIKTLGKVDLIICGKQAIDGDTAQVGPGVAEMLNIPFVAWVRKVEDITDTSIKVERLMEEGYDGLR

SEQ ID NO: 88508 - protein, 216 aa, Unknown
  Obtained from environmental sample
  DOMAIN (65)...(188): Bacterial type II secretion system protein F domain
  misc_feature (1)..(216): Xaa is any amino acid
MPKFDYVGVSDGKQVKGEIEAASRDAASQILRKKRIRATSIKSKGVELKMPKLFSGIKLQDISRFTRQFSAMVSAGLPLVQCLDVLGAQTESQELGAAIKQVSADIQGGNNLADSMAKFPKAFNSLYCNMVAAGEQSGNLDGVLTRLAEYQEKADALRRKIKGAMTYPAVVAVVAAGATVAMLAFVIPTFAQMFIDMGGSLPAPTKVVMALSDMLL

SEQ ID NO: 88509 - protein, 120 aa, Unknown
  Obtained from environmental sample
  misc_feature (1)..(120): Xaa is any amino acid
MKFTPTIVSAEEAVKVVKTNNRIHLHSVACTPQKLIQALCERGRRKELANVRLQHLHTEGPAPYASAEFEGVFQLESFFVGHNVRKDTQEGYADYIPIFLSETQRLIREGYCRPNVVMVQ

SEQ ID NO: 88510 - protein, 171 aa, Unknown
  Obtained from environmental sample
  misc_feature (1)..(171): Xaa is any amino acid
ALGTKVADSKLTLRTVPLDPLVVSGERFTVDGFESRDMDIIREGVLENFALTLYGSRKSGRPRALNSAFENIEVASGDKPLQEIIRVIDRGILMNRFSGGSSGASGEMSGVAKNSFLIENGKVTDALKETMVSFDIVNVLSNITAISSERCRNGVTILPWCCFDGITISGK

SEQ ID NO: 88511 - protein, 268 aa, Unknown
  Obtained from environmental sample
  DOMAIN (10)...(268): IMP dehydrogenase / GMP reductase domain
  misc_feature (1)..(268): Xaa is any amino acid
MAKIIDEVSRTFSEYLLIPRLSCADHQVGNVSLCTPVTRFRRGAGETPRFSLNIPFVSASMQSVSGPEMAIALARQGGLAFIYCSQTIEAQAAMVGKVKAHKAGFVPSDSNLRPDATLADAVALSKRTGHSTIPITDNGSGNGLFLGILTDKDYWEFDDDLSRPVREFMTGRENVILAHVGISLHDANVQLHKCKKECLPILDAKEHLHSLVFKKDYVDHINNPHELLDRQKRFAVGAAINTHDYKERVPALVEAGADVLCIDASDGY

SEQ ID NO: 88512 - protein, 587 aa, Unknown
  Obtained from environmental sample
  DOMAIN (32)...(222): ABC transporter
  misc_feature (1)..(587): Xaa is any amino acid
LSSVVIFENFSFQYRAQTEATLIDINLKINRGEKILILGPSGSGKSTLIHCINGIIPHDLKGEISGRCLLLGKDVSGYDIFSISKIAGTVLQDTDGQFVGMSAAEDIAFALENDCVPMEEMRLRVPKTAALVDMEAHLNNPPHDLSGGQKQRISLAGILVDDVEILLFDEPLANLDPRAGKDAIELIDELHKKTGKTVIIVEHRIEDVLYRPVDRIVVMDKGRIIADRIPAEILASDILRKTGIREPLYLSALEYSGMTIDSSMEPQQLDTLKVDYQRLVEWDRQLAGIRAVRDAEEKPCVQAGLEAGLQVGLQVLDIRFRYAKQGPEALKGVSFSVAPGECVGLVGKNGSGKSTLAKCICGFVLPDSGAVYYRGQDLAALSIMERAEKIGYVMQNPNQMISSPMIFDEVALGLRTRNIPEADVKTRVYEALKVCGLYPFRNWPVNALSYGQKKRLTIAAILVLRPSLMILDEPTAGQDYRHYAEFMEFLLGLNRDMGISLLLITHDMHLMLEYTSRAVVLSEGACIADEEPFEALTNDGIIEKASLKRTSLYSLALKAELPDPRGFVGRYIAFERQRAFDKQGGGI

SEQ ID NO: 88513 - protein, 92 aa, Unknown
  Obtained from environmental sample
  misc_feature (1)..(92): Xaa is any amino acid
MVDRIGPVDPIQPGKIPGKSEPLRGGGKDTINLSPEAKEKAEIYQVIELIKSAPELSESEIIALREKINDPSYLNERTIGATADRIMDAFGL

SEQ ID NO: 88514 - protein, 525 aa, Unknown
  Obtained from environmental sample
  DOMAIN (1)...(70): B12 binding domain
  misc_feature (1)..(525): Xaa is any amino acid
IDDFIEADVLELLIQQKAALEIIEGPLMDGMKEVGKRFDEGTVYLPHVIRSARVMKKAAAALEPYMGKTDNVATLGKIILATVKGDVHDIGKNIVGIVLACNGYQVIDLGVMVPAEQILDTAEKEQAAMIGLSGLIAPSLDEMAHIAREMEKRRMKIPLLVGGAAASLIHTSLRLVPEYSGPVVYVPNAGKSAETVRALLSDLLRPRFLRELEKNYQNAAWRHEELLSRVEIISLENARANRVPPAAYKPAAPKKAGIIDLDNYSINRVIPYIDWQSFLRGWETKGPQSREPAKDKAPAPAADTILDDAKRLLEQVETKGLLQLRGVAEIFPASSDNEHVFIGDTHHIIYDGHFHRFYFKRNLQKKPAGVFNPCLADFILPAQNGQAVDWLGLFAISAGFGLETAAEQYRHNSDDYSALLLASLANSLAEAFVEELHLRVRREWWGYAPEESLTIEEILKGKYTGIRPAFGYPSCPNHEDKRIAFELLEAEKRCGLKLTDTAMIIPAASVCGMFFASPAAYYFSV

SEQ ID NO: 88515 - protein, 654 aa, Unknown
  Obtained from environmental sample
  DOMAIN (474)...(598): B12 binding domain
  misc_feature (1)..(654): Xaa is any amino acid
MAACVEKYLQEGLLNVIGGCCGTTPAHIAAIAAKAAQHKPRVLPQSPTPWPLILAGLDLLAINTPSLHSQTPVPCSLFPVPTFIGERTNVSGSRKFLRLISEGKYNETLAFARSTIEDGAKIINVGMDDAMLDAESSMCAFLDLALSDPEIARVPVMIDSSRWSVIEAGLKRLPGKGLVNSINLKDGEAEFLRRALLIKHYGAAAVVMLIDEKGQAVSYDRKIEIAGRAYRLLVDAGFPVENIVFDPNVLAVATGISEHDACGIDFIRACAWIRDNCPGVNISGGISNLSYSFRGNNKLREAMHSVFLVHAQAAGLSMAIVNPAALIAYNTIEEDLRAAVEDVILNRSQGAAERLLELAEKIAASGSPLAAAAHTPDWRNQPVEKCIVHAMLRGIDDFIEADVLELLNRPSSSLSALEIIEGPLMDGMKEVGKRFDEGTIYLPHVIRSARVMKKAATALEPYMGKVNANGSNAPKIILATVKGDVHDIGKNIVGIVLACNGYQVIDLGVMVSAEQILDTAEKEQAAIIGLSGLIAPSLDEMAHIAREMEKRRMLIPLLVGGAAASLVHTSLRLAPEYSGPVVYVPNAGKSAETVRALLSDSQRPRFLQELEKSYQEAARRHEEIQSHLELISLEAARANRVPSAVYKPVAPKTA

SEQ ID NO: 88516 - protein, 271 aa, Unknown
  Obtained from environmental sample
  DOMAIN (15)...(269): Homocysteine S-methyltransferase
  misc_feature (1)..(271): Xaa is any amino acid
MSVREKLNAIAAKRILVLDGAMGSMIQNLKLGEDDFRAGRQGGRGRFAGHKTPLAGCNDLLCLTMPQAISAIHEAYLKAGADIIETCSFNSTSVSLEDYGIGDLAYEISAAAASIARKAADAFSSADKPRFVAGSMGPTGKSAGLSPDVNDPAKRSIYWDELEAAFYDNARGLLDGGADILLLETIFDSLNAKAALFAIRRLLEERNIDVPIIISATITGESGRLLSGQSLEAFCASILHAEPWAMGLNCSFGAENYCPTYAAFPRLRPVL

SEQ ID NO: 88517 - protein, 386 aa, Unknown
  Obtained from environmental sample
  misc_feature (1)..(386): Xaa is any amino acid
MVNSNENLLKVLSGTNPWWRTGKLPDGIAKPVKRFAYFEGMKILQHPDIRRIAVLTGARRIGKTTIMYQMIEDLLKQSIAPQRIVYISFDHPLLKLCGFDTILDVYRQNIYPNDDIYCFFDEIQYSDDWDAWLKILYDTNTQCRVAATGSASPILAGKAVESGVGRWSVLSIPTLSFYEYCTLLGVKAPELAPEIKPTGLRKLSPHEQTMIFQKLSPLLLHFNRYLAVGGFPELALSKDEFYAQRVMREDVVDKVLKRDIPALYNIRSVVDLEKIFLFLCYNSSSIISMEAISRELNGVSRPTVEKYIQYLESANLIYVSNPIAIGGKKILKSQPKIYIADAAIRNAVIMQEDLLTNPAEMGLMVETAVYKHVRSFYYRLTANVGY

SEQ ID NO: 88518 - protein, 275 aa, Unknown
  Obtained from environmental sample
  misc_feature (1)..(275): Xaa is any amino acid
YQNLPPFVKGELSLHTWNEDRRNEILELFRSEVYGRIPDESSLSVSQRVADTSPGFMDNRAARKIIEITVKRKDREFTFPLYLFIPNGADKKPVPVVLTIVNRELSDADPSRKSLSPFWPAEMMVSRGYAAAAVITHEIAPDYEENFTTKFHRLFPEYVTNHPADAWGSITAWAWGMSRAIDYLVTDPAINNKEIAIAGHSRGGKTSLWCGAQDKRAALVISSCSGCSGTAITRGKTGEHIKEITDRFPFWFCPNYRKYAKHEDIMPFDQHLLLA

SEQ ID NO: 88519 - protein, 297 aa, Unknown
  Obtained from environmental sample
  misc_feature (1)..(297): Xaa is any amino acid
GLDDKLQKKITIVSGNRVSLEDVKKLNIDKCTQVFLFGEPHEDDHDSKNVECLGIIKDIISESDPEKNIRCHVLFNHHLTFAAIQRHEIPGIRKNIDFVPFSFYDMWAQKVFVANSYNEGEVTYKPLDHEPITEGSDKRVHLVILGMSNMGVALAVQAAQICHFPNFITKGIKTKITLIDENADSEMAGLKFRLRHFFDEIDYSFQSFTKIKRYSNASMKKFTDLEFEFIEARFEDDEVQRLIEKAASDKTSFLTIAIAQENSSDALAAALCLPSSVYESEVSVLVRQENSYAIVSM

SEQ ID NO: 88520 - protein, 56 aa, Unknown
  Obtained from environmental sample
  misc_feature (1)..(56): Xaa is any amino acid
MTSPHYITEIKQIIISARSKAHTAINSAMIEAYWLIEKRIVKEEQNGKQRAAGGIR

SEQ ID NO: 88521 - protein, 536 aa, Unknown
  Obtained from environmental sample
  DOMAIN (294)...(510): Peptidase C26
  misc_feature (1)..(536): Xaa is any amino acid
METKYIFVTGGVVSGLGKGITAASLGRLLKQRGLKVAAQKLDPYMNIDPGTMSPFQHGEVFVTDDGAETDLDLGHYERFIDENLTKFSNLTSGKVYWKVLERERAGGYLGGTVQVIPHVTEVIKEFIYAGAKGTGADVLITEIGGTTGDIESQPFLEAIRQISLEKGRENCLFIHVTLIPYLKASGEHKSKPTQHSVKELRAIGISPNIIIARADEPISDGITDKISLFCNVKPDCVIDNITIPFLYEAPLLLHQNGLDKVVCRELGIDAPEPDLNEWSVMVKKIGERKREVNIAIVGKYVQLHDAYLSIIESLNHAGIEAGSGVNIQWIDSEDVTNESAGGLLREADGMIIPGGFGDRGIEGKINACRYARENNIPYLGICLGMQIAVIEFARNVCGLERANSSEFDETSPHPVIDIMPGQAGMLGSGGTMRLGAYPCKITKGTILSRLYDSEEISERHRHRFEFNNAYLESLTNKGLVVSGASPDGSLVEAIELPNHRFFTAVQFHPEFKSRPNKPHPLFLGLVKAAFSMRGER

SEQ ID NO: 88522 - protein, 554 aa, Unknown
  Obtained from environmental sample
  DOMAIN (178)...(245): Elongation factor Tu domain 2
  misc_feature (1)..(554): Xaa is any amino acid
ISRLYRVLGDIKEKFKVQPVAVTLPMGSGGGYKGVIDVLHEKAYVMQGEALEKEEAIPPEFKDAVAAAREKLIEAAAEGDDGLMEKYIENGSLSADEMKKGLIEALAENKYVPAFAGAPLKNSGVLPLIGFFVDVSPNPRTAKDAVIDAEGNETPVAIDPDKPMSALVIRTNYDQFSGKLSWIKVITGKLVSDTEVHNVTENKKERIGKLHTCQGKKLEEVKELSAGDIGIITKAATLKTNDTLAAGDSKNFVHLRLPEPVHSVAVNAVQKKDEDKLGEFLVRAAEEDKTFRYHYNGETKESVISGMGELQINIILDKIKHNQKIEVETHVPKIAYRETITKKAGAEYTHKKQTGGHGQYGKVVLEISPLARGESYQFVNAIFGGAIPKNFIPGVEKGIVEGMAHGTMASYPVVDVEVKLTDGKHHPVDSNELSFKLAARNAFREAMKQANPTLLEPIMNLTVFIEEKYLGDVMSDLSGKRGKIHGQDSAGGIAEVKAEVPMSELLRYSIDLRSITSGTGSFNVDFSHYAPISGRTADEVVKARESFKVQESDE

SEQ ID NO: 88523 - protein, 485 aa, Unknown
  Obtained from environmental sample
  DOMAIN (128)...(230): PAS fold
  misc_feature (1)..(485): Xaa is any amino acid
FLLNENLEFIAHPDRSLLGLALHNVKSGVADLEEETREKGHVSERVTTDYRGIVSIVFIEKLKNGWYLGIVVPKDKYYQSTKNMAIGLTVLGSILAMSLIAILMAIFNEVNKENEKSRTMAHWYSSILNAIPLPISVTDMDTKWTFINKEVEKYLDITLEEAIGKPCSNWGTSICDTEDCGIACAKRGLKQTFFLQGDSSYQIDTAILKDLKENTMGYIEVIQDITDMKLMVKKHTDAQAANAAKTAFLAKVSHEIRTPMNAILGITEIQMQDETLDPNMQEAFGKIYNSGYLLLGIINDVLDMSKIEAGKLELVPVNYDVPSLINDTVYLNIMRFDSKPIVFELEVDENIPLTLYGDELRLKQILNNLLSNAFKYTDSGKVILSVGVEPHDKAEKISLVFRVSDTGQGMTSEQVDMLFNEYTRFNLEANRATEGTGLGMSITRNLINLMKGAISIESEPGKGTVFTVRVPQGIVDGGVLGAAMV

SEQ ID NO: 88524 - protein, 294 aa, Unknown
  Obtained from environmental sample
  DOMAIN (35)...(233): Stage II sporulation protein E (SpoIIE)
  misc_feature (1)..(294): Xaa is any amino acid
MPADYGFFIEVGLAQEKKAKQAACGDVFHSQQLDDGRRVISVLADGLGSGIKASVLATLTATMAAKYIAGDDDIGRAAETILRTLPVCSERNVAYSTFTIVDMDRWGETRIIEYDNPPFLLIHDTEAVPLPTQEYRIPTPFGRDALIRETRFKANPGGRIVICSDGVTQSGIGNRAAHLGWGSDAEAAFVQKAVKENPAISARALAKAIVRQALLLDGGKAKDDTTCGVIYFRKPRKVLLLTGAPVNRENDKELAKRAATFDGKKVVCGGTTTSIISRELKLPVKMDLSDLDPE

SEQ ID NO: 88525 - protein, 291 aa, Unknown
  Obtained from environmental sample
  misc_feature (1)..(291): Xaa is any amino acid
VLLRKEYGEDDSHTTATPGGIEKVLKAGDVIMVQVIKEPINTKGARLTMHLSFAERFLVCMPNSNFIGISKKERDFGKRKIFKQLVNRHKASDVGYIVRTQAFLESENEIVKQMRKLEEKWEITKNNFSEFPAESCIYQESNSVEQSIREYFSEQTEYVYVDDEKEYQNIREYLGGANPENLQKIKLWRGYESLFESFGIEDDYEKSLSTKVYLPRGAYLIIEQTEALMSIDVNTGSRVHGSDQNRVFLETNLDAAREIAKQLRLRDVGGLVIIDFIDMEAEEDKNAVVDE

SEQ ID NO: 88526 - protein, 90 aa, Unknown
  Obtained from environmental sample
  misc_feature (1)..(90): Xaa is any amino acid
VSVKRQTKVSAQIYTKRISEQLQLDLKKHNSQYEPIHISTSNAYHDRFLVIDNTVYLIGASLKDLGKKLFAFSKMEIKHTELLSAKKNSN

SEQ ID NO: 88527 - protein, 313 aa, Unknown
  Obtained from environmental sample
  misc_feature (1)..(313): Xaa is any amino acid
KNAGTATVKASGLDAYEDQTAAVSFVINKKTLTSADFTWNTLNVAYTADTVSANVKSKDSTVTVATIGAIVVKYAGATALPVNAGIYALTVDVAGGSNYNPATGLVLGNFTINKAVIDTTWLAYTIPTGNTVGKPDPLGIGPVTMKKGTGVKSITVKYNGLTDLPTAAGRYIVTVDILADSNFFSAANLALGTYEVGIGVAAGNTTIPTAKKDAVVTVAPIKVAAASFTAGPSPVAKNGKIKFFSANQVKSGSLYIFDATGKSVGKVVVKAGVGEIGSWSVGNAAEGSYIVKGALAGKDGKREKVSFVFSVVK

SEQ ID NO: 88528 - protein, 518 aa, Unknown
  Obtained from environmental sample
  DOMAIN (361)...(479): Response regulator receiver domain
  misc_feature (1)..(518): Xaa is any amino acid
VGKQIEDMLGKDDISALGLSAETAKISFENDLKVVNEQERVAYEEPIPCADGVTRLFETVKSPLILDGDVVGIMAIGRDITRRKEMEEEALAANRAKSSFLANMSHELRTPLNVVIGLTDLTLEEDLETNTKENLVKINNAGTTLLSIVNDILDFSKIESGKLTLSPVEYYLSSLINDIITLVLTRLGEKPIKFKLNIKDDLPNKLLGDDLRVKQILTNLLTNAIKYTREGSIELIIRSTKINDKVWLDAAVCDTGLGIPEEDISSLFLDFYQVSSNATRNIEGTGLGLAITKKLVEMMEGEIGVASEYGKGSTFSFRIKQGYIDDSVLGSEVSEKLRTFSFFDDKRIVSKKLIRVNLSYVRVLVVDDMQTNLDVAAGILRKYKMQVDLLTNGPAAIDRIRAGTPVYDLVFMDHMMPGMDGIETADNIRAIGTEYAKKIPIIALTANAIQGTDKMFYAHDFQGFVTKPIDVIEMDCVLRKWLYDPKRDVPDLSEPAEDEEKKNNILIEIPGVDGKKPY

SEQ ID NO: 88529 - protein, 87 aa, Unknown
  Obtained from environmental sample
  misc_feature (1)..(87): Xaa is any amino acid
LVKADGVEPHYQLIVDRRDNLDCLEVQVEMTESLFSDELKRIELKEKEIEHQLKEALLVHSRVKLVEPKSIARSEGKAKRIVDKRSI

SEQ ID NO: 88530 - protein, 144 aa, Unknown
  Obtained from environmental sample
  DOMAIN (5)...(72): ACT domain
  misc_feature (1)..(144): Xaa is any amino acid
MNQVQQISVFLENKAGRLSDVSATLKDNDINIRALTIAESENYGILRMIVNQPDDALSVLKNAGFIVKKNPVLAVEVDDREGILHDIMELCGSAELNIEYLYSFVEQVSGKAILFMRFEGTEAAEKVFTDKGYRLLSEEEVCLI

SEQ ID NO: 88531 - protein, 395 aa, Unknown
  Obtained from environmental sample
  misc_feature (1)..(395): Xaa is any amino acid
TCVAWASAYAARTISESVALNRRNQTETTQSVFSPVYVYRNIRPDDPECQRGAQIFDALDLMRDSGAVRMLDIERSMEFPRVDLSYYRESRRYPIGGYVTLFSREDKQKPALITRIVKKSLSEGRPVVIGMNTPDSFIEAKNVWEPTESPGSFYGGHAMCVVGYDDDRGAFEIINSWGRKWGNGGFIWIPYQAFVDFVMESYEMIENLAIYSDTVKYEGFSRIEILDRGAPRLAALVFSPEGYYRTAESFTEGTQFRFVVGAGESAYVYSFAVSKPSRDNNFYSPVLLFPQTGVSPLLNYRDSAVVLPGEDKTLALDAEAGMEYLVTLYSKQPLDIQAIMRRFVSTKGNPGERLTAALGSNPLLSISYNAKEATFTASTDDARAVAALVVAIEHK

SEQ ID NO: 88532 - protein, 175 aa, Unknown
  Obtained from environmental sample
  misc_feature (1)..(175): Xaa is any amino acid
ANKKLNEERFLKLDKSVPPAVALANEYFRSGLYCSESVLRAFNEVYGLEYPENLYKIATGFGAGLGEAKCACGAVTGAIMVLSLIAGRNLNYKSERLSFTTTNELHNRFKEKHKAMCCRVLTKPITWGTAEHKALCEKYVIDSAAIIDEIIKRDLTEFLPELDKTFIAKYELGRK

SEQ ID NO: 88533 - protein, 512 aa, Unknown
  Obtained from environmental sample
  DOMAIN (15)...(397): Bacterial extracellular solute-binding proteins, family 5 Middle
  misc_feature (1)..(512): Xaa is any amino acid
MLFEPLAELHSTENRPSGVLASKWEISEDKMSYFFEIDSRAKWSDGKPITAYDVQFYYDVIMDPKNLTPIFKVGLSRLERPEVVDSLHLTIKAKDPHWANFWEAAGMVAFPKHIWEKADFNSIRFEFPVVSGPYSIKQMKMDQKLELVRRSDWWGRQKRYNAGKYNFEKITYRFMEDRNKALEALKKGDFDAYPIYTSSIWVKQTDFDAIKKGYVLKNRVFNEEPIGFQGFALNLRREKFKDVRVRKALSLLLNRELMSEKFMFNQYFLLNTYYPSLWGGHKNPYSPLYPYAPDSARKLMEEAGYTVNASGKLVDKTGKPFELTFLNHAEDIRHTTKFQEDLKAVGIESNIETVSLSTFRQRIDDANFDLCWLAWGAGRLSDPEASWHSKTANDKGTNNVPGLQDKIIDSLIEAQKTELNLDARNNILRNLDTRLTEIVPYILLWQSENSKILHWRRFGYPGSLYGKFNREDAIPVYWWYNPEKAGELQKAQKSNETLPVEEVDVPFQSSCH

SEQ ID NO: 88534 - protein, 402 aa, Unknown
  Obtained from environmental sample
  DOMAIN (1)...(231): EAL domain
  misc_feature (1)..(402): Xaa is any amino acid
MNFSEDNLIAYFQPIFSADTNDIYAYEVLGRYVDSDGKVKSLGPFFNNPDTSPEEALKIDRIIRRYGMKKYAEEKRNEYLFINIRLAWILPYAGNPEEMLTLQLAKEFDIAPEKLVIEITEEEFNASEEYIRGIIHYKKAGCRIALDDYGKEASNIDRLAKLQPDIIKINIDYIHNCETSYHYREYLRAIAAFADSVGIEVLHEGVETERQLDICISSKGRFYQGFLLASPQASMRDPVVNSFVFSALIATAYNAIQTRTADAESLKNSLDIQVERFLHGNPFDSEKINDDEYLIKLFCDLKDVIRIYLCNKKGVQLSNNIERESDNIICRDYKNKIWAWRGFFHETMKAFIRGRKSCLSNPYRDFTTKEKICTYCYAITDDIFLFADMLKNSEETKDYAVR

SEQ ID NO: 88535 - protein, 119 aa, Unknown
  Obtained from environmental sample
  misc_feature (1)..(119): Xaa is any amino acid
MAVSDLYWKRNDASVTLSLKYPVILVHGIVAHDRGGIVNFWGRIPKILQEKNIKVFLGNTDAWGSYESNAELLKTTIDKILDETNIEKVNIIAHSKGGIDSRYLIWRYNYGDKVASLTT

SEQ ID NO: 88536 - protein, 486 aa, Unknown
  Obtained from environmental sample
  misc_feature (1)..(486): Xaa is any amino acid
MIYVFIYFIISFIVLFQGIFQIVGKNKQGVLNWYFFAICMVTSISTANNGVQYYTAFLEGVAIGESRYTYSTQNMILSMIKIMAVPFLFSFILKLSKIKLNYIKKLQFALIAVNAVTLFCIFFMIIAFNTATEILSSYFFNTTVLLVVIFSFCCLVFLQYKWLKSTSLKRERFQASVISIALVASVISLIGLVFTPDSSLIGIVPFIGVVILVFICNHYANQYNSFSFNISNLAAYVYTAVKLPVLILNDKGDIMLCNAASESFFKKTAEQLNLLKLFSLFELPDNPLSEDLISLHCRKKEESVFNCDAVCRVGGQKCQISLNYVYDKFDEMICTVVIVTDITEKEELIRQLNESHAKIERFYMELQSEVYKQTESVRNLQKAIVYSMSDLIEKKDGYTGVHTRRVSEYVTILLRELVKRGHKFTESEIERIAESSLLHDMGKIAIPDSILLKKGRLDDDELGVMKSHSAKGADSLEKSMQLRRIT

SEQ ID NO: 88537 - protein, 148 aa, Unknown
  Obtained from environmental sample
  misc_feature (1)..(148): Xaa is any amino acid
WYLELGGVRDSIADTEELRDELLAVAYGMWDFVKNDPENKKKYACFDLDWIGFLPGKRESRRYVGDYIMTQGDVSNEGKFEDLVAYGGWTMDDHHPEAFRTTELPNIFHPAPSSFGIPYRCLYSRNVENLFCAGRNISVSHVALRNCR

SEQ ID NO: 88538 - protein, 563 aa, Unknown
  Obtained from environmental sample
  DOMAIN (1)...(314): UvrD/REP helicase
  misc_feature (1)..(563): Xaa is any amino acid
LYQKALREQQAMDFDDLISNVVYMFRANKEVLAKYQDMFRYVLVDEYQDTNKAQFYLVRLLSEAHGKIFAVGDDDQSIYGWRGAKIENILTFEEAFPGTKIFKLEENYRSTGAILKFANAAVKPNLMRARKELWTGAAGGAPVSVCRFRDDRQEAEYVAVECEGLLRRMAGTEIAVLFRTNSQSRVFEEAFRKRRVPYVLVGGTSFYERAEVKDCMAYLRLLVNPKDGVSFERIANVPARGLGDKAMEALYILAKERGVSPLEAVLSGEAEELNTRYRKGFADLRELYMLLTELMNEPAPPAEVLRVMLKESGYMDMLTERAAASEEEAARVENVNELMNAMAAWQGDNSEGTLSDFLEEVSLAADVDGWNREENAVNFMTLHSAKGLEFRVVFLVGVEDGIIPSRQVLHDPAKVEEERRLFYVGSTRAMDALECCYAERRFRFGSIQPSEPSRFIADVPGELYSFQNGAAGVGRALGVPNNSVGRVSINNAGKVSINTAGRISDSKAGRVSVNSFGGDRRQVDDWDSAPQTSRPGASFYNEYSQESEPQYRMGQSGDSQDLR

SEQ ID NO: 88539 - protein, 96 aa, Unknown
  Obtained from environmental sample
  DOMAIN (18)...(89): Glu-tRNAGln amidotransferase C subunit
  misc_feature (1)..(96): Xaa is any amino acid
MITEEEVLKVAKLARLEFSEAEIAGFTVQLAAILDYVDQLNAADVSGAEPTCFVAPSHDPLRDDVEAPSLAADSLLANGPSVKKGHFAVPKVIGGA

SEQ ID NO: 88540 - protein, 128 aa, Unknown
  Obtained from environmental sample
  misc_feature (1)..(128): Xaa is any amino acid
ERFGLSALHQLRGRVGRGIEQSFCFLVYSDEYTEDGKTRLMTMLKSSDGFVIAEEDLKLRGPGQIAGTEQSGYLALGLANPIRDFEELQRARTDAFSILERDPDLLLENNRVIARVLEEAPPFAGVAL

SEQ ID NO: 88541 - protein, 408 aa, Unknown
  Obtained from environmental sample
  DOMAIN (31)...(280): D-alanyl-D-alanine carboxypeptidase
  misc_feature (1)..(408): Xaa is any amino acid
MSKKIFLSFWFVFCLSFTAAAQYFTTPPLLVPYTSNAPEIVSTCAVLIDAQTGALLYSKNPDEEISPASLTKLMTMHLLMKEIEAGKASYDELIPITKESWAQSQPPRSSLMFLAPGQIVTLREIMLGLAIPSGNDAAVAAALRLAPTMEDFAALMTAEARRMGLTVTRFTEASGISEFNMTTAAEFAHFCRQYVKLHPQSLKDFHSVHAFSFPVADNVPEAYRANVKTITQYNRNNLLRTFPGVDGLKTGYIDESGYNIALTAQRDNTRVIAVIFGAPAEPGGSRIRDEDGMRLLTWAYENFRTVRPAVTGIENIRLWKGRANTAEIKLAQTTDFTAPFNRGNSLRFDIFINRKLSAPLPAGALAGYYVIYDEYGEVNRVPLVTQRPYEKGNIFKRLLHSIMLLFVK

SEQ ID NO: 88542 - protein, 78 aa, Unknown
  Obtained from environmental sample
  misc_feature (1)..(78): Xaa is any amino acid
MQQYNIHAAKTHLSSLVEKAAKGEAFIIAKAGKPIVKVIPFFQQDTVKKRIGFLKGKIEVPDDFDNMGQNEIIKTFEA

SEQ ID NO: 88543 - protein, 241 aa, Unknown
  Obtained from environmental sample
  DOMAIN (7)...(241): Polysaccharide biosynthesis protein
  misc_feature (1)..(241): Xaa is any amino acid
VRKLTNILVTGGAGFIGCNFIRFLLEKADGFSGRIINLDALTYAGNRMSLADIEAKYGPASQETQARYFFEQGDICDRALVESLFKKYNIDTVVHFAAESHVDRSILGPEAFIKTNVTGTFTLLDVARNAWKDSAPSQEGGTIRQDVLFHHISTDEVYGSLGETGYFTEATPYDPRSPYSASKAASDHLAMAYSHTYGLPVTLSNCSNNYGPYQFPEKLIPLMILNMLEGKPLPVYGDGKN

SEQ ID NO: 88544 - protein, 227 aa, Unknown
  Obtained from environmental sample
  DOMAIN (15)...(177): MatE
  misc_feature (1)..(227): Xaa is any amino acid
MNSSNTTRIAKNTLALYFRQILIMLVSLYTVRVVLNTLGVQDYGIYNVVAGIVTMFGFLSGAMATAGQRYFSFELGRKDYEQLKKVFSISLIIYVLIAAAVLLLSETIGLWFVSNKLVIPVERKTPALWVYQFSVISFIFTVLTSPYMAMIIAHEDMNIYAYISIIEVLLKLGIVFILRFILWDKLILYGMLMLIVTIINTSAYRIISNKKYPECTFSFYWNKDLFK

SEQ ID NO: 88545 - protein, 150 aa, Unknown
  Obtained from environmental sample
  misc_feature (1)..(150): Xaa is any amino acid
MNQLHIDILRENIIALNLSANRIQWSYERTIKIDKKDGYNVDEFAEFEVLTSRYARTTDMLVNKVLRSIDTVESEDIGTVIDIMNRAEKRGIVTSAELLHTIKDLRNNIVHEYKIAEITRFFADVKKYTPLLLDIIKKVNEYCEKYLEKK

SEQ ID NO: 88546 - protein, 96 aa, Unknown
  Obtained from environmental sample
  DOMAIN (8)...(95): Nucleotidyltransferase domain
  misc_feature (1)..(96): Xaa is any amino acid
MRITEHEKTAIIDAVKSADPNAQVWLFGSRADDSKKGGDIDIAIFSEKINKNVMQEIQVRRFICDKIGDQRIDIVTTNSGKEAIFRLAVAEGIRLQ

SEQ ID NO: 88547 - protein, 303 aa, Unknown
  Obtained from environmental sample
  DOMAIN (2)...(200): NAD dependent epimerase/dehydratase family
  misc_feature (1)..(303): Xaa is any amino acid
QGDICDRAFIESLFAKYEIDTVVHFAAESHVDRSILGPEAFIKTNVTGTFTLLDVARNAWKDNAPSQEGGTIRKDVLFHHISTDEVYGSLGETGYFTEATPYDPRSPYSASKAGSDHLVMAYSHTYGLPVTLSNCSNNYGPYQFPEKLIPLMILNMLEGKPLPVYGDGKNIRDWLFVEDHNAAVWTIMQNGQAGETYNIGGENEWENIKLLNVLIDIVAAKAKLDPAKIRGAITYVKDRPGHDRRYAINCSKIKRELNWKQTVSFEEGLSRTVDWYLANPQWIENIRSGEYQHWVEKNYGDRG

SEQ ID NO: 88548 - protein, 237 aa, Unknown
  Obtained from environmental sample
  DOMAIN (6)...(221): 3-beta hydroxysteroid dehydrogenase/isomerase family
  misc_feature (1)..(237): Xaa is any amino acid
MADNIWLIGSKGMLGTELSLLLEKSGLPFIGTDREVDITDAAALTAALKQCAEKQPVSWIINCAAYTAVDKAEDDAENCRRLNTLGAENIAACAQSIGARLIHISTDYVFDGKGITAAGTDVPRPYREDDVTNPIGVYGLTKRDGELAVLENNPCSYIIRTAWLYGKHGNNFVHTMLRLMNERDEIKVVNDQRGSPTWTFDLASTVVAFIKFVDSGKNIPFGIYHYTNEGNITWFDF

SEQ ID NO: 88549 - protein, 64 aa, Unknown
  Obtained from environmental sample
  misc_feature (1)..(64): Xaa is any amino acid
STAFWSVNFIETIQKRQGMYVSCIEEIAYNNKWISKDDLLKLAASYKTEYGEYLRYIAENNIAL

SEQ ID NO: 88550 - protein, 463 aa, Unknown
  Obtained from environmental sample
  DOMAIN (219)...(403): Trypsin
  misc_feature (1)..(463): Xaa is any amino acid
MKKTIYLPFIFIVLILSCKSVDEKENDALGRTTSSFRLNDIEKKVEENPIAALNQIYMYKEIYSVTNDSENEDWQQLAQYEKTAAENLCAMQEKAIEEERWDDAVSLGRSIVSIGVKNANTGKEAEFLLAGAKKKLIDGDNLGAFLSAVKSHELKKLDYQSALLFLEKAVEGRQRRSSAFFLAAAQAAGGKNIPANLIEYAQGRDTASDMIKGVATVIVDKGSRYERGYGVVPDRVLGSAFFVDASGLLITNYHVISSEVDPKRKGYSRMYIRMGDSSNPRVPARVIGWDKALDLALIKTEINTDYVFSLVDRVIPRIGDTVLAMGSPIGLQMTVTSGIVSALGRRFLQIGDVIQIDAAVNHGNSGGPVVDNEGRLVGIVFAGVDQHQGLNFAIPAETLAAALPTMIKGGKSQRPWLGMTLCETYSSAEIIYTAPNTPASLHRVREGVFIKTINGKTVTAPNG

SEQ ID NO: 88551 - protein, 192 aa, Unknown
  Obtained from environmental sample
  misc_feature (1)..(192): Xaa is any amino acid
MEAVQTANQPNFESVWMILQENAQGMKELREIQKEYEQERKKDKADFNERLGNYINLFGDFTEYTMAPKLREKFMELGLDFPKANRNSSVKDKVNNIYLETDVMLENGDKAMMVEIKTQLTVERIKKHIERLEKMRKHADLYGDKRTFLGAVAGVVVEDDVREYALNQGLYLIEPAGEDLTITPPNGKPKEW

SEQ ID NO: 88552 - protein, 184 aa, Unknown
  Obtained from environmental sample
  DOMAIN (6)...(178): Pyruvate ferredoxin/flavodoxin oxidoreductase
  misc_feature (1)..(184): Xaa is any amino acid
MIAGVGGQGTVLASKLIAAAAIKKGFDVRTTETIGMAQRGGSVFGHVRVGDHVGDHVGGHIFSPIIPVGKADALIGFEPAETVRQLPFLRKDGSVIVFNSGNGDMIQYLKENVQKLTVIEARRLTAHSVKTLNVFLLGAAVQSGILPFDAETLKQVLTEMLPERFLEMNLKAFEGGLYGHAGSD

SEQ ID NO: 88553 - protein, 341 aa, Unknown
  Obtained from environmental sample
  DOMAIN (314)...(337): 4Fe-4S binding domain
  misc_feature (1)..(341): Xaa is any amino acid
PFPEKLALSFLEGLDEVLVIEELDPVIENELIYLCGLHNLRVKILGKRSGHVQVAGENSPDSAIKVIGEFLNLKQENAENKTPQMPPQATLPLLPVRAPVLCAGCPHRASFFAVKEAAKGRKAVFTGDIGCYTLGNAMPLDMVDTCLCMGAGITVAQGLKRIEPEAVHFAFIGDSTFFHAGITGVINAVYNQTDIIVVVLDNSTTAMTGNQPHPGTGVTMMRTQTEKMSIEKIVKALNVSNVVKVNPFDRKAAKEAVRALIEQKGVRVLLFEAPCVVVSKPAGKSTVTAGKCTGCQLCIKKLGCPALGFENSKALVNSGLCTGCGLCAAVCVSGAIKAGEK

SEQ ID NO: 88554 - protein, 367 aa, Unknown
  Obtained from environmental sample
  DOMAIN (340)...(363): 4Fe-4S binding domain
  misc_feature (1)..(367): Xaa is any amino acid
IASGGVSYAYTREALAQLNCDIKTLKISTYPFPEKLALTFLEGLDEVLVIEELDPVIENELVCLCGLYNLPVKILGKRSGHVQIAGENSPDSAIKVIGKFLNLMPDKTENKVQQVPLPPLPVRPPVLCAGCPHRASFFAVKEAAKGKKTVFTGDIGCYTLGNAMPLDMVDTCLCMGAGITIAQGLKRIAPDAVHFAFIGDSTFFHAGITGVINAVYNQTDIIVVVLDNSTTAMTGNQPHPGTGVTMMHTQTEKMDIEKIVTALNISGVVRVNPFDQKAAKDAIRSLIEQKGVRVLLFEAPCVVVSKPVGKSTVNADKCTGCQLCIKKLGCPALGFENNKALINSSLCTGCGLCAFVCAAGAIQAGKK

SEQ ID NO: 88555 - protein, 446 aa, Unknown
  Obtained from environmental sample
  DOMAIN (1)...(232): Cellulase (glycosyl hydrolase family 5)
  misc_feature (1)..(446): Xaa is any amino acid
LYIIIDNHSFDPVAPTADDIDGILLKVWAQIAEHYKNRTQYVVYEILNEPHGISDSRWGEIQGAVIDAIRKIDSTHAIIVGGTEYNSINKLSSIPEYSDPNLIYTFHFYDPHLFTHQGASWGEPSLVSLAGVPFPADVLRIPKTPDDLKGTWVEGSLRNYKNDAAFSTLLGRLDKTVAFSRERKAPVFCGEFGVYMIQSPAKDRVKWYEFVVGALRRRKIARASWDYFGGFGIFNNPAGGDFTTDVNIDVVRAMGFIPPPQRARVPKPLSSGFTIYGDYPSRDFSIGYWGEGSVFSMYDTNAAEGEYSIRWGNTSQYDIFWIAFDRNGDFSDLAASGYCLEFRARAEKPVKFDIRFVNPENAASIPWRMRYSIDQKLLPPDGKWHAIRVPLAGMTEHGAWINATHTWLGPQGKFAWNNVKQMEFVSEEGDMKNCYIWFDSIKICQP

SEQ ID NO: 88556 - protein, 92 aa, Unknown
  Obtained from environmental sample
  DOMAIN (4)...(77): AsnC family
  misc_feature (1)..(92): Xaa is any amino acid
MLTAFVSLKVRRDSISEIASQLAAINGVSEVYSIAGRFDLTAIIRVRDCDDLAEIVTNKMLKFEGIIDSETQIAFRVHSKHDLESMFSLGDN

SEQ ID NO: 88557 - protein, 103 aa, Unknown
  Obtained from environmental sample
  misc_feature (1)..(103): Xaa is any amino acid
MNIPPPPPPTPPAPLQPGLPPQPGQQPGQPGQPGQAGAKGGFKIRNVLNTVNRTILQAGAVLGKYNIIEEIGRGGMAVVYKALQTDLKREVALKVMPANITLN

SEQ ID NO: 88558 - protein, 559 aa, Unknown
  Obtained from environmental sample
  misc_feature (1)..(559): Xaa is any amino acid
DVSVFRKLKAELHSSDLPLKTNYRSAPVLIGAFNSIFGGFKFDPEGKAPEEPKRNPAVFAPAEDDLPPFEASFSPLHANKKSGGKITLCILDKQTSSENDPSDDLEGDESDRLSPVENEARYVAWRIGELLKEKNETGESKYQPGDIAILFRTRSPQRLFEKHLMLLNIPYACEDLNGFFYGGPVDDLMSVLRLAAYPEDSAAYAQMLRSPFTGLSMQGLALCIGTAPFGDEPLSRFSEDDRIKYMHGKRIYQKILDIAQKKSISSLVSELWYGEGYRYETEWNPKTAAYRELYDYLFHLAALADEKNQGLAEFTDYIQSLYNADERLSDIEIPLERSSAVRLITIHKSKGLEFPVVFLCCCNKKGQNDFSGDLYHTDDSGLTFTPPLPPEYSDNPNIRRSYFWERSLAVRKEKSIAELRRLLYVGMTRAENELYLSGCLGISKYLGIDHEQSATEDTSAINTAASDAGTSDAAATSDHSADFSLLCKQFIEKKMEKAKGKNSIMGDTILEGSTFFGLCLPAFAAHTNTGESGAIAPFFNIEKIPLYSEQYMRNAEQLV

SEQ ID NO: 88559 - protein, 95 aa, Unknown
  Obtained from environmental sample
  misc_feature (1)..(95): Xaa is any amino acid
MSIVRDKSLAGAGIAKINWVKDFMPVLNRLEKKMIAEQPLKGLNVTVCVHLEAKTAYLGMVLNAAGAHVTLTGSNPLSTKDDVCAALDSLGLDVY

SEQ ID NO: 88560 - protein, 95 aa, Unknown
  Obtained from environmental sample
  misc_feature (1)..(95): Xaa is any amino acid
MPLFIMAVGGIFCERSGVTMLALEGLQGFGAFIGALAVILLKPVLGEASPFMIYIAMAAAMLGGLSTAFCMPYCVCVSGRDRLSAALSSIFYLWR

SEQ ID NO: 88561 - protein, 274 aa, Unknown
  Obtained from environmental sample
  DOMAIN (4)...(119): Nucleoside recognition
  misc_feature (1)..(274): Xaa is any amino acid
MNIALPLAGVMTLWLGLMNVGERAGATKLLARIIGPFFSKLFPEIPKNHPVHGQLLMNFSANMLGLDNAATPLGLKAMQSLQELNPTKDTASNAQIMFLALNTSGLTLIPVAIMALRATAGAANPTDVFIPLLLATAVSTLTAIVYVSLRQRIRLWNSTIILWLAGILLALALIVYGFGQLTPQMKTTLPAIIGNAILFIIIIAFIAAALYKKVNVYEAFIDGAKTGFETTVKIIPFMVAMLVGIGVFRACGAMDLLTRGIAEAIALLHLDTRF

SEQ ID NO: 88562 - protein, 275 aa, Unknown
  Obtained from environmental sample
  misc_feature (1)..(275): Xaa is any amino acid
VWKPLGGGVPVDTSFDISVELPLQLLSGTIKLANGTNKGDVLKWNGSAWVVRPDSLGVGSESVPYTSGKYQRAGLYGDVYAAQNDNEVSVVGLYGKPIYMTGTPTSGQVLAYNPTGGENGDGAWIPTNSGGTYTGTLPIQVSGTTISLVRGSAVDGYVLKWVGDATTGSWQAKPDEVANGGEGGITSVSGNSPINVANPTSTPVITLASEGITSGHLQDNAVTSAKILNATITSGKLANLAVTSGKIANDAVTSAKLAANSVTSGKIASSAVTSA

SEQ ID NO: 88563 - protein, 310 aa, Unknown
  Obtained from environmental sample
  DOMAIN (136)...(258): HD domain
  misc_feature (1)..(310): Xaa is any amino acid
PAFKTNVKDFILYHHERADGNGPFGIREGEGPLEAELITIADSIDAVHHLQRLEPEDLPAIREIIVKESGKRYGRKAAEVMLEILDWPTVISLNDRVIKQTASEVLSPWTVDIETDTIFGLAGFAAKIIDYKSVFTQKHSTQIANKAWFMGKHYKHDPQTLAELYLAASLHDLGKLAVPSDILEKPGKLTGEEFDIIKEHVRLTWELLKDIEGFETICRWACNHHEKLDGSGYPFGRKADELDFNSRLLACLDLYQAISEERPYHPGRNHADTMKILYEMADAGKIDRDIANDLNVVLAPYDGKDLPPPD

SEQ ID NO: 88564 - protein, 96 aa, Unknown
  Obtained from environmental sample
  DOMAIN (12)...(94): Nucleotidyltransferase domain
  misc_feature (1)..(96): Xaa is any amino acid
MNIETINALEEAMKHEDLLKKHHLEKIGVFGSFARGEEANDIDFYIDSEDYDFKNLLNLKNDLEKITSKEVDIMLKKYANPIILHRAEKDMKYVTQ

SEQ ID NO: 88565 - protein, 149 aa, Unknown
  Obtained from environmental sample
  DOMAIN (34)...(111): Protein of unknown function DUF86
  misc_feature (1)..(149): Xaa is any amino acid
MLPNEKNDLLYLLNILEYIGKIWKYTEKTNCAEELFELNEQMNLNASLTLLANIGENVSKIIERTKQEYPSVEWQRIKNFRNRVVHDYMGIDLAIVYEIITTDLKKLRPEIEKVIKERIKQKIFDIDEIKASKESKYYSHVDFERIMTF

SEQ ID NO: 88566 - protein, 185 aa, Unknown
  Obtained from environmental sample
  DOMAIN (50)...(147): Methyltransferase domain
  misc_feature (1)..(185): Xaa is any amino acid
MDTNEIKEQFNSIAEEYDNRRRCFIPCFDDFYGRSVSLLRYFKNRFANIVDLGAGTGLLTKMVYDIYPEANYTLIDVSTDMLEVAKKRFGGLNNFTFAECDYAEDIPVENCDLVCSALSIHHLDNDDKRRLYGNIYSKLNKNGCFINLDQFIVKSQKINDMYDAWWYDYINNSGITESEKGTWLE

SEQ ID NO: 88567 - protein, 390 aa, Unknown
  Obtained from environmental sample
  DOMAIN (60)...(371): Poxvirus D5 protein-like
  misc_feature (1)..(390): Xaa is any amino acid
VRNIYDDLLKTDDYRERNEIENFAKISESMRRREAMIKTASYIKALNIRSDDLDKNPWLFNVRNGTIDVLSGEFREHRQEDLITKCANVDYDPAADCPQWKQFIREIMNYKTDIITFLQTAAGWAMTGDNSEQVMFILFGSGANGKTTFLNTLMHILGDYALATPTETFMKKSGDQNTNDIARLRGTRFVTTTEAEQGRRLSEPIIKKITGNDQMTARFLYGEYFCFAPTFKIWMATNHKPVIKGTDHGIWRRIKLIPFLTRIEEENQDKHLEQKLMREGPGILNWLVEGARRWRNEGLKTPSIIVSATDEYRAEMDVIGNFLKERCTQGEEGCIKARELFKCYQEWCDDHNEHAVSERFFGLRLKELGLEQKRMNDGRYWHGIQIRAQG

SEQ ID NO: 88568 - protein, 420 aa, Unknown
  Obtained from environmental sample
  DOMAIN (370)...(404): Tetratricopeptide repeat
  misc_feature (1)..(420): Xaa is any amino acid
MKKFCAALFLLTAALSFAQQKYALVIGNGNYANITRLNNPVNDANDMAAALQGLGFNVEKLLNATLDQMESGAIRLKNRLSNSKNSYGFLFYAGHGVQSNGENFLIPVDANIQSESFLRQRAVSVQALLDELNEAGNELNLVVLDACRDNPFSWRRSGSRGLTVVGNQPADSIVVYATSAGSTAADGTGRNGLFTTQLLKNIKTPGLEVNEIFRLTGADVAQASNRQQIPAVYNQFFGNAYLGSAPAATSVVTPAPNPSPAGTTQAAANEHFEKGKIFYERDDWDIAILEFSEAIRLDPNYAEAYFRRGDTYDERGDYDRAIADYTQAIRLDPNYASAYYYRGLTYSNKNEYDRAITDYTQAIRLNPDDARVYRNRGNAYLNGKKDNDRAIADFTQAIRLNPDDEIAYFNRGKAYGNKND

SEQ ID NO: 88569 - protein, 320 aa, Unknown
  Obtained from environmental sample
  misc_feature (1)..(320): Xaa is any amino acid
MKHLFIINPAAKRINGKTQRVREAITAFFGEYPDIRYDIYESGWCRDCVTFIHRYVSTTSETVRVHAIGGKGTLFEVVNSVVGLANAEVAAHPYGKANTFLRYFGRQNERHFLSLKSQVFDKAIPMDVVRCGNNYGICYGVAGIEAQARVHGDNWVEMGIATDISFVVAAIFHILGNKTSQHYHVDIDGVRIEGDFVSVLVANVPCYGINMYSAVDAHPDDGVLDVYTFKETSKLKLMYSIPTYAHGNYHKLPDLVSHYTAKKIKLSSDEVMCMSVDGEHFYGTSMEYEIMPKAVNFVCPAEIDLAKLPRIYGKPEEGYR

SEQ ID NO: 88570 - protein, 507 aa, Unknown
  Obtained from environmental sample
  DOMAIN (298)...(364): His Kinase A (phosphoacceptor) domain
  misc_feature (1)..(507): Xaa is any amino acid
VKNDTAFDNIAKVPTLIITVVYAVVKVLFYVVMRPDQIFSRVCLGLVMIAVMALLTGDKLKLTRPQMSVLVPFSLAALELTYVGLLGGDRTTYIFLIGCSLVCLMYADVWGLFIFTSLTGVTMTFLILGLGVHILPQPSDFRDEVSNYVGMIVIYALVFLLGRYTISAMNRFRLSGQTFDTALKTSPNLIVIVNDKARVEYISKSFVELLGIEKQEYAIKLPFIDLFPTVELKLFFGELLHRKGGIAEIFKMEIGGVRHHFMLRSEALRDGGIARIFDCLEITPILEAQRAAEAASKSKSNFLATMSHEIRTPMNAIIGIAQIQLQRGDLPDDYVTALQKIYSSANNQLGIINDILDMSKIETGKMELNPVEYDIPSLINDAMQLNVVRIGEKHIEFIVDVDENLPSRLYGDELRIKQILNNLLSNAIKYTDEGCVKLSVGYLTDSDGVILRFVVEDTGQGIKPKDKERLFSEYQRFNAEANRATEGTGLGLNITKKLVEMMGGTIG

SEQ ID NO: 88571 - protein, 442 aa, Unknown
  Obtained from environmental sample
  DOMAIN (15)...(126): PAS fold
  misc_feature (1)..(442): Xaa is any amino acid
MDTQVNTNAGNAEIAFFDVFFTNATEAIFITDHEGQLITANPSFISLTGIELAEARGKAPLILRSEFHDADFYLALWRTLKRRGSWKGEIINRRGDGEICREWLSVSSHKNAVGEVTNYVGTFADSAGRMSQSFSKHYYDSMTKLPNRLLLQDRLEFMINHARRNNQLMALLLLDIDRFKMINDTFGYEAGDALLRITAERLVTCVRDVDVVFRSGDDEFAIILEEIARPEDAAKVARRVLDSCAEPLQIGGRDIYATICIGISIFPTDGDGKVQMLQNAEAAMRRAKETGLNSFEHYKPSMNARAMERLSLESDLRNAIGHSQLCAFYQPQVEIKSGRITGAEALLRWKHHDLGMVQPGQFIPIAEDTGLILSIGEWVLRTACIEARKSQEGGKPFVISVNLSVSQFRQQNLVSIVESALKDAELPPELLELEITETMSRK

SEQ ID NO: 88572 - protein, 578 aa, Unknown
  Obtained from environmental sample
  DOMAIN (287)...(447): AIR synthase related protein, N-terminal domain
  misc_feature (1)..(578): Xaa is any amino acid
MQQDIMTVNTIDTANTVRRVYVEKRPEYDVHSARLMADLRDNLGISGLDGVRTLNRYDVEGLTGDYYGAARDSIFAELPVDLVYDEEMPVRSGERVFAVEYLPGQYDQRADGAAQCVQLLTHAAPPKIASARIVVVRGDIDEYDFQKIKSYCINPVDSREASLDKPVSLDMRVETPPDVEVLGGFIGMDSDGVDRVRQNLGLAMKNDDLLFCQRYFRDTEKRDPTITEVRVLDTYWSDHCRHTTFLTAVKSVEIEETALNEPVRAAFDTYMRARDYVYGADGADARDVSLMDIALLGMRELRKKGLLNDLDASDEVNACSIVVPAVVDGKTEDWLVMFKNETHNHPTEIEPLGGAATCLGGAIRDPLSGRSYVYQAMRVTGAGDPRAAVGETLQGKLPQRKITTLAAQGYSSYGNQIGIATGIVSEVYHKGYVAKRMEIGAVVGAVPKSNVARRVPEAGDIVVLLGGRTGRDGCGGATGSSKEHNEESIQTCGAEVQKGNAPTERKIQRLFRDPEVGRMIRRCNDFGAGGVAVAIGELAAGLDIYLDAVPKKYEGLDGTELAISESQERMAVVIGQSD

SEQ ID NO: 88573 - protein, 489 aa, Unknown
  Obtained from environmental sample
  DOMAIN (77)...(476): DNA topoisomerase
  misc_feature (1)..(489): Xaa is any amino acid
LPDTKTHLSQLGKLIRRKDISTIINACDAGREGELIFYYILEHEQGKTGLSEKNIKRLWVQSMTQAAIKEAFEHLRTNTEMKNLQDAALSRSEADWLVGINGSRGLTAYNSRFGGFQLTPCGRVQTPTLALIVKREENRMSFVPQTFWTLTADFEDGSEHYIGKWTNQKEKENSTKIWKKEEAEAILNKCKGKQGSVSEESKQVTQKCPPLYDLTFLQREANSRFGFSAKTTLQIAQALYERHKLTTYPRTDSKFLPDDYVATVKRTMGALTGGIARHAEFALKNNYVHKDPRIFNTAKVSDHHAIIPTGLAPSALSEAENKIFNLICQRFVAVFYPVAEYLHTTRITSVEGETFVSEGKILKEPGWKAVYGKESEEDEDIMPKLSSPDAKPIAKEVEMAEDATKPPARYTESSLLSAMEGAGKLIEDEDLRDAMKERGLGTPATRAATIEKLISDKYIVREGKELLPTGKAFDLINMAVSHAIENLTS

SEQ ID NO: 88574 - protein, 531 aa, Unknown
  Obtained from environmental sample
  DOMAIN (151)...(415): RNA polymerase Rpb2, domain 2
  misc_feature (1)..(531): Xaa is any amino acid
MTKVITEDKRKYIGKDIQDVIDLPDLIDVQLNSYERFLQRDKVKKGEKIAEQGLMEVFTSTFPIKSPNEDMRLEFEYYTFDEDNVKMTELECKQKGLTYAVPLKARINLVFQQTGEIRQKDIYMGDIPLMTERGTFIINGAERVVVSQIHRSPGVIFSHEKGIYSSRIIPYRGSWIEFEIDQKRDLIYTKIDRKKRILGTIFLRALGFSTREEIIEAFYVTETLKIKDDRETKEKISGMVLAKPVMIKDESSSKGAEKVLYRAGEKLHPHNVDELINNGIKSICYIDFEAEGSLNSTMILNCFEREDIKFVKEAGSEPAKEEALMAVYSVLMPGESITVDQAEKDLIGMFFSDRRYDLGKVGRYKLNKKFALDLPTNKFTLSNDDIIATMKHLIKVYVGDEYIDDIDHLGNRRIRSVGELMANQMKTAFSRMERIAKERMSLKETDTIKPQELISIKPIVASIKEFFGSSQLSQFMDQVNPLAELTHKRRLNALGPGGLSRDRAGFEVREIHYTHYGRMCPIKLRRTEYRP

SEQ ID NO: 88575 - protein, 218 aa, Unknown
  Obtained from environmental sample
  misc_feature (1)..(218): Xaa is any amino acid
MLLRKIILIISLIFFISAALWAGDVASFIDMGFSPDGRIYMFGQYGVLSPGLKPWAEIYIVDVSTNNFVPNGKIVYTHDSPILAGQDGSGVFYKLVANNSAITSRYNINFQNQGLPLYISRDENPSSNGERIEFRDFMSGSAYKAELVPYKEGSGQNVRSSFYINLESRAQNGQIRNYTIGNPQIKRQKIETYNINRVLIDSRGESIIFIIEMKRVPA

SEQ ID NO: 88576 - protein, 358 aa, Unknown
  Obtained from environmental sample
  misc_feature (1)..(358): Xaa is any amino acid
MPKIEVNEEVFYTLCGKRWAGNREEFEEALTCAKAELDEDSDKSLSAAERVLKIELNDTNRPDLWGTAGCARQLRAYQSDKIPEYPFFSRTGDVKKCTHKVKVEKSVQKVRPFLTGFIAGGKAISDPALRDMIQTQEKLAWNFGRKRRSISMGVYRIARINWPIIYKGVDPDSVSFVPLQWDSPLTLREILKQHPKGKEYAFILEKEPVHPLLTDSKGEVLSYPPIINSNDLGAVQVGDTDIFVELTGSDIAQVTLAASIVACDLADNGFSIEPVKVKYEFDTLFGRNVIFPCYFQQPVFCSLARIEKFLGEKLNGDECVQALNRMGVKAEKSDGMEKGQNAKGSMEGVLAYPPEYRN

SEQ ID NO: 88577 - protein, 188 aa, Unknown
  Obtained from environmental sample
  DOMAIN (4)...(178): Proteasome A-type and B-type
  misc_feature (1)..(188): Xaa is any amino acid
MAKRFRSTTIIAVRKDGKIAMAGDGQVTFGETVMKNNARKVRRMMDGKVLCGFAGSTADVFTLHDRFEAKLKEYSGDLTRAAVELAKDWRMDRSLRRLEAMLLVADVSKTLLVSGSGDVIEPADNAIAIGSGGNYAYAAALAFLDGSNYSAREIAEKSLKIAGNICIYTNHGNNSGGIGMNDKQVKVE

SEQ ID NO: 88578 - protein, 347 aa, Unknown
  Obtained from environmental sample
  misc_feature (1)..(347): Xaa is any amino acid
MSMSVAALHTILPWNFITKFHEGVVVQKDGLLQRSFAYRAPDADSLSGFEVNALSLRLNDFAKRLGAGWAIFVEAQRFSLQEYPKSLKFSSAFDALAPYLIEREREESFTTAGKHYDTSYYITLAWKPPVESAKKLAAMFVQSGKEEGAKAMKENVGYFVGETNSVMGLLANNMRVAPLDNGQTLAYLHSAVSFRRHPIRFPHTQILLDRVLPDSELVNDLTMRLGEFYIPIVGINDFPEETYPAIFEPLNRTGMEYRWVTRFLCLAKEDAKKEAQKKEKAHRGARKSFMQVFAESTAGPSGGGGSAAYNHGAGVKEADSIEAGIEIETDEASLGYYTSCVMVWDRS

SEQ ID NO: 88579 - protein, 341 aa, Unknown
  Obtained from environmental sample
  DOMAIN (20)...(189): Radical SAM superfamily
  misc_feature (1)..(341): Xaa is any amino acid
MNDIELGPIRPPSESQSLLIRVTRGCHWNKCFFCGLYKGMRYSVRPTDDILEDIRKSAELYNGMAFTSCFLQDGDALNIPTEDLLLILKKIKSCFPSLQTITTYARCDTILKKSQSELIALRELGLNHFYRGIETGSDTILKNIYKGITSKDIIDSGLMCKKAGIILSDFTLLGIGGRELSEENAIETARVINAVNPDYIRVHHTAFKPDTKLGRDVEKGIFILQSEEEIVREQRLFIENLNGINSIYINEHIVNLLMEVRGKLPSDKEKMLEIIDYYLGMPEDDKLNFAVGRRMGYYYRLSDMQNKSKNTAVSQYMDNLKAKHSIVDFDKVCNFCRANVI

SEQ ID NO: 88580 - protein, 367 aa, Unknown
  Obtained from environmental sample
  DOMAIN (5)...(305): Pyridoxal-phosphate dependent enzyme
  misc_feature (1)..(367): Xaa is any amino acid
EDIVRSAYTFDAPLAGVGDRFVLELFHGPTAAFKDFGARFMARAFAYLRRGEDKPLRILVATSGDTGGAVADGFFEVEGIYVTVLYPKGRITPLQERQIAGLGKNISALAVEGSFDDCQRLVKAALADEGLKKKMALSSANSINISRLIPQAAYYAAGAGKAPGITLCVPSGNFGNLTAGLYAMKMGAPVKVFIAATNINKTFPDYLATGDYQTRISQATISNAMDVGAPSNFERMAAHFSLDEMRRLILGVSVTDAETRETIVKVHGETGYFLDPHSAVGWKGVDKLLEKNDANSRLLSQGPIGVLSTAHPAKFSETVEPLIGSAPLPDTLARAMKRTVKSQTIPAEVSALIDILSREDASSMEDE

SEQ ID NO: 88581 - protein, 413 aa, Unknown
  Obtained from environmental sample
  DOMAIN (213)...(304): MutS family domain IV
  misc_feature (1)..(413): Xaa is any amino acid
MEANSPELISAGALLDYLDSTSKSILSHIRTIKVYRDSEYMGIDESSQRNLELLYNQRDGEPRFSLLEVMDETKSSMGRRLLKRRILHPLSNVEKINKRLDMVEDLYRDQGRLSKLRELLGKTSDLERLCSRLAMDKAHARDMLAIKNAIFCFFAVKEILNTEFEGRKICFECDEQESVNNFDSLLQLQDLLEKGIKEEPSVFLNEGNLIKDNFNKELDDLRSMRDNSRQILEQYLEEEKQETGITSLKIRYNRLIGYFFEVKKNSLDKVPKHFIRRQGMADGERYTTDHLAELESEINGADDRIIDLEKKLFFEIREEAKKSLNLMSVCARRLAEIDAAQSLAKAASIRNWTRPQLDESSTLEIYEGRHPVVEEHISRGEYIPHDILLNTALSEISFAMITGPNMAGKSTYL

SEQ ID NO: 88582 - protein, 331 aa, Unknown
  Obtained from environmental sample
  DOMAIN (1)...(309): Permease family
  misc_feature (1)..(331): Xaa is any amino acid
NAQYGIPYALGGAAAAGLFYCLVSLIIRFTGTKWLDKALPPVVIGSVIIVIGMCLAPTAMGMAMNDGDGNYSLVSLSIAAFTLAVLVVASIFIKGFFGTIPILIGLVLGYFFTLIMGIFFPAYDIINFQAVKEAHWFAFPTFHAPKFNIVPILTFIIISFATICEHLGDVLVISKIAGQDFYKNPGLHRTLLGDGLATAWAALFGGPPNTTYGENVGVMAITRVYSVWVIGGAAVIAVLLSFFTKIGAIIQTIPSPVLGGICMLLFGIIASSGLRTIVESGVDYKDKRNLIITSVILVIGIGGGQLAFNLTKDLRFVLSGAGACNSYRDYT

SEQ ID NO: 88583 - protein, 285 aa, Unknown
  Obtained from environmental sample
  misc_feature (1)..(285): Xaa is any amino acid
IRAFAMDELGLKESRNYTRFVKLDRNYLAAVVSASDKDSFRRHEWNFPVVGRMPYKGFFNVEDARKERARLEKKDLDVWIRGVDAFSTLGWFKDPLYSYMLDYSPARLADLIIHELVHATVFIKGQVKFNEELAEFIGSEGAGLFIAKRYGEDSDEYRQIFSSDKDSEKYVEFLQELIAELNVLYGSEISREEKLMEKERIINAAKERFIAEYDSRFSDDNYKGFTELPVNNAYLELYRLYHTEDNFYEELYERSGRNLPIFITAAKKITKKGNPRQQLENALFQ

SEQ ID NO: 88584 - protein, 124 aa, Unknown
  Obtained from environmental sample
  misc_feature (1)..(124): Xaa is any amino acid
MEEKMSRKSSFKSVVVVILTAFILAAAGCDLGNFPDPFFIRVAFIEGMPENGEAGTPLTLTGTVRPVFASNVDIIWSVKDAGTTGAVINGNVLYANADGTIVITARVQNGIVIGKDYTQDFIIV

SEQ ID NO: 88585 - protein, 66 aa, Unknown
  Obtained from environmental sample
  misc_feature (1)..(66): Xaa is any amino acid
SHDIELTNILAEKYDNYHFCEQITDDEITFDYKLKQGVSRTRNAIKLLKLMGFNSEIVKKAEELSL

SEQ ID NO: 88586 - protein, 751 aa, Unknown
  Obtained from environmental sample
  DOMAIN (658)...(729): Bacterial flagellin C-terminus
  misc_feature (1)..(751): Xaa is any amino acid
MRINHNLIAINTHRQLGISENNGSKSMEKLSSGYRINRAGDDAAGLAISEKMRGQVRGLAMASRNAQDTISLIQTAEGALAETHDILQRMRELSVQSANDTNTDADRSELQAEVTQLRYEIDRIANTTEFNTRKLLEGSAKGVADEVQGTARYNNNSRITIDSIKSKAMMEAVSNDKSWAFDGAYMLIKTNQTFNSGEPVYDPSDYKLVGPDGTIYNFRAMSADTKIKASELEAGTILADGGAVSLIENKGSKLSSVLGTAPIVLGEAIGDHELDFVGKGSILASGSNFTMKALSGYQIALNADTGVKSIEYDSEGVLKLNLLTPGTSPVKVEVGKSVRLDDGTVIKNNGGGNVSVESGSLQINQAITVGTHVSYFKAASQSSLSTASTTTINNVDIVSASNYKLTKGELNNNVTIGNSKPLTSGEIDMLAEGSVLAKGSYIEMLSSSTPGAGTTTAIRIMVSGNEVEISYDDVNDILKVGQDIVAPGKSITLDDGTVLTHASTLGDRNVSTGIVFVDTGRVILAEDLTPGQNVKGFSLAKDSTMATSTKVKDDTVLMAGTVITSPDKFYPGSVTIAHEGRSISFSANSDVTLAARYYDMAVSESMTYIFSRYEPASSNLRDSVMAQIGANSGQTAFVSMGDMRAVALNVHNIDISSKWGAATAIETVNNALQRVSHQRALLGAMQNRLEHTIKNLDASTENLQAAESRIRDVDMAKEIMEFTKDSILMQSAQAMLAQANQIPESVLQLLR

SEQ ID NO: 88587 - protein, 242 aa, Unknown
  Obtained from environmental sample
  misc_feature (1)..(242): Xaa is any amino acid
GRQFARRMDVAYAFQEIDMLPKGLEVPDGRMKPWGTGHAVLAAKGVVKGPFMVVNADDFYGRGAYTMLADWLSDDAQQASGCGGNAESYALVAFRMANTLSPFGGVARGVCEVDADGTLVSVKEYTTLEASGPGVRDASSAVFTGLEPVSMNFWGFRSSVFGFLEGMFEDFLRAGGLEAKSEFYLPSAVDSMIRSGLARVRVLETPDRWFGVTYREDKEYVVSRIHELVAGGEYPSPLWGDP

SEQ ID NO: 88588 - protein, 479 aa, Unknown
  Obtained from environmental sample
  DOMAIN (2)...(124): NusA N-terminal domain
  misc_feature (1)..(479): Xaa is any amino acid
IDMSEAIRQLSQERGLSEELIQRTIENMLLAAYRKRYGTDENAIIRIDDDGQVTILSKKRVVENDDLWNPVDEIELNEAKELNPDADVGDEILVPIDTKEFGRQSIQLAKQTAHQSIREIQKDGLYAEFKDKVGEIIVGYYQRERNGTIYVDLGKVEGVLQKKYQSNRETFHVNDRIKALIKEVNKTPSGLQIVLSRTDPEFVRAIFELEVPEIYDKTVEIHKIVREAGYRTKLAVYSNRDDVDPVGACVGLKGVRIQAVIKELEGEKIDILKYDPDPRHFIKNALSPAEVRDVIILSEKSKKALAVVSDSLLSLAIGKQGLNVRLANKLTDWMIDVKTDAQFAEMDIAAESKRAVKELFGEGETEEFSRISELPGVDPAVAKALLDNGIDYIVDFLDLSKEQLDAMENISDEQIAVLRSLIDDSVEILEEEAEDSAGTEFAGDESAAVAAGDHVSEENAEEIECPECHEKFVLDMDGF

SEQ ID NO: 88589 - protein, 525 aa, Unknown
  Obtained from environmental sample
  DOMAIN (230)...(295): His Kinase A (phosphoacceptor) domain
  misc_feature (1)..(525): Xaa is any amino acid
MKKFLASYSLLILFGLAGAAVLFVSLYSSSLVGFCEQTGELHVRQRLLETAKRLAERVTAEELDAFRTAADMQRPAYQDLRHKLADFAKDADVLYVYFLREEKGKMQYIVDNDFDDKTRVGLDRPPDDKEGVATLLPALEGRSGVTPSGVYMKGWDGLLTGYAPVCYRDGRVGAVLGVDIDDGAVQRTRRRGRYLWIMQIVAIVIVCASGGLGFRRYHREADAAKEANAAKTRFLSRMSHEIRTPMSAILGMSDLALRTHGQRRELEYLTAIKHAGTKLMAIINDILDFSRVESGKLEIRNEPYEAASLFTDVLTIIQVRLVGKHVRFMHDISPDIPSIITGDQTRVREILLNLLSNAVKYTEKGFITFTVRCRREKGPGGLLLTFKVADSGIGIRREDLGRLFDDFSRVGEAGNIEGTGLGLYITRELCRAMGGEVEAQSEYGMGSSFTATIRQAAAADCPPMGDLGAKAAINEEVAVKFSAPDFRVLIVDDNEANLKVAAGYLLLYSINADICQSGAEALALA

SEQ ID NO: 88590 - protein, 89 aa, Unknown
  Obtained from environmental sample
  misc_feature (1)..(89): Xaa is any amino acid
MLENGDTAMLVEIKTELTVDRIKKHIIRLEKMRKYSDMRGDKRKFLGAVAGVILDDDTRNYALDQGFYLIEPAGHDLNITPPNVKPKEW

SEQ ID NO: 88591 - protein, 79 aa, Unknown
  Obtained from environmental sample
  DOMAIN (1)...(77): Phd_YefM
  misc_feature (1)..(79): Xaa is any amino acid
MRTLQLSEVKNNFSSIICDIQQGEEVTISYGKKRQNVAVIVPYEQWKKSKKRELGTLKGKVKIKFSNDFSMSDEELINS

SEQ ID NO: 88592 - protein, 467 aa, Unknown
  Obtained from environmental sample
  DOMAIN (236)...(349): Response regulator receiver domain
  misc_feature (1)..(467): Xaa is any amino acid
MEEVFSKIYNSGYLLLGIINDILDLSKIEAGKLELLPVNYDVPSLINDTVYLNIMRFDSKPFAFELEVDENIPLTLFGDELRIKQILNNLLSNAFKYTNEGRVLLSIAVENAPQNETGKIMLVLRVSDTGQGMTREQVNMLFDEYTRFNTETNRTVEGAGLGMNITRHLINLMNGTIFIESEPGKGSVFTVRLPQEIVDAGVLGKSIVDNLKQFRLGKISQMKKAPQIVREYMPYGKVLVVDDVETNLYVAKGLMSPYGLSIETASNGFDAIEKIKKGVVYDIIFMDHFMPKMDGVETTKIIRESGYKQTIIALTANAIAGQAEMFMANGFDGFISKPIDIRQLNVLLNKYVRDKYPHEVVEAAQQQALKNNMVRKTQQPSDPELAAIFARDAEKAISRLNAIFINSFRRTEDIRQYVIDVHAMKSALANIGEIGLSEKAFKLEQAGKAEDKTVMLSDTPVFLEEPA

SEQ ID NO: 88593 - protein, 434 aa, Unknown
  Obtained from environmental sample
  DOMAIN (161)...(421): Transposase DDE domain
  misc_feature (1)..(434): Xaa is any amino acid
MEKVCHDNIIVKALAEDLEPDHATIAAFITKNEEAVKDLFGQILTQCAQLNLITREMFAIDGCKLPSNASKEWSGSIRELRKKRDKLKEHIEKLIKRHREMDKDEKVKKIQKPYAKTMGNDGERREKTIERLEKKLEKMNKFLKEAEPRKGVSVEEVQSNITDNESALIKGPHGYIQGYNGITIADSGNQIIVSAEVIGSGPESGSFPKMLESLEENMKMITGKEEPLKKSLLVGDTGYFSEANLQEAAEKGINVLIPDQQFRQRDPYYAEKKEEKVEKKKYKAEDFTYDEKNDRYICPRGKALEYKCDITLRNNSGKKYGAKRADCAKCPLIEKCIAGRGGKNPARVLYIVNKKYEDNLSEKMRKKIDNPAYRELYSRRMQIIEPTFSDITYCKGMNRFTLRTERKVGIQWKLYCTVHNIGKCIRPLGMKYGA

SEQ ID NO: 88594 - protein, 84 aa, Unknown
  Obtained from environmental sample
  misc_feature (1)..(84): Xaa is any amino acid
EVQLLSGRHHQIRAQFAAEGIHIKGDLKYGAKRSEKNGGIRLHARSLSFPDPLNKSEIIRVTADPPVIDNLWESFITPEQSYKK

SEQ ID NO: 88595 - protein, 476 aa, Unknown
  Obtained from environmental sample
  DOMAIN (56)...(99): SWIM zinc finger
  misc_feature (1)..(476): Xaa is any amino acid
LIEGKAIAKVEGNYNPYYYVEIIFPPLAEAEQVYKLIENDTPLLARIAAGELPESFLEKLKKKGINLIPKRWRDMSRSCTCPDYGDPCKHMAALYYIIAREIDADPHVLFKLRGMDLAQRFGNTAVRKIAPPFAVTFAAKEKTPQGKAAQAETPPLELEEIPHCGELISSLLPSSPPFCERDFALALAEFYHYCAGYHGWQTTEQDEETLAETEHDFSRSRWTAHCSAYEPGAEIYLQAQDINGRKKRYGLHEAFDRFLQFSAEDGTASYTFLFYLFKFLNLVCSAGAFIPFVLAENNSLRIIWRPFETIPPVSDMLKAIASRECGLFTVKTGVKREQTLSGQSTVDLLSSAFLNEWVRRKFLSFRGKLNKQGTDEEYRDLLNLFFQGFRIDVSAPMRRSLPAAIDRWLSVLHIDFSAYQYVLNVKESGVNNDTIQYALSMNVLIEEKDGVIKTPIGQCKDIGILRAPVALSNYLP

SEQ ID NO: 88596 - protein, 1152 aa, Unknown
  Obtained from environmental sample
  DOMAIN (99)...(142): SWIM zinc finger
  misc_feature (1)..(1152): Xaa is any amino acid
MKSRYGVTPWGSWFIDVLDSYKMGERLERGRRYANAGRVLSLELIEGKASAKVEGNYNPFYKVEISFPPLAEAEQVYKLIENDPPLLAAIAGGELPQVFLEKLKKKGINLIPRRWGEMRRSCSCPDYGDPCKHMAALYYIIAREIDSDPHVLFRLRGMDLAQRFGNSAIHKIAPPFTITFAEKKNTKVRRAEAESSPLEFDEIPNCGELISSLLPSSPPFCDMDFAQIMAEFYHYCAGFRGWQSAEQDDKTLAETEHDFSRSHWTAICPAPEPGAEIFLQAQDIDGGKKRYGLHEAFDYFVQFSAEDGTASYTFLFYLFKFLNLVCSAGAFIPFVLAEDETLKIVWRPFETIPPVSAILKAIASRECGMFAVKTGKKKEQILSGQSAVDLLSCAFLNEWVRRKFLSFRGKFNKQGTDDEYRELLNLFFQGFRIDVSAPMYRSLPAAIDRWLSVLHIDFSAYQYALNIKEYGVNNDVIQYALSMNVIFEEEDGVIKTPIGQCKDLGVLRAPVALSNYLPEIKDLMAAKKSGGSHVLLSEERLVSFLDSAAALLARLGIKVNLPKSLAKELKPRLVIRGNSTGKSLKTYLDLSTLQEFEWQIAIGEKVLSSKEFEKLVNQKSAIIRFKDGFVKMDPQEFSRLLKKLKDAPPGFNDFLKAHFSGDSVLAFDARETINNIFREQNFPIPDALTAKLRPYQKRGYNWICSLLYSGFGCILADDMGLGKTVQSIASILRLKEERLLKNGCLVVAPAALLSNWENELGRFAPSLKISRYHGNRRILDRKRDVFLTTYQTAVRDAEKLKAEAFSLLVIDEAHLMKNADTRISRTVKQLRSQYRLALSGTPVENRLEDLRSLFDFILPGYLGNADQFRNQYRIPIEVMRNREKAESLKKITSPFLLRRLKTDKKIIKDLPEKIVTNEYAVLEKEQAALYENIVSESIKKSARAEAKERSALILEMLTSLKQICDHPRVFDKESPAVPELSGKSQLLVTLLQEILANREKVLVFSQYVETLECLRLIIKKELGEAALVYHGGLGQNTRTSLVEQFQNDTAARIMLVSLRAGGLGLNLTAASRVIHYDLWYNPAVENQATDRAFRIGQKRNVFVHRFITKNSFEEKIDAMISSKRELADMTVSSGESWLARMSHEELKALFER

SEQ ID NO: 88597 - protein, 88 aa, Unknown
  Obtained from environmental sample
  DOMAIN (1)...(33): Tetratricopeptide repeat
  misc_feature (1)..(88): Xaa is any amino acid
KASYNRGNSYSNKQDYDKAIADYSEVIRYYPDDAVYFVNRGNAYFNKEDYNKAYMDYDAALKINPNNANAKWNLDLAKEKGGRYISDK

SEQ ID NO: 88598 - protein, 277 aa, Unknown
  Obtained from environmental sample
  DOMAIN (110)...(273): Integrase core domain
  misc_feature (1)..(277): Xaa is any amino acid
MEMTGLFGVSRGAYYKWVKAGISNRRKGSDDAELIRLIREIVIKHHRRYGSPRVRQELRNKYGKRVSLKKVARLMRENGLNARRRGKYIPTTDSKHSLPVCENILNRNFSAERPGQKWVSDITYLRTLKGFEYLTVVLDLFDRKVVGWALSDNMETCNTTIPAFEMAVKNRQPESDLIFHSDRGVQYCAYSFGEVMSNLCPSVRRSMSRKGNCWDNACAESFFKTLKSEEEKLNGKYSANDVRQAVFFYVEGYYNRERIHSVLDYLAPNEYYLSKAA

SEQ ID NO: 88599 - protein, 251 aa, Unknown
  Obtained from environmental sample
  DOMAIN (40)...(244): Lon protease (S16) C-terminal proteolytic domain
  misc_feature (1)..(251): Xaa is any amino acid
MESGVRNLERETARCIRRIARGAVKTGYGKEKPVTSFKKIITPAVIEKLLGKKLYKRDLVFSEARIGVTYGLAWTETGGAILPVETIRYNGNGELLITGNLGDVMKESARIALSYLHSTCDRYNFSIKDLSKSNYHIHVPEGAIPKDGPSAGITLASSLLSTLCKIPPRPCVAMTGELTLTGRVLPIGGLKEKMLAAIRNNMETVLLPKNNEADWDELDKDIRDSIKIEFVETASDVFEKLFDRKIFKKTR

SEQ ID NO: 88600 - protein, 388 aa, Unknown
  Obtained from environmental sample
  DOMAIN (1)...(191): ATP-dependent protease La (LON) domain
  misc_feature (1)..(388): Xaa is any amino acid
LPLRDLVLFPQTVIPIFITFKPGITALEEALKHDNRLFAACLRKHEIGLAADEPWNYGTVVRIIQHLKLPDNSYRVIFQCEYRGVIVSNVQQNNFSTVKVEPLKITGLNEPLSPEDSALMRNVQVAFSQYAEFSKKIGTDTLTAVEKTEDPERLANLVCNATHLKSEKKVELLAYTDTKERLLAILETLEFENEIYGIQKNISGKVRSRMDKRHREYILHEQLREINKELGKDKTEDEFAILEKRIADKKPTAEVTERTVKEIAKLRKLQPLSPEAGVVRTYLEWIADLPWSDYTVDSGDLAEAEKILNEDHFGMAKAKDRILEFIAVRQLLADDVSGDSKIVDSELTDNASSINDEKIKTDSGENRVPQSIKGPILCFVGPPGTGKT

SEQ ID NO: 88601 - protein, 221 aa, Unknown
  Obtained from environmental sample
  misc_feature (1)..(221): Xaa is any amino acid
LLLILSEPKRFSIDVDVASDRTREEIEKVLDAIVPEYGVFTKWERRQHKTKPWLPLSSYYLYYNSVVTDAPDTNIMLDVQMRRSAYKTEFKPVRCGDLYVSEAKVELPLPSSIISDKLLTLGPATLGIPIGRGKEAQRLKHVYDVSRLSATLPDVGEMRESFRSCLKQENELQETNHSVDDIVKDTLKFLWTTALRGEQPASSDDPALNENTKGLAPFAAH

SEQ ID NO: 88602 - protein, 571 aa, Unknown
  Obtained from environmental sample
  DOMAIN (1)...(565): tRNA synthetases class I (I, L, M and V)
  misc_feature (1)..(571): Xaa is any amino acid
ATDIYCRYLRMNGCNVLHPMGFDAFGLPAENYAIKTGTHPAVTTAANINTFRTQIKTLGFSYDWDREVDTSAEDYYRWTQWIFLKLFDKGLAYEAESPINWCPSCKTGLANEEVKDGLCERCGAKVTRKRIRQWILKITAYAERLLADLDGLDWPEPVKLMQRNWIGRSEGANVIFKIDGHKDELEIYTTRPDTLFGATYMVLSPEHPLVEKITAPEQKQAVTSYIEAAARKSDLERTDLAKEKTGVFCGAYAINPVNDQKIPIWIADYVLISYGTGAIMAVPAHDERDWEFAKVFNLPIILVVAGEKPQAGKDYSAEPKECTVADGYSVNSDKFTGLPTSEAKERVTDWLEEKKIGKRAVNYKLRDWIFSRQRYWGEPIPVVHCAKCGIVTVPESELPLKLPNVKTYAPTGTGESPLAGIDEWVNTVCPKCGGEAKRETNTMPQWAGSCWYYIRYLDPKNSEEFAAKEKINYWLPVDLYVGGAEHAVLHLLYSRFWHKVLFDLGLVNTVEPFQRLINQGMILGEDNQKMSKSRGNVINPDDVIKEYGTDSLRLYEMFMGPLEVSKPWNMS

SEQ ID NO: 88603 - protein, 181 aa, Unknown
  Obtained from environmental sample
  DOMAIN (4)...(125): Calcineurin-like phosphoesterase
  misc_feature (1)..(181): Xaa is any amino acid
MENKKLLVLSDSHGNINALRAVFRWAKDHIPPNDTIHAAAFLGDGLSDLQYTADAEGFYTDWKLVIGNNDYGIQMPEALTFEFAERLFFMCHGHRYSLYGGYNMLINAAINAGADIALCGHSHIPYNKVMTGVRVVNPGSVGRPRSRVGATFTVIECSSDNSININFYGISSHGNIKEINI

SEQ ID NO: 88604 - protein, 402 aa, Unknown
  Obtained from environmental sample
  misc_feature (1)..(402): Xaa is any amino acid
MIKQAVIVAAGLGSRLKEKTVSMPKGFLELGGIAIVEWSVQKLLACGIEKIIIGTGYHAEAYDELAKKYPAIQTAFSANFETTSSMATLNVCAPYVTEDFLLLESDLIYDSIGLNVLCNDIHENVILASGATNSGDEVYLEAANGSFLKALSKNKAELSSTYGELVGITKISRPLLSAMCSYYEKKRVDLPKLDYEHAIMACAVSQPVFIRKVEYYAWREIDDDNHLEMAQREILPRILENESLRQIRREVLLNPGPATTSDSVKYAQVCADICPREKEFGSVMKWICKELTSFAACISEYETVFFGGSGTSADEAMISSCVPEDGHILIVDNGSYGERLAKIASVYKINHTVFKSSTYERIDISALESEFQTGKYTHLGIVYHETTTGLLNPLDIICPLAK

SEQ ID NO: 88605 - protein, 307 aa, Unknown
  Obtained from environmental sample
  DOMAIN (1)...(245): Amidohydrolase family
  misc_feature (1)..(307): Xaa is any amino acid
VIESGAKANITNPLLCLDMDKFDFEKDRGVIENREVLSQFKGNLSASSKGDGRLILDAGIHAEYTSGPQAWQKCAAFAAENNLRIHIHLSETETEHEACIKKYGKTPAAILHENGVFSRKVTAAHCCWISDDDMDILAANGATVAHCPVSNLKLSAGLARVTKMRERGINVALGTDGVCSNNNHDLFEEIKTAALLQKYLTKDPTALPAYEAIKLATVNGAIGQGRENETGKVAAGYDADLIMLNLDAPHLFPLNEPCSAVAYSAKGSDVCLTMVQGHILYENGEFKTLDLEKIRHEVDNYVIPRLK

SEQ ID NO: 88606 - protein, 62 aa, Unknown
  Obtained from environmental sample
  misc_feature (1)..(62): Xaa is any amino acid
HNGLYAKRGYNIDSLYVNETQNPEKSRMLITSKGNKYVQTQMVRQLKKLYDVENVILMAQVG

SEQ ID NO: 88607 - protein, 90 aa, Unknown
  Obtained from environmental sample
  misc_feature (1)..(90): Xaa is any amino acid
MGAIDYITKPFSPLLLVQRIDNHLSIISQRKDLIQYNKTLLETIEEKNKEIKELQTAIQNTISEIDKLRSEMPSDHIERILKPLQAVEIA

SEQ ID NO: 88608 - protein, 420 aa, Unknown
  Obtained from environmental sample
  DOMAIN (1)...(146): MatE
  misc_feature (1)..(420): Xaa is any amino acid
MVIVGHYLGETSLAAVGACAVIFELLIGFAIGIGRGFGIVVARYYGAGDQDMFKRTVAGSVAIGIIVTLFISLTASLFMLPLLKLINVPVYIIDTAYSYISLLTAFSVVTFTYNLCAGLLHAIGNSTMPFLFLVISSILNIIFDVIFITSFNMGVRGAAVATVAAQSISTALCLIYIFKKCPMLIPHRKHFRYDNALYQELVAQGLSMGFMISIVYLGSLALQRAINGLGYLVIAGHIAARKINSFCMMPMNTIAVAVSTIVSQNKGAGQLSRIRKVVRYGNFISVIWGVFISVILMFSSAVLIRLLSGSNESIIIENGSRYLKINSPFYIVLGMLFNFRLALQGIGEKIAPVVSSVIEFLGKILFAFLLVPILGYLGVIICEPIIWFIMFLQLLYSFYTNPYIRGKHRNTSRQTNWITD

SEQ ID NO: 88609 - protein, 260 aa, Unknown
  Obtained from environmental sample
  DOMAIN (10)...(260): Iron-containing alcohol dehydrogenase
  misc_feature (1)..(260): Xaa is any amino acid
MCAQYTFFYTTKIVSGPEALDSIGDELKISGVKKTLIVTDKVMAESETMAKAKASLAEAGNDFALFEEVETDPSVATVEAAAELLRWSDCDSVMGLGGGSALDAAKGAAILGANAGPISQYEGANKIPNPPCPIFAVPTTAGTGSEVSQSTILADGPVKRSIRSTMAAPKIAFLDPLAVSTVPGPVAVSSGLDALAHNIESYLSIWASPVSECLSKYGIKLAAENLRPYMANPRNQEAAGNMQLSALLGAAAFANSRVGL

SEQ ID NO: 88610 - protein, 437 aa, Unknown
  Obtained from environmental sample
  DOMAIN (165)...(393): CagE, TrbE, VirB family, component of type IV transporter system
  misc_feature (1)..(437): Xaa is any amino acid
VSQSVAAFHTILPWCFITKFHEGVVVQKDGILQRSFAYRAPDADSLSGLEINALSLRLDGFAKRLGAGWAVFVEAQRYSLQDYPKSLKFSSAFDNLASYLIEREREESFTAAGKHYDSSYYITLAWKPPVEGAKKLAAMFVQGGREDGSKTMRENVEHFVGETDSAMGLLANNVRVFPLSNAETLAYLHSTVSFGRHPIRFPHTQILLDRVLPDSELINDLTLKLGEYYIPIVGVNDFPDETYPAIFEPLNRTGIEYRWVTRLICLSKEDQKKEAAKKEKAHRGARKSFAQVFAESTAGPGGAGGGAVYNHGAGVKEEDSIRAGVEIETDEASLGYYTSCVMVWDRSHDTALKKAEFVRGIINSAGFTCKIERYNALESWMSMLPGQVYANYRALPVMSYNFSHSVPLSSVWAGQRYNGHAGRVSGVDLPHLTCSTL

SEQ ID NO: 88611 - protein, 691 aa, Unknown
  Obtained from environmental sample
  misc_feature (1)..(691): Xaa is any amino acid
CILNNNSNDDEEERLHADENEAMFTAQKIHQLINEKKYRPDDIAVLFRTRNPQYYFEKHLRMLGIPYACEDINNFFYAGPVNDIMSVLRLAAHPLDSASYAEMLRSPFAGLSLAGTAVCLSVFNSAENPTVFDDEPLNLLNDIDREKYLHGQKIYSSICEKAATESVSSLVTELWYKEGYRYETEWNPATSLYRELYDYLFHLAVIADTANEGLASFTDSMRDLRDSGGRLTDIEIPLERPGAVHLMTIHKSKGLEFPVVFLCCCGKDSRSDSVKDVFFSEKTGVVLSPPLPGALNSIKNIRKNFLWEQSIAERKLKRTAELRRLLYVGMTRAEKELYLTGSLEINKNMDSGDFIETIKKYIEKKCEEKENSIPGDSIINNDTFFGLFLPSIASRISQGFISLEEIPVYTEDDIKKQEANPKHLSGNHLPNNRGGLGEYIRNAEPLYKKAKKIKTPEARKNHITPVSLKDKEEDLTQTDTVGRGLIINREFSGVKADDVFEKVDSLLAKFSKTEDESYGKFNSGSFGTIAHICVDALLSGKDPVFPPQLSGSISPVEFDSLFAAGKELASRFVRSPLGKIAENSKFRENEFSFRSFLINSEGKEVFINGTIDLFFEDSVFFHVVDFKTDNKETPVEHTAQMACYFQAVSALFAVPAKKECRAWLYYLRTGHAVEMTDKVKQFNLENKAIIQ

SEQ ID NO: 88612 - protein, 376 aa, Unknown
  Obtained from environmental sample
  DOMAIN (133)...(332): Glutamine amidotransferases class-II
  misc_feature (1)..(376): Xaa is any amino acid
MQYEGQVRLPSGCAISGIIDKTGRRMSGEVMIKSISVMHDRSNGLGGGFAGYGIYPEYKDYYALHLFYDSISAKKECEEFLERHFDIINLSKIPTRKIKEITDEPLIWRYFVTPLPTKLAASQLDEREFTAKCVFRVNTRIDGAYVFSSGKNMGVFKAVGFPEDVGRFYKLEEYEGWCFTAHGRYPTNTPGWWGGAHPFSLLEYSVVHNGEISSYDTNRRSIEMYGYKCSLQTDTEVITYIVDYLHRKHQLAFKEIASVIAAPFWSTIGRMKPDDFETHEYLRIMFSGQLITGPFSILVGFDGGLMALNDRLKLRSMVVGEKDELVYIASEEAAIRVIEPNLDTIWAPRGGQPVIVFMNGRVPDSGPAIYRGEEWH

SEQ ID NO: 88613 - protein, 163 aa, Unknown
  Obtained from environmental sample
  misc_feature (1)..(163): Xaa is any amino acid
APGYLGCTLTGIPFTDEYRLKLGGKSGCLPLLPSEYFIVSENPHIENSASVMWNVFSKLSFFPLLWNIVPFHPHERNNINSNRTPEPQEIKAYCYFVEDLLKLFPSVNRENGIYAVGRKAQKGLANIGLLTMYDESKYIRHPSHGGTEKCRKKIIEIADLSKK

SEQ ID NO: 88614 - protein, 248 aa, Unknown
  Obtained from environmental sample
  misc_feature (1)..(248): Xaa is any amino acid
MNSLFKDHEPEPPEPVKTQAAPPPDLAARLNPSQLAAATYEGGPLLIVAGAGSGKTRTLVHRVAYLVGRGVPPPAILLLTFTRKAAREMLDRAMALAGHRAGEVSGGTFHSLANALLRPTAHLLGYPNGFTIMDQDDAEALLARIRGDLPEIKKYKRFPQKGALLSLLSQAVNKDRPLAEVVAESFAHFQEYTPLLEKIAKEYRDQKLKNALMDFDDLLTGLETVLREHEDIRGRLAGRYNYILVDEY

SEQ ID NO: 88615 - protein, 356 aa, Unknown
  Obtained from environmental sample
  misc_feature (1)..(356): Xaa is any amino acid
RLSRCPKTIDGDLKNQYIETSFGFDTACKTYSELIGNLMRDANSSKKYWHFIKLMGRAASHIALECALQTQPNVCLISEEIQTKQYSLDAVVNMICDSIVKRADRGDNFGIVLIPEGLVEFIPEVKILIEELNDVIARDEEAFSKIISFIDQIDWLSSRLSEPSYHLLNSLPADIGGQFLMDRDPHGNVQVSRIETEKLLIGMVEQRLYSLKTANVYKGKFSALAHFFGYEGRCAFPSNFDSDYCYSLGYSAFALIAAGFTGYLSSVRNLTAKASEWTAGGVPITMMMNIEQRHGEEKPVIKKALVELDGKPFRAFKAVRDEWAVKTSFVVPGSIQYFGPPEVCDEPTITLKLEKE

SEQ ID NO: 88616 - protein, 81 aa, Unknown
  Obtained from environmental sample
  misc_feature (1)..(81): Xaa is any amino acid
MDVSTINIPLQNDILVQIDQIANEEARTRIDLISEAVSIYIERKKEWQGMFKIGKEIGAKLEISEDDVMKEIKAYRTEKIK

SEQ ID NO: 88617 - protein, 128 aa, Unknown
  Obtained from environmental sample
  misc_feature (1)..(128): Xaa is any amino acid
MRLVLDTNVFISAFYWGGNSQKIFDRIINGLDELYVSDKILEEISDVMTRPKFKTGQETINKYIETIEKNCKKVFTEGRIKGICRDKDDDDKLECGIICNADYIITGDDDLLVLGNYETMKIITPRGI

SEQ ID NO: 88618 - protein, 618 aa, Unknown
  Obtained from environmental sample
  DOMAIN (121)...(187): His Kinase A (phosphoacceptor) domain
  misc_feature (1)..(618): Xaa is any amino acid
MLVDENLGIIAHPDVYLIGKPLRNVNSDMASYLAYYLENSGEYIPKSTAINYKGLESIVFSRKLRTGWYVSLIAPVNKYYREVRSMGLVLTVLGIIMATVLSGILWSITSSKKKVDEENRQKSDFLAKMSHEIRTPMNAILGITEIQLQDSTIREDIREALGKIYNSGDLLLGIINDILDFSKIEAGKMELVPVKYYVSSMINDVVQLNRIKNENKPIDFRLEVDEILPAELIGVELRIKQILNNLLSNAFKYTDKGEIVLSVAVEQARGGGLSTNATIVFKVSDTGQGMRTEQVHKVFDEYSRFNLEVNRTTQGTGLGMNITRNLVHMMDGSISVKSAPGKGTEVTVKLPQRTEGSGAMIGREMAETLRQFRMSSASQTEKAQIVYDPMPYGSVLIVDDVETNLYVAKGLMLPYELAIDTAVSGFETIDKIKSGRVYDIIFMDHMMPKMDGIETTKILRELGYNNPIIALTANALVGQAEMFMQNGFDGFISKPIDVRQLNATLNKIIRDRQPFEVIDAARWQKAARQAAETAPPTDAPLTDEDQAFLREKLLMIRTACEARDKQTAKNTLIELKRKTWPRLTKDLLNTIVEHVLKGNFDEAASLAGDYTGGQTTNA

SEQ ID NO: 88619 - protein, 148 aa, Unknown
  Obtained from environmental sample
  misc_feature (1)..(148): Xaa is any amino acid
LASDLIAEGQLTARGELAAQVQAAKQDKHALNTLLQDYMPFIKKCVAGVFFKGQTKADNLTDAMLAFSYSVQTYNPEQGAFIKYAAAVIRNRLIDSARKELLVQKRFFLFPAVTDKKDAAWETGISLQAYNRAEEEENLRLEIEEVNC

SEQ ID NO: 88620 - protein, 741 aa, Unknown
  Obtained from environmental sample
  DOMAIN (623)...(733): OmpA family
  misc_feature (1)..(741): Xaa is any amino acid
AWFGFTFDFIRIEGKGGKPSPLVMNFAADVGVPSVIVPENINVIVKTGITVTIFDKLTLSVLWPGAAGYNMRESKEENNGHFQWHPSVGIGINFLIPSGGKRHPGERRPSDGDITFDAAFKPLYYDVYATGAGVTWYVGYRDDLPPNIIVDYPEIQYISPNYDGNLDNLLFPVRIVDDHYVMSWIMTIKDSNGNIVRTYQNKDRRFEMMDVRDIYGRYYLEKKGVDVPPTMRWDGVFTTGEIGPDGKYYFSISAADENGNVGTSRDYEVILKNTPPQVAIDNINLNDRIFDPSSGNRTSINIVSRGTVEDKWESGIYNSEGKLIRTFAPKNGSPQPQVWDGKTDSGALAPDGAYTFRIAATDRAQNTGFAVMSNIVVDTKTVGAILTASVNAIAPKTGQTAELVRFNDRLNRTDGIGSWKLEIKNDKGDIVKIFEGSGASQGGIGRPPENFNWNGLSDNGSVREGVVYPELTVHYLDGHVANAKSAPILIDSSGPALELSSGPDLFSPDNDGVNDVLTIRMKAEDVSPIARWSLDIYEPAMESGTNPVHIFKHFEGSAAPVDELMWNGRGNNGDLVQSAVDYPYVYTATDALGNTSTKMGAFGIDVLVIREGDQFRIQIPSIMFPPDSAVFDGLSQSTLDNNNRVIKRIAQILNKFKGYKVKVEGHANPTTASGPAREQEEPSLKDLSERRAGYVLEQLVRNSVARNRLTFTGAGGTMPVVPFDDRAGWWKNRRVDFILIR

SEQ ID NO: 88621 - protein, 447 aa, Unknown
  Obtained from environmental sample
  DOMAIN (300)...(447): Methyl-accepting chemotaxis protein (MCP) signaling domain
  misc_feature (1)..(447): Xaa is any amino acid
MAQITGPNARLVEMSDPAPFKNMGKDTYAVRIAVPILNKRLNEIVGAIGCQLDISMIQPKVEQTIKDFEEVTSMVIYSDNGFVLANYLPEFIGKQIDTETQYGPYLKEVKDVIKNSQEWQGTAYDPELHTNMVMAVANIPIGASPTTWSVMVGSTEAYILKDVNAMRNFVIMLAAIALAAAVALIYLALNRTTRPIVKLADTLKDISEGEGDLTRTIAVNSKDEIGDLALYFNKTLEKIKNMIIHIKDEADGLSGIGNDLAGNMTETAAAVNQITANIQNIKGRIINQSASVTQTNATMEQVIANINKLNDQVEDQSSNMSKASSAIEEMVANVSSVTQTLVRNADNVKILEEASEVGRNGLREVATDIQEIAHKSEDLLKINAVMKDIASQTNLLSMNAAIEAAHAGEAGKGFAVVADEIRKLAESSSEQSKTIGAVLKNIKGSID

SEQ ID NO: 88622 - protein, 92 aa, Unknown
  Obtained from environmental sample
  DOMAIN (1)...(63): Transposase IS200 like
  misc_feature (1)..(92): Xaa is any amino acid
VHFLIQSIPTYSPSKIVTTIKGILSRKIFEIHPEVKKQLWGGEFWSDGYFVSTESKYGNEEVIANYVKSQGTAEHYKQLHRIRNNEQPTLFD

SEQ ID NO: 88623 - protein, 606 aa, Unknown
  Obtained from environmental sample
  DOMAIN (365)...(606): TonB dependent receptor
  misc_feature (1)..(606): Xaa is any amino acid
SGGGRRNDSSFTVRGYGADSVPIYVDGVPVASPFRGEGDSARILTGDLDSVEIKKGYSSQLLGANALGGAVLLRIAKPKKALELLSRTTVDLDGLFSYGGISTIARAGTKQNFFYSMGTFQYRNTDHFRLSEKFEPYTGSIQGKGKRLWSDSKDMKITLLAGLIPLPDLDIWTTYIYQDADKGVSPPDTGASYDIWKWPFWRRHTASLNTTYTMEKLSLSGLFYFDKYDNRLEEYYNKKAFELGIHAPWSDYDEYSLGGRLIGEYNFSDAHSLASALTCKLDDHRGLRGTILNTDTYEVMHAKEIIISGGIEYSGRPFKIPLTVKAGFGFDTLTPLEYWSKDNEFAQIINSGYYIAKTRKMLLYTWQVGLFYQFNKNHEGHLTYARKNHFPTMSQRYSTRFGTILPNSNLGPEQANHVELGYRGSFFDELLRVSAAAYYSIIRGKMATVEIPNPEHPSSLVDYTLNLDSTSFYGFELVPELFVNDYFSMGMSFSTISYTINHREDGGKYLPYYPPLALNGYMVIRPWLKEISVIPRWEYAGFRYSDMLGNEKLPEYFLLHLKIKADISGYVSVSAAVNNILDTSYELRHYSPQEGRSFHFTLECRY

SEQ ID NO: 88624 - protein, 292 aa, Unknown
  Obtained from environmental sample
  misc_feature (1)..(292): Xaa is any amino acid
VSPYSLSGIRFRGAAIEVQPNQQWSVSGLYGRLNDYRPADSNGQNGSLLRLCYGTKVSYNGPTYSVSSSFFKAKDIASTTVDLAPQENAVFDFMGSWTLAKDIRVSGEWANSALTQNTNDELTRSNLNIQNWTGWCLPYRLSTTVFSAYKINIGSPFLNVGYEYVAPHYHSLGAYYFTNDFENFTVNGSHKFRNITVGGRFGVQHDDLSNQKTNSSRRLVYAANLDYSGQSRVSGQLNYSTFQTFTRVEKWLTEYETTNPYAGLDTLVFRQVEQHGDASIGYRFLETGPVAT

SEQ ID NO: 88625 - protein, 221 aa, Unknown
  Obtained from environmental sample
  DOMAIN (18)...(151): ThiF family
  misc_feature (1)..(221): Xaa is any amino acid
MYHRNRLYVNECEQQRMRDFKIVFGGLGLGSVIAECALRAGFETLHLIDGDTVELSNLNRQDYTQNDIGKPKCIAIYERLKQINPNANITYSQVYLTAENVSEHLAGADIAVNAIDFTSSAPMMFDDVCFANDIPVVHPYNFGYGGLACVLTKQSLNLRSLSQTCEGMEINVANHVLGVLEKEGVDMNTYKFKKVLSEYIAEQGAEQPPQLSVASWLLGGL

SEQ ID NO: 88626 - protein, 608 aa, Unknown
  Obtained from environmental sample
  DOMAIN (1)...(192): Glycosyl hydrolases family 2, sugar binding domain
  misc_feature (1)..(608): Xaa is any amino acid
MLRFNLDGSWQLTSLSSGLERSKQQPLSAEVPGSVLDAWIKAGIVPDPYCGENERQITPLFSGDFEYSRTFSVSTDFLADDVVELVCLGIDTLGEIFINGKSIAKVNNMHRSWRFNVKAMLKPGENTIRIVLFSPNAFIADAFKNGPVEFVATGTMAGTSYLRKTHCQFGWDWGPMLPDAGIWRSIFLEGWSVARLSDVYITQDHSADGKVTLQARIQAEIADLKRFWAENRHLSLLLRVKSPIKNSSENNSVIEIAKTITDVTEASEISCVIEKPELWWPNGLGTQPLYSVEVELRNEASSILDTWQRRIGLRSMTISTKEDQWGSEFALTVNGVKVFAMGADYIPEDSVFPRINKKRTRRLLEDCAKANFNSIRVWGGGYYPDDYFYDACDELGLVIWQDFMFACNVYCLTDGFAANVAEEVRQNMIRIRHHASLGLWCGNNEMETAWVNWPTVTNHSPALKADYIKLFESLIPEIWKKTDPQTFYWPSSPSSGGGFDAPNDHNRGDVHYWEVWHGLKPFSEYRKYFFRYCSEFGFEALPDLETIQTFAKGEDLNLFSPVMESHQRNPGGNGKILYYLSETYRYPKDFASLVYISQVLQMESIQSG

SEQ ID NO: 88627 - protein, 290 aa, Unknown
  Obtained from environmental sample
  misc_feature (1)..(290): Xaa is any amino acid
MEIHQRNPSGNGKILYYISETYRYPKDFASLVYISQVLQMESIQSGVDHWRRNRGRCMGAIYWQLNDCWPVCSWASIDYFGRWKALHYGARRFFAPLRATLFIDETVRVYVHNDTLKAAKGRIKLYLRDKSFNTLAEETVDVELSPMAASEILVRDYRGMVNTVELERSCFVTAELSIISDEEMPVSKETVLFVPPKHFSFVKPEYSVDVSDKNDHFVIIVKANTFCRFVRIKIPEEDPVFSDNYFDITGNEGTEIKVSKKELKNTYTTQSLRALLKDNAGSIVSIGDSY

SEQ ID NO: 88628 - protein, 421 aa, Unknown
  Obtained from environmental sample
  DOMAIN (212)...(369): Sigma-54 interaction domain
  misc_feature (1)..(421): Xaa is any amino acid
MGIFTFMPSGAGGIIVRVETDIRRGIPGVDISGLAEGAVREARDRVRAAFRNSGFSFPLDRILINLAPAGLKKDGAALDLPIALSVMAAAGLVAVTGDLLIMGELELSGRIRPVRGVLAAVAAGLAEGIREFIVPAQNSAEAAILTDKGASFTAAENLQGAVHALVMREKNGVLPESLDEVFSSAAPITAEAGNSSANAAARTEDCGDFADVRGQTIYKRALEIAAAGGHNTLVFGPPGAGKTMLARRMPSIMAPLTPDEAVEVTRLHSLAGPRNGFIDRLITNPPFRAPHHTASAEGVLGGGRILRPGEISLAHFGVLFLDEAPEFRINVLQALREPLEDREISIVRAEGPMRLPAEFQLLLTANSCRCGRLGLHGTENECLCSPQEINRYWRKFGGALLDRVEIRTAILPPKIEEMGVH

SEQ ID NO: 88629 - protein, 79 aa, Unknown
  Obtained from environmental sample
  misc_feature (1)..(79): Xaa is any amino acid
KAAMCGELAGNQEATSLLLGLGLDEFSMAASSIPRVKEIIRYCSLKACKALATDALRARSIDEVRALLNQWKADNAQKH

SEQ ID NO: 88630 - protein, 76 aa, Unknown
  Obtained from environmental sample
  misc_feature (1)..(76): Xaa is any amino acid
MAEKINTAATYIAMIESERRTPSFKMIERIAEVLKIDAPELFSTRDYPSESVSQLHENLMAEFEKFLMASAKKIES

SEQ ID NO: 88631 - protein, 87 aa, Unknown
  Obtained from environmental sample
  misc_feature (1)..(87): Xaa is any amino acid
MHGLNLIGCIHFLNSDGILEPLLEMEFYDFSYGFRPGKSAHKALNQLWKESMGMNGGYVIDMDISKYFDTIDHGLLREMVRRRVSDG

SEQ ID NO: 88632 - protein, 234 aa, Unknown
  Obtained from environmental sample
  misc_feature (1)..(234): Xaa is any amino acid
MPKFLLSLLLTALLISCGQKEQSKSEQNLLADELVGQAIALADFVSAKPAAILSSRSTIELEFKQNMVSQNAVWQDLSANPIDFEPAIKGKAKWLSTSLLQFVPEAPMQGGQTFKAKFDGKKAFGKNAIVDDYAFEFQVIPNEILEINGGFDPVEGKVNTAKLALELRFADKPDSVKLKKELTLNFNSKSMQYKMFFDGQGNTVRIESEQVTRTIKAQNAEITLPKNWTANDDP

SEQ ID NO: 88633 - protein, 437 aa, Unknown
  Obtained from environmental sample
  DOMAIN (1)...(357): UvrD/REP helicase
  misc_feature (1)..(437): Xaa is any amino acid
MDGAQKAEVKRAAYNISRAKDYFLSPEDPSLKLIDSNEKFRRLYAEYERRLKITGNVDFGDLIKKPVEILRKEPDVCRRFRERFSVIMVDEYQDANVAQFEMLKELAGPGTYVCVVGDDDQSIYRFRGAEVKNILEFPEKFSDADIIRLESNYRSTSPILQAASSVVDHNKGRLGKTLRSERGDGKLPVLAFLPDQEEEANFCASLIEESPQAQWSDWAILYRTNAQSLGFETEFLRRKIPYKVVGSLKFYEREEIKDAIALLSFMVNPRDEVAFRRMVNKPARGLGAVTVDRLIDASLAGGKDLLETAKNMVQEKKLSAKAGTGLEKFIKVIDEGKSPLDTPQPSITTNVEITANGGNSEQQKTKKKKQGKKAAVPKDGDTLVSGEGLSVCVAQILKNSGICEYHITQDEITGNQRLNNMQELVNAASLYEGSVQG

SEQ ID NO: 88634 - protein, 72 aa, Unknown
  Obtained from environmental sample
  misc_feature (1)..(72): Xaa is any amino acid
MNMVETGKFLVTAGTVIIIIGVLAMLSDKIPLGRLPGDFHFGSGRFRIYIPIATMILFSVVLTIVFNFFARK

SEQ ID NO: 88635 - protein, 176 aa, Unknown
  Obtained from environmental sample
  DOMAIN (51)...(176): ATPase family associated with various cellular activities (AAA)
  misc_feature (1)..(176): Xaa is any amino acid
MTTNINTSNDAQTAKDLATAVSAIKSEIGRRVVGQTEVVDDLLACFLAGGHCLLTGVPGLAKTMLVQSLARCLDLGFNRIQFTPDLMPSDITGSEILMEDRASGRREFRFVQGPVFSNIVLADEINRTPPKTQSALLQAMQEQEVTSSGTTHALPRPFWVLATQNPIEQGGTYPLP

SEQ ID NO: 88636 - protein, 124 aa, Unknown
  Obtained from environmental sample
  misc_feature (1)..(124): Xaa is any amino acid
TSANNKLTPVRIGDGWASVSGGVAHTLGTKTDGTLWAWGQNNAGQLGDGATSTASGYCTAPKWIGSEYDWAFVKGASANIDAATSYGIKEDGSLWVWGRNNYGQVGNGATGNATRPVRIMSLSE

SEQ ID NO: 88637 - protein, 73 aa, Unknown
  Obtained from environmental sample
  misc_feature (1)..(73): Xaa is any amino acid
DLEAGLADVLRDRNPETPGLYTWWTQRGGARQRNVGWRIDIFLVSQTLTPQVKDAAIHPDVHGSDHCPISLVF

SEQ ID NO: 88638 - protein, 592 aa, Unknown
  Obtained from environmental sample
  DOMAIN (22)...(107): OB-fold nucleic acid binding domain
  misc_feature (1)..(592): Xaa is any amino acid
MEAMKRTVDCGALRKGDNGRTVILNGWVHRKRNHGGIFFINIRDRYGITQVTVDTESKQELAAVCDELRNEYVIAVEGQVSLRPDGMVNPGMETGEIEVTASKLVILNKAEILPFQIDEESKASEETRLKYRYLDLRSAAMQKTIKMRSETAFAVREWMTSNGFYEIETPTFIKSSPEGARDYLVPSRLSPGKFYALPQSPQLYKQILMVAGFDKYFQIARCYRDEDSRGDRQPEFTQIDIEMSFVSRDDVLTVTEGLMCHVFKKVLGKNIPQKFTRLTWEEAMEFYGSDKPDIRFDMKLMDFSPFVEQCRFQAFKDALSAGGAVKALVVKGASNFSRKQIDELESHAKIYKARGLAWMKVAAGGAFEGGVSKFFADNAVKITGALGAKDGDLILIVADAKRSVANTALGAVRSKLGRDLNLYAPDSFEFAWIVDFPMFEYDEENKKWEAAHHLFTWPQDKYHSTMETDPGSVKGDLYDLVLNGYELASGSIRIHDPEMQKRVFKIVGIDPAQAEKKFGFLTEAFKYGAPPHGGIAPGLDRLVMIMAGHTSLKDVIAFPKNSFAVSPMDDCPSDVDQKQLDELHLIIKKQDN

SEQ ID NO: 88639 - protein, 262 aa, Unknown
  Obtained from environmental sample
  misc_feature (1)..(262): Xaa is any amino acid
VEISFDNGKTFIKTSKAMAKNVDYRYRLETGDMYEGIHYILLRATMANGETALTRMLVQVDKTPPVIRLISPEAGGVYNQELFYSASASDDVELVSLSYHLRKGDKNAYEVPGFLQGMYLEGTIPPLIKQFVWKDAPNMPFGGGATYFDGALGLSFFDDNVKVQVQYGLLTQDLYEAIGGVGPVRYGGDVAALKLLASLYTLPLGSVWGPDFDWLYASLSIGANFSYFNFLSKENEKYSTNPDDPKYYTQSGEPTWLSALIL

SEQ ID NO: 88640 - protein, 120 aa, Unknown
  Obtained from environmental sample
  misc_feature (1)..(120): Xaa is any amino acid
MYGYAGGTDPAVKVTVKINGGDKVEADVDPVSGFYTIPLTVEHLVEGNNTVVVYSDFGGYGTIQSRAQTLVYAPNGPWVTIDSFKFGDFAYERPYVSGRYGYNLSAEDQELLAAKKPTRK

SEQ ID NO: 88641 - protein, 98 aa, Unknown
  Obtained from environmental sample
  misc_feature (1)..(98): Xaa is any amino acid
GQNEFTDADITGAYTSDLLSDVMANAKTGGALITIQAHKNTVAVATLVNISVIVICNSRPLPDDMLEAAKDEGIAVIRTKENQFTVSGKIWGMLNKEQ

SEQ ID NO: 88642 - protein, 98 aa, Unknown
  Obtained from environmental sample
  misc_feature (1)..(98): Xaa is any amino acid
MSGRLLEEDPESAYQYAQEAVKRAGRISVAREALGIAAYVTERYDEALREFRTVRRLTGSNEHLPLMADAERGLGRPEKALELAASPEADTLDILGKV

SEQ ID NO: 88643 - protein, 434 aa, Unknown
  Obtained from environmental sample
  DOMAIN (44)...(375): AICARFT/IMPCHase bienzyme
  misc_feature (1)..(434): Xaa is any amino acid
MNLGYIDLVCVNLYPFFEKVQAGLSLQETIEFIDIGGPSMLRSAAKNFRDVIVLTDPADYPQVIEGLKAGNVPPEFRKQLAGKVFDLTSAYDAAIARYLLDDEYPKYLPFSLEKGQSLRYGENGHQSAALYLHTDTTGVLKGMEQLHGKELGYNNIRDFDLAWKAACAFGLPADGASHRDATEPLGEAEVRKFIPQAAGSGKVCCVAVKHNTPCGIALGNTLLEAFQKTFACDPVSIFGGIVASTAKVDVATATKLGELFLEVVAAPDFEPQALEILMQKKNLRIIKLLKAPVEAHEYVAVDGGLLVQQSDRRLLEKWEVVTKAAPAVGDLRDMIFGMRAVTFVKSNAIMIVKDEAATGIGGGQVNRIWPTTQSLERSAEITRDGPARVLASDAFFPFADVVEAAAAANIKAIIQPGGSVNDKLSIEACDKHGI

SEQ ID NO: 88644 - protein, 71 aa, Unknown
  Obtained from environmental sample
  misc_feature (1)..(71): Xaa is any amino acid
MQINGWPDSEVNDFVAKVDAVTLADAKRIIATYYPLDDLCIVLVGKASEIRPVAEKYSKQLTEKSIAGPGF

SEQ ID NO: 88645 - protein, 229 aa, Unknown
  Obtained from environmental sample
  DOMAIN (1)...(142): short chain dehydrogenase
  misc_feature (1)..(229): Xaa is any amino acid
GCRNCFHARNIDKGLEAYKAEGIPAHGYVCDVTDENAVNETAAKIEKEVGVVDILVNNAGIIKRIPMMEMSAADFRQVIDIDLNGPFIVAKAVIPSMVKKGGGKIINICSMMSELGRETVGAYAAAKGGLKMLTKNIASEYGRFNIQCNGLGPGYIETPQTAPLRERQSDGSRHPFDQFIIAKTPAARWGKPEDLEGPAVFLASGASDFINGHILYVDGGILAYIGKQP

SEQ ID NO: 88646 - protein, 751 aa, Unknown
  Obtained from environmental sample
  misc_feature (1)..(751): Xaa is any amino acid
VREIYPSIAAPVHGNFSIAGISDTSDAELTLLFGFGGKVERRIKVKLDTKSADGQVNVHKIWAQKKIEELDLNYEKNRAELIALGQQFGIVTRNTSLIVLESVDDYINYNITPPISEPQLYAEYQRRTKGLQGQKGNGVQSSRFGGAATSDDLFRRGGFATDIDALLSNVGGLKSGGDAGAGRKGVAGIGYGAGYGSGFGGGGGVDDLLGGLSGGGLELRKKGELRVSSPDFLRGGNLTGGRSRASIQRVVMQNIAALRYAYNRRLREKPGLCGKITTKFAIDEFGNVVFAMVMESTMNDSSFEQTVLARIKSWNFDKIDKPGDVTDVTYPLVFDEGGCSNTPVMSAQTNEKAEQEVREKIEQERREANERIEQARRVAEAQARERERAERAERERELSESRRDYDTLNGAVMAAEIIRLWWNTDFTPQSSKYPIPDDNAAGRFSGTGSAKSGFVKSTDYLKKMTGKPEADYQTYLTVRKDHANSPTFYFNMASWFYACGDKETAIRVITSIADLELENATLYRLLGYRLKEFGEYALEKFVCQKVVQWRPMEPQSHRDYANALADNGEPQAALNTLYGALSKTYSRHIEDRSSGIEEVVVTEINRLVTKNNLNKSKIYQSMLINIPVDIRVVINWNMNNTDIDLHVVDPTGVECHYGNKKTMIGGRLSPDITTGYGPEQFLLKKAIKGKYRVYVDYYGDSKVTDAGPATIMAEIYTQYAGRAEHRKVVCLQMSNAKQREDGTVLVAEFEF

SEQ ID NO: 88647 - protein, 118 aa, Unknown
  Obtained from environmental sample
  DOMAIN (1)...(48): Ribosomal protein L9, N-terminal domain
  misc_feature (1)..(118): Xaa is any amino acid
MKVILNKDLAPLGEEGDIKDVAKGYARNYLFPRGIAFPYNEKTIKLFESRKEEIEARKIQKRSDASGLKEKLESLLIEITMSAGPNGNFTALLLTRLCRMNWQNMAITLNRKELKFRG

SEQ ID NO: 88648 - protein, 408 aa, Unknown
  Obtained from environmental sample
  misc_feature (1)..(408): Xaa is any amino acid
MGQDEFDDIKPDFDVGADDDDSSGAGKPDVDLTAGTFPAVTKRFETTPHEFFADPNYYKATLANEGDIAKRVHGLLQKYFAATDPKDRSVFRPQIISSYWEFLRSVAAKSTGKLPEAKKFLLRFGILHPKLLNSEAKAFFSKLVIENELGQPIYYVDEWLRAIGTGSVSPSTTDEVQVANSNKQVKLRQLLEKAHGKLDGSRTMLKAKSQERIELEKALKGQVEFIMEHEFLDDCEGALACYAEGQKRAFTDTQEIIRNLLKTDRELNTLIKDFHQAEEDVETLRDRQGEEEEEGKVLDLQALNTEFDTVRQTVKMTVGRQGNHFPILTSEYFRSGPNDVAFRENVITLLTRIESIDKEAFYRYYRNRLNRIVPYVVLLPCYGDTGVCWEPFDKHNRATSRGRIFIPM

SEQ ID NO: 88649 - protein, 314 aa, Unknown
  Obtained from environmental sample
  DOMAIN (8)...(293): ApbE family
  misc_feature (1)..(314): Xaa is any amino acid
MFSRIREIDRIMSAFPGEFEELLNDSTIIDPNAAGVGNPVSTLVSGVLAINRQAGIAPVKVRADLLEVLVAAQRYAELSGGAFDPTIGPLVKLWGIGSETQRIPAVDEIDAALGLVNFRDLIIDRGAGTAFLRRQGMELDLGAIAKGYAADEAARIAREGRVKRGIIDLGGNILALGWRNERGSVPWRIGVQNPFDVRGESIGFLAVHDTSVVTSGVYERFFEAGGMRFHHILSTTDGYPVDNGLLSVTIVTERSMEADALSTAVFAMGYERGRVLIDSIPNAEVVFVFADRSVKITGGLSGIFTLTNNEFTLY

SEQ ID NO: 88650 - protein, 131 aa, Unknown
  Obtained from environmental sample
  DOMAIN (1)...(131): NLPA lipoprotein
  misc_feature (1)..(131): Xaa is any amino acid
SVNGGRALLLLQAKGLITLKEGAGLTATARDVVGNPKNFRFRELEAAQLPRTLQDVDAATINGNYALEAGLNPVKDSLIIEGADSPYVNIVVVQKGKEDDPRIVALKKALLSQKVKDYINSHYDGGVAAIF

SEQ ID NO: 88651 - protein, 420 aa, Unknown
  Obtained from environmental sample
  misc_feature (1)..(420): Xaa is any amino acid
MKLIPLVLIAVLPCACFGAKTKPLAYEFAVIRRGTLERTASASGTINPVASIKVFSHMNGKVEKVYFDYNDTVKVGDILAVLNTDMLKVKREQQLAALTKVRSNYELQLVYYQSQEALARKNFISEYELKTSLNALENLEADLKVAEGNLKAIETEINQYAFITSPIDGIVLDRNVNAGDTVVESSSSNSASIFTLAENLREMQIEAAVGQLDVSSLYKGQPVRFTLESLSGRSFTGTVENIRMVPVTSNNIVSYTVIIGVKNSDGVLMPGMTCAVNFIVEQRENTLLLPNAALRYQPSTLSAEQIDEMVFVAGLTAMDEGQRKTAIETREQAQAARNSERNATSLTRLVAGSQTPRPPPQHAGEGNRAAVVMRNVWYLNGEGKLEVIRVQTGSTNGSLTEILSTEDLEGKQVILREKLF

SEQ ID NO: 88652 - protein, 65 aa, Unknown
  Obtained from environmental sample
  misc_feature (1)..(65): Xaa is any amino acid
MGGALGIGMAFIAGRVLSMFAIPTAVNPVIVTVAVLFAVLIGVIFGFYPALKAAKLYPIEALRYE

SEQ ID NO: 88653 - protein, 207 aa, Unknown
  Obtained from environmental sample
  DOMAIN (45)...(207): ABC transporter
  misc_feature (1)..(207): Xaa is any amino acid
MAVIEMRGIKREYRMESKKDSQSKDEADAVVVRALRGVDFSAEAGEFISVMGPSGSGKSTLMNILGCLDKPNAGTYTLDGIETSRSNSDTFAYIRNRKIGFVFQSFNLLARTTALENVELPLFYRRRDKAEKKLNAQIRKERAMTALKEVGLEKRIDHFPSQLSGGQQQRVAIARAMVNDPAFILADEPTGNLDTGMTLEIMGLFQE

SEQ ID NO: 88654 - protein, 176 aa, Unknown
  Obtained from environmental sample
  DOMAIN (42)...(169): SCP-like extracellular protein
  misc_feature (1)..(176): Xaa is any amino acid
MNKVRTDPEKYAELYIQPRLKYYSGIYYSVPGQITIRTQEGVTAVNDCITALSTADSVGILAPEKGLSLAAKDHVTDQSKTGQIGHNCSDGSTPETRMKRYGKFSGSWTWGENISYGEANGREIVCSLLIDDGVPSRGHRTNIMNKAFTQTGVANGTHTRYRTSCTIDYAKGYMSN

SEQ ID NO: 88655 - protein, 261 aa, Unknown
  Obtained from environmental sample
  misc_feature (1)..(261): Xaa is any amino acid
LNWFEDQIKNRLQNDEDDFSGAFCELGSVVMGEAAAKAALVTPRQKTQNAIQEILKFFGQVITPVPESITDTAEYINYCLKPSGIMKRRVELTGNWWRDACGPMLGVLQNGDAVALLPSREGYAYFDYESGKRVAVNAASAKNLEISAYQFYKPFPNRELSVLDLVKYMFATVTRSDIFFYLAVLALTTLMGLIQPKISLLLYSRIIPQGNASVLWALGVLMVSLGAASQVLSLSQSLIMQRLTMRLNNTIEPAAMMRLLN

SEQ ID NO: 88656 - protein, 385 aa, Unknown
  Obtained from environmental sample
  misc_feature (1)..(385): Xaa is any amino acid
MRGLGRTVFKRRYRIAALAAALAIGAVNSANATTGPHTFSWRGKNVDISIIQNNTPSPISDLYYKSLLGNLDDFADELRQNGKLGKGKVRFDIYNCTWDVKTGVKMYKYNDVYYCLLNGVEQSITQDYLTKIIAYFASDKWESFTYDETKIEDPAAAIKMFNRKLDPIKVSRVYAPKKVLDAGNGIAVYFEKEKLICKGANKVYGAVEHWLPFSAGSKTFITVGDTINAVEKGAVINRYKLTEDDFGYGDELMPPPGKEVHSEWVNFNYYGSIILSYSIKKNKFYSASEMEAEKEKFAEKERVKEDANESKVNYGTLDDSRDGKKYKTVKIGDNTWMAENINYKPAVGESWCNDDAESNCAKYGRLYDWPSARTACPTGWRLSSR

SEQ ID NO: 88657 - protein, 222 aa, Unknown
  Obtained from environmental sample
  DOMAIN (1)...(222): Dihydroorotate dehydrogenase
  misc_feature (1)..(222): Xaa is any amino acid
MGVKCENPFFLASSVVASNYEMCARALQMGWGGIVFKTIGCFTPKEVSPRFEAVGKEGTPFIGFRNLEQISDHPYEENFKFLKDLKRDFPAKVIVSSIMGSTDEEWTLLAKLSEEAGCDIVECNFSCPHMSGNGLGSDVGQDPALVKHNTECVKKGTKLPILAKMTPNIGNMEIPARAAIEGGADGIAAINTIKSITGLNLKELSAPPSIKGKSSVSGYSGK

SEQ ID NO: 88658 - protein, 293 aa, Unknown
  Obtained from environmental sample
  misc_feature (1)..(293): Xaa is any amino acid
THRLRYATSNNPLGPWKYRGILLDPVSSDTSHGSVVEYKGQWYLFYHTCDISGRGNLRSICFDKLYFNSDGAIQKVVPTIGLEASLRKTVIDAKWTDRAMLVGEAKGAQPEGRNNLWYHQPAKVWEEALPLGNGHLGAMVFGGIADERIQLNENTLWDGYPLESANPEGLKALPEIRRLLFENKNNEAVELAGKTMMGIPQRIKSYQSLGELWFDTPNMTADNYVRSLDLSTAVSTVKYTSDGVNYTREYFASAPDNVIVVRITADKKKKINLNLRMLREKDAGNGGNVLVDI

SEQ ID NO: 88659 - protein, 302 aa, Unknown
  Obtained from environmental sample
  misc_feature (1)..(302): Xaa is any amino acid
MMKTGEATAKTLYGARGWVVHHLTDAWGYTAPADGPQGIWPMGSAWLAQHFWEHYIFTGDKTFLAERAYPAMKGAAIFIMDFLVEAPAGTAYAGKLVTNPSYSPENAFILPNGKESVFTYGATMDLQIIHNLLTNCIQAERIIKKDAKFLADCEKTLKRLPEIKISQSTGRILEWAEDYREVDPHHRHTSHLFGLHPGNQITVVGTPELAEAARKTLIARGDDGTGWGLAWKINMWNRLHDGDHAFQLLAVLLCRKTLPNLFDDHPPFQIDGNFGATAAIAEMLLQSHLQKNDGSFEVELLP

SEQ ID NO: 88660 - protein, 235 aa, Unknown
  Obtained from environmental sample
  DOMAIN (5)...(187): Peptidase family M28
  misc_feature (1)..(235): Xaa is any amino acid
MGQRQPVILLAHYDRAEGSPGANDNSAGVFLLIETAIKLIKKSKADWIIIFTDREELKTGDKVRGQGAYTLAEGLKNLKMEKAKVFSFDACGTGDTLIISTTLEPLLKKETAGEKLKDYLELRKFALDTARNLNMAKVLLVPTPFSDDVGFFRAGLIAQTVTMLPSKECIQLVADLRKNPELAEVFISAEMKQANLSKSIPDTWRAINSPIDSYLRLTPENFRTVVRFAEELCSS

SEQ ID NO: 88661 - protein, 195 aa, Unknown
  Obtained from environmental sample
  DOMAIN (149)...(191): Domain of unknown function (DUF303)
  misc_feature (1)..(195): Xaa is any amino acid
MKDSGLSTLISDGMIIQRDVSFPVWSKEKLTVAFSGKKYESREVNGKWLLTLDPVKAGGPFTMDISSERGSYTVSDIYAGDLWMCAGQSNMEMQMDRLRNVFSEEWENKDFPLIRLFNVPQEWNFSSPCEELTGGSWISPSNETLHEFTGTGWFFAREMYKKYSIPVGLVRTAWGGTPVEAWMSADALKDFPGKI

SEQ ID NO: 88662 - protein, 494 aa, Unknown
  Obtained from environmental sample
  DOMAIN (102)...(135): Tetratricopeptide repeat
  misc_feature (1)..(494): Xaa is any amino acid
GLLISLALVAGSLGDNDGALSFINRALAQHPDEYRVFYYAAYVNANANNLSQAIRYSELALGLRPGFSPARSLLAKLRFRNGQFAEAARLSDEAIVANREDLSAWYLKGLSYIRLGRGEDSLNVFGNALAIDPNDEFIRVALEDTLISITSLEDPRRANWAKWHFDRARDFRSRSLVEQALFEFRRGLRLNPYAVDRREYADLLRMQGYPARYLEELRLLQDQGIADRSMNDAVETYNALLSGALFQRWQVRPVEIDGRHWKVAVFSVAGQSSYRHVDAGAIASSYIKEILIHDRSIIPMNLEVNQPSFSQAFRTAREANADFFLLVSTMENERDISLKGELFVGRTGSAAASFYAYRTGVDRMRNASRGIVEQMGNALPLRGKLIQRRQAQGLIDKGRADKVKEAAVYDIVKKERSQLANQGIGLVYSPEDLVGKITIEAVDEEVASGKLVRNGFFDRIEEGDEVFFIPEGGYKAPAETAANPELRALLRTLR

SEQ ID NO: 88663 - protein, 235 aa, Unknown
  Obtained from environmental sample
  DOMAIN (1)...(235): Phosphorylase family 2
  misc_feature (1)..(235): Xaa is any amino acid
SINKEAVLDYENIPHFPLSTVETHAGKLIFGTLAGKPVVAMQGRFHYYEGYSMQQIVFPVRVMKSLGAATLVVSNACGGINPLFPPGTIMAITDHINLLGDNPLIGPNDERIGPRFPDMSEPYSNELLAIASKVALDNGIKLERGVYASMSGPSLETKAEYRMLKTLGADVIGMSTVPEVIAAVHAGMRVLGFSVITDSCLPDALEPATLAKILAVADKAEPVLVKLIEKVLQSL

SEQ ID NO: 88664 - protein, 1023 aa, Unknown
  Obtained from environmental sample
  DOMAIN (730)...(884): Anticodon-binding domain
  misc_feature (1)..(1023): Xaa is any amino acid
MSKEFFDPISSQVSFPDVERRVLDVWEKEKTFEASLKLTRGKEAFVFYDGPPFATGLPHYGHLLAGTLKDIIPRYQTMRGRYVDRRFGWDCHGLPVENEMEKEFKVSGKRDIEKLGIHLFNEACRSIVLRYTGQWETVVNRMGRWVDFVNQYRTMDPPYMESIWWVFRQMWDKGLIYRGFRVQPYCPRCATPLSNFEVNEGYKEINGPSITVTFPLADDPSTKILVWTTTPWTLPSNVALAVGEKIAYVKIRDGEHVYIMAKERLGAYYKDLSTIEILKEMTGGDLVGQRYVPIFDYFKDKDSRFFTVTAADFVSTEDGTGIVHIAPAFGEDDFVVGQKMGLPIVCPVDDEGKFTDEVPQWQGKLVYTADDEITRHIKTSGRLFHKTAILHRYPHCYRCDTALIYKAITTWFMKIEPLKANMLENNRQIRWVPPHLQNGRFGKGIESAPDWNISRNRYWGTPIPVWLCDCGHKECVGGLDELHTLAGGGDKSAGESIHAQTAQRVQESLKAKDAAQRLSDAGIDSAWTERLANVNISPVDIHRHIIDNFEIKCPKCGALMKRTTEVLDCWFESGSMPYAQQHYPFDNKEIFEKNFPADFIAEGLDQTRGWFYTLTVLSGALFGKPAFKNVIVNGIILAEDGKKLSKRLRNYAPPEDVLNQLGADALRLFLINSPAVKAEDLRFSEKGVTEMSRAVLLPFWNAYAFFVTYANVDGWKPTNIEPPKGGTELDRWIVSLLSDVISSVNKEMELYNLYKVVPHLVDFIDNLTNWYIRRSRRRFWRSENDGDKNIAYGTLYYVLVQFSKVMAPFLPFVTETIYRNLVNGKLTGEPPSIHLTAYPSAATDAIDEPLELKMKLVRQAVAMGRALRSRFTIKTRQPLSEFTVVLSDRKKIDLIRDMEELVKEELNVKKVSFDSDEERVVSISAKPNFKKLGKVFGPKMKEAGALIEKFSAEDIKNLESGSTIDVMGTALAYGDIEVRRAKREGLEVETEGELTVALEVTITPELKRECVAREFVNRVQNRR

SEQ ID NO: 88665 - protein, 188 aa, Unknown
  Obtained from environmental sample
  DOMAIN (32)...(185): Flagellar basal body-associated protein FliL
  misc_feature (1)..(188): Xaa is any amino acid
MSDSDDLDLDSGEAPEAGGAAKKRGGGLGSLLPTILKFVAIGIGALIFIVTVCIITVNILNKGGKSQTVIADPASPYVGKRPEYNYFDMIGAMTVRTRDFPVSSTVSVEMIIGYDLNDTNASSELVTRKYELRDFVRRYFSGKYAAELVPEREEELKADIREMLNTRFLDTARARIILFNKFDVMENF

SEQ ID NO: 88666 - protein, 276 aa, Unknown
  Obtained from environmental sample
  misc_feature (1)..(276): Xaa is any amino acid
MMSDGALSQDEIDALLSGVDSSSSHGGHSSAPAATMAPSAATFDVDSLEQFFSSTTGALSSNLAALTGTTVTLVGPEVAAMSRDNMLTLLPGMVTVVNTNFTSGFPGEHCFIFSEESAKAIASLMTKETDIQLDEMAMSVIGEVVSQIAGTQITALTDKTGNKSIASASPTAANVPKAAAALPAGTFAVMTYGLDMGDGLSHQIWEVLGPSPAADISSGLSGKAQAQAPGMGMQGMNMGGMGMQGMNMGGMGMGQGMSPNLGSANVQPVQFPNLMQ

SEQ ID NO: 88667 - protein, 71 aa, Unknown
  Obtained from environmental sample
  misc_feature (1)..(71): Xaa is any amino acid
MSSSFASFEKLESFMKDVFIKVGVPEEDAAICAEILIESDKRGIDSHGVGRFKPIYIDRIKDGIQNPVTNF

SEQ ID NO: 88668 - protein, 687 aa, Unknown
  Obtained from environmental sample
  DOMAIN (379)...(647): Penicillin binding protein transpeptidase domain
  misc_feature (1)..(687): Xaa is any amino acid
MTGIRYILRRIFYGKDGRISIPKTVSFVLAAPPLLFVLAAFAFSLTDIRINERSPSWIILDRNYRFIAEIESPQGEIGYWPMPEVLPQTLVTAVLAAEDRRFRKHIGVDLKSVGRAFVNNYIKRRGFSGASTIAMQTARLQRGGRGNLFSKVRDSFAALWLTLFYGRERVLRQYVSISPYGNRIAGAPCASRRYFRKPVQDLSLAESALLVSIPRAPGRMNLFNKTGFAAARSRALFVLGRCAKYGWIDSTEYNQSVAELKEFVVPPKDIRDEASIHIALRYTKMLHSAIRTKGINNTANGKDGNSTAARNVNNKNINRNGINNTNNNGSDAMDDAYIGDSVVSHGLVVSSIDIDLQRHAQRELADYLKMIKFRDVENGAVIVLDKNTRQVLTYVGSGGYFNSDLGMHDYAATKRSTGSLMKPFIYALGMEDLGYTAATVLKDINYDFGEGARSFIPVNSDRQYQGPILYKYALANSRNIPAVQLLKEIGVNKVYERLGALRLAEQDGRWDYYGLGLSIGGLYCGLTSVARAYLTLGNDGKYGELAWLRDQTSRRRQALTPQSARMVQRFLADPQARLPTFPRDGNFEYQFAAAVKTGTSEGFRDAWCVAWSDSYLVAAWVGNADNRSMKRLTGYEGAAPLVKKIMQDLHPDRRDGLYEGGFPVPEGWSPFSICRLTGMLPTKIRPT

SEQ ID NO: 88669 - protein, 241 aa, Unknown
  Obtained from environmental sample
  misc_feature (1)..(241): Xaa is any amino acid
MNLNQVWRVSNHCTEGMRFAVSLLKYLPDKAWWRHLGKTLRYSLYTAVHPFDGFWDLTHEKRGSLAAANIIVALAVLIDILRSTLTSFQFVTINMEDFNAVIEMMRIILPIFLWVVANWSLTTLMDGKGRMRDIYMAIAYALVPYVIINAIMIILSQILAFDEGAVYWFLAGFSTLWTGILILAGMMMVHDYSVGKTILSSFLTVIGMGVMVFIFVLFFSLISDSVAYFISLYKEILFRVI

SEQ ID NO: 88670 - protein, 661 aa, Unknown
  Obtained from environmental sample
  DOMAIN (496)...(571): Hpt domain
  misc_feature (1)..(661): Xaa is any amino acid
VPESPVKNLDRGFLAVGLVAFIFSLLAAIIASYFIKKPFEETAKLKEEAESHLRSKTDFLANMSHEIRTPLNVIIGLTDLVLEDDTLDKTVTENLTKINNAGDTLLSIVNDILDFSKIESGKLTISPVEYHMSSVLNDIITLVITRLGEKPVIFNLNIPDELPAKLFGDDLRVKQILTNLLSNSIKYTHRGSIELKVNCTREDSVVWMYITVADTGIGIHEDDLKKLFLDYFQADAKANRNIEGTGLGLPITKKLADMMDGEISAESEYGKGTTFRLRIKQGYVEDTPLGAETAEKLRSFRYIDDKRTAAKRLVRLNLSYAKVLVVDDMQTNLDVAAGLLRIYNMQVDCLSSGEEAVNRIYSENPVYDAIFMDHMMPGMDGIETTDKIRALGREYAKKIPIIALTANAIHGTEQMFYEHGFQAFITKPIDIMELDTVIRKWIRNEEKEKELGTNAFITPDVSPEDEKTANLEIIIPGVDTEKGLSLYGYDKKIYLTLLRSYVPNTLENLKKLKTVSKATLSDYVIRVHGLKGTSAGIGAEEIRAKALKLENLARAENLDEVLALNDNLIKNAEIVVNNIKEWLAGYDLHNKKPLLKKPDRKILARLRQCCDNFDMAGIDKAMTELESFNYEEDAEMVAWLREKINISEITEAAMQLAKILV

SEQ ID NO: 88671 - protein, 263 aa, Unknown
  Obtained from environmental sample
  DOMAIN (1)...(187): Transposase IS66 family
  misc_feature (1)..(263): Xaa is any amino acid
MRIFVDRIVRPKYACRRCEGAEDENKPTVRIAPAEPAMIPKSIASPSLLGAVFTQKFEMYMPYYRQEKQFEQIGVEISRQDMSNWQQQAFEGLEPLFAILKKTVKDDPVVQMDETEVQVIGEENRSDIQKSRMWLARGGPPDKKVIWYEYHPTRAAYNAKAFLEGYSGYLQTDGYDGYDSAVKDMPGIIHVGCMAHARRKFFEASRINKKPQSAEEGIKHIRKLYRLEDALRGKWKDNLERFNEERKKEAALLLDEFKSWLLK

SEQ ID NO: 88672 - protein, 626 aa, Unknown
  Obtained from environmental sample
  DOMAIN (147)...(416): Penicillin binding protein transpeptidase domain
  misc_feature (1)..(626): Xaa is any amino acid
MNLFTPSGSPAARSRALFILGRCADYGWIDSTEHRQSSAELKEFIIPPKDIRDEASIHVALKYTKMLHSAVRNGGINGKRSISNNGIGSVNINGINNINNIDETDIGDSIVSHGLVVSSIDIDLQRYAQRELANHLDHLKTRDVENGAVVVLDKNNRQVLAYVGSGGYFSFDNGMLDYAAIRRSTGSLMKPFIFALGMEDLGYTAATVLKDINYDFGEGARSFIPVNSDRQYQGPILYKYALANSRNIPAVQLMKELGIHKVYGRLGALELAEDDGRGDYYGLGLSIGGLYCGLTSIARAYTALGNDGQFGELVWLRDQSGGQRKQVFTQQSARMIQRFLSDPQARLPTFPREGNFEYPFAAAVKTGTSDGFRDAWCVAWSSRYLVAAWMGNADNRSMKRVTGYEGAAPLVKKILLQLHPNERDGLYEGGFPVPEGWRPFSICRLTGMLADENTPYVTSDYFAPGTEPKEVSAVSRGMMVDKRNGLLANRNCPKQYKEYRQFLSLSPEYEPWGRAYGLPIAPRLHSPLCPGGASLPVDYALEITWPRSGARFFVDPESPPDQVFLPVNCVVEPEARSLLWFVNGEEHSVTNPPHTLRLPFKSGKYAIQAEVAGTPVRSKVVRFEVY

SEQ ID NO: 88673 - protein, 275 aa, Unknown
  Obtained from environmental sample
  DOMAIN (1)...(88): Glucose inhibited division protein A
  misc_feature (1)..(275): Xaa is any amino acid
MSTSLPYDVQERMVASIEGLRGARIMRPGYAIEYDYFQPLQLRPTLESKIVGGLFFAGQVNGTSGYEEAAGQGLLAGINAVLGLRGEEPLVLGRDAAYIGVLADDLVTKGTEEPYRMFTSRAEYRLILRQDNCDERLMPTAYRLGTVSAERYDERRRFWDRKREAAAALEGVRVAAGGSARDLLKRPEAGIEGLARECGVIGEMLAFRGGEGGGAGGVIDTADLLDDMGIGIDTDSVEEPIIDTVEVSGIDRHLALGVESDIKYEGFVRKQTREI

SEQ ID NO: 88674 - protein, 385 aa, Unknown
  Obtained from environmental sample
  misc_feature (1)..(385): Xaa is any amino acid
MKNAIKIAVLTVVLAAGCMSYKVESVDVIAEGNVASMNAGEKLQFISQVTATGKDTTGSERVNWKVSSTASGTGQVTSGTSVSFDGLLTVSIDEIYPALYVRATSVAYSTKYDYRMIKISGPKVGAVTLSSVGNARSIDAGGTLKWNATAAGKSQNQGIAFSVGSRSDGTGPVAEGTAITADGTLSVSVNETASSLYVKAVSVSDPTKTDIKEVQIATITSVTVIAAGGNARVMRGSTLRFNAVVAGNNNPDNGVTWKVSSTADGTGAVTPGTAITTNGTLSVAATEAAATLYVIAASRINAEKSGSIVVTLPTVTEVTISPANPQIRRGEGQTFTARVQGTGDPGQEVTWKVDGIGGAAASIITTNGILAVSTAETMTQLLVTA

SEQ ID NO: 88675 - protein, 98 aa, Unknown
  Obtained from environmental sample
  misc_feature (1)..(98): Xaa is any amino acid
VIWPGYGDNSRVLAWIFDRCDNKDNCVETPIGNLPKPGAIEPPASVTPEMMSEICSVDIEGWKKEIADVRQNHYPKFGDKLPKELYAELDAIEKRLNG

SEQ ID NO: 88676 - protein, 335 aa, Unknown
  Obtained from environmental sample
  misc_feature (1)..(335): Xaa is any amino acid
MNNIQIKFINTQKTITCPYGTIASTLVEHFGIPQEKIAAIKENNEIRPLGTTLLANASVEPILIDSSEGVAVYRRTLSFVLAIAAQKIFPKDGVYVGHSLGYSYYYTLSSGDKPKESDIKKLEDEMRALIKENLQISFKYLSYEEALQLFKKNNQTDTVLLLEHRSSPLIKVNECKDYMDIYVQPLLPCTGLLNAFELMPYQDGFLLRFPGTGKGGVIEPFTDEPYLFNVYSDYKKWGKIIGVRVVGELNARIANRNFQEYIRIAETHQERRIGDIARLIYEKRENIKMILIAGPSSSGKTTSAKRLEIELMVSGIKPIAISLDDYYKGTADTPK

SEQ ID NO: 88677 - protein, 553 aa, Unknown
  Obtained from environmental sample
  DOMAIN (289)...(495): Phosphoribulokinase / Uridine kinase family
  misc_feature (1)..(553): Xaa is any amino acid
MNNLQIKFINTQKTVTCPYGTIASTLIEHFGIPPEKIAAVKENNELRPLGTSFLVNASVEPVLMDSIEGAMVYRRTLSFVLAIAARKIFPNNGVYVGHSLGNSYYYSLSSGEKPKESDVKALADEMCNIIKENLPITFKYLSYEEALQLFKENKQTDTVLLLDHRSSPLIKVNECKGYMDIYVQPLLDRTGLLSVFELMPYQDGFLLRFPGIGKGETIAPFVDEPQLFQIYSNYKKWGKIIGVRVVGELNARIANRNFLEYIRIAETHQERMLGDIARLICEQRENIKTILIAGPSSSGKTTSAKRLEIELMVSGLKPIAISLDDYYKGTADTPKDENGEPDYECLEALDVEYLNKQLQALYRGEEITLPVYDFKTGTRKETGGRKIKLESNNVLIVEGIHGLNDALTYSIDRKTKFKVYISALTQLNLDDHNRIPTSDNRLLRRMVRDSQFRGMQAAGTIKMWPKVQAGERKHIFPFQGSADATLNSALDYELSVLKYYADPLLRVIKPGMTEYAEAVRLLAFLENFIPIPPQYVPGTSILREFIGGSEFKY

SEQ ID NO: 88678 - protein, 321 aa, Unknown
  Obtained from environmental sample
  DOMAIN (14)...(175): Radical SAM superfamily
  misc_feature (1)..(321): Xaa is any amino acid
LLDGAGRTIDYLRISVTDRCNLRCLYCMPGEGVGWIPHEDVLRFEEILRICRILAGMGIKSVRVTGGEPLLRRGLAGFISGLKAVNGINRVGMTTNGVLLGEQLEALTRAGLDAVNISIDTMDREKYSWLTRMENTVNVISVIDRALEMGLEVKVNTVMIKDVNENEITAIAGLVKNRNIAARFIELMPLGEAAAFKPFYAHEAAALIQGTYGPLLPASVKLGNGPAEYYTIAGFAGHIGFISPMSRCFCKSCNKLRLGASGFLKLCLSGDSGLDLRGLVRGGASDEEITGLIREQVALKPAGHSFAERGGSSVNMFRIGG

SEQ ID NO: 88679 - protein, 90 aa, Unknown
  Obtained from environmental sample
  misc_feature (1)..(90): Xaa is any amino acid
MGVVKAVCLSKEKGIAKKDLGRGELVAQHGLKGDAHAGDWHRQISLLSLQSIEAFRAKGAEVEYGAFGENLVVDGIDFASLPVGTNSAAG

SEQ ID NO: 88680 - protein, 307 aa, Unknown
  Obtained from environmental sample
  DOMAIN (107)...(154): Flagellin hook IN motif
  misc_feature (1)..(307): Xaa is any amino acid
MAVEVNELLKELVAISNKTGPDTKQAFAGDKVFTEPFRIVEGRVDGGEESMIVRVEYRGAGATRRAEINDRTFVELDIGGDEAFWAEKMKIFSSTDATDYRVQQAGAFFVDGVEIQVTPGDTLPAIVAKINDSAAPVKAYIDPDSRGLVLEGTTPHLIRAEDSVVGGATVLRDLGIINGNMQNNAPNWSNTARVHGGSLFDMVIRLRDGMLRGDSEFIGSQGIAGIDLALNNNAVRMADVGSRQERAQMAWERINREIPDITNMLNRESGLDLADAAMELRELQLAHQATLQTAAKIIPPSLLDFLR

SEQ ID NO: 88681 - protein, 272 aa, Unknown
  Obtained from environmental sample
  DOMAIN (7)...(263): pfkB family carbohydrate kinase
  misc_feature (1)..(272): Xaa is any amino acid
MVSGGGGANVAKIAGLLGVKVSFTGAVGNDEFGRLFKKSLAAAGVKLRLAIKPSPTGVCLMLRNKAGEILIAASPSAATLLSESDIGGEEPQVVLIDGFMLDKTALVSHILSMVGRNDSISTAAIDLSSPSIAREYAAEIADFAKNYPLILFMNEAETEAFSDGLKIKSVMQETLFEKNTNFPIIIVKMGQDGALFYSGGKIFRAETQAVTPVDATGAGDAFCAGFLSAWVKNKALSECAAFGNMTARTVLGAEGSQADKKALKVISKLLSK

SEQ ID NO: 88682 - protein, 68 aa, Unknown
  Obtained from environmental sample
  DOMAIN (1)...(67): Chaperonin 10 Kd subunit
  misc_feature (1)..(68): Xaa is any amino acid
SAGGIIIPDTAQEKTQIGLVIEVGDDKEVIKVQAGQKVMYDKYAGTQVKIGGEDHLILKMADILAIIE

SEQ ID NO: 88683 - protein, 449 aa, Unknown
  Obtained from environmental sample
  DOMAIN (95)...(310): Xylose isomerase-like TIM barrel
  misc_feature (1)..(449): Xaa is any amino acid
MAEYYTGGKEYFPKIKKIKFEGSGSDNPLAFKYYDPEKKIGKKKMRDHLRFAIAYWHSFCADGTDPFGAATHVHPWIADAKTPMEAAEHKMDAAFEFFTKLGADFYCFHDRDMAPEGANPAESEKNLFALVARAKKLQKATGVKLLWGTANLFSHPRFMNGAATNPEFGVVALAAAQVKAAIDATIELGGQGYTFWGGREGYMSLINTDLKKEKDHLAKFLAMARDYGRKQGFKGSFYIEPKPMEPTKHQYDFDTETVIGFLRHYGLDKDFRLNIEANHAELAGHDFAHELETAAAAGLFGSVDANRGEPRNGWDTDQFPTDYYETAMAMYAILKAGGFTTGGLNFDAKIRRNSIDPADLFIAHIGGMDAFAVGLEIAQRIITDGKIPAFVKKRYSSFNSGDGAKFDKGEMTLSQLAEIGTAAGYGKTGLTSGKQEHLENILNQYLLGI

SEQ ID NO: 88684 - protein, 283 aa, Unknown
  Obtained from environmental sample
  DOMAIN (1)...(175): FGGY family of carbohydrate kinases, N-terminal domain
  misc_feature (1)..(283): Xaa is any amino acid
IGVSGHQHSFVPLDEKGKPVYNVKLWCDTSTANECEELTKLAGGEKKLISKTGLPMRPGYTAPKVQWLKNHKPKAFSKLRHIILPHNYINFLLTGVYCAEYGDASGTALFDITNRKWSSLVCKYISPDLEKMLPPLIASDEPAGKVSQAAASLYGIPEGALVASGGGDNMMSAIGTGTVQDGFLTMSLGTSGTLFGFSKKPVIDPTGNLAAFCSSSGGWLPLLCTMNCTVATEEFRTLFGMEVKPFDTEAAKAPVGANGIVVLPFFNGERTPNLPNGRASING

SEQ ID NO: 88685 - protein, 379 aa, Unknown
  Obtained from environmental sample
  DOMAIN (30)...(340): D12 class N6 adenine-specific DNA methyltransferase
  misc_feature (1)..(379): Xaa is any amino acid
MGGRIILQDVETDRALCEKEEFLTRQLITYIGNKRSLLGFIGNGIKKVQERLNKNKLKMFDVFSGSGIVARYFKQFSELLIVNDLEKYSVLINECYLSNENDLNLSLLREYYDEVIENIDKRLIKGIISELYAPNDDKNIMPNERVFYTARNAMYIDTARQLIGKLPQEIQKYFLAPLLSEASIHANTSGVFKGFYKNKETGIGQFGGKNQDALFRIKGDIELPFPIFSNFNCDTLVYNQDSNELIKSLPEVDIAYLDPPYNQHPYGSNYFMLNLILDYSYPENTSKISGIPEGWKRSDYNKGNCALKSLTALVENIKAKFVIISFNSEGFISAEDMKNMLQKIGSLEVLETKYNTFRGSRNLNNREIHVKEYLYLLEK

SEQ ID NO: 88686 - protein, 423 aa, Unknown
  Obtained from environmental sample
  DOMAIN (51)...(423): AMP-binding enzyme
  misc_feature (1)..(423): Xaa is any amino acid
MYEKQPWLSQYGETPVSVEYPDLSIYGLFKRNHRKYPDTDALIFFGKRTKWPALDQKIINMSRKFAQTGLKKGDIVIVCLPNIPQAVISIYALNRLGAIPSPIHPLSASGEIEEFSKLVSAKAAITLDGFYPRFAGLKYNFEKIIVCSLKSEMDLLTKMGFSLGMGRKIKPVPFSDTVLDWAKLEAEKEAPELESPDPTGADEMALILFSGGSTALPKAVMLSNRNCNALAMQMQAHGGPLTPGDKMLSILPVFHGFGFAVGIHAMMITGGACILIPKFKASTLAPLIKKHKPQFMAGVPTLYDALAANKKFRKVPLGSFKGLFCGGDSLSPEVKRRFDEVLKNGGANIFLREGYGLTETVTASAIMPRDRYRENSFGIPCPDNWFKVVKPGTEEECPPMEDGEICASGPTVMLGYYKDPKAT

SEQ ID NO: 88687 - protein, 402 aa, Unknown
  Obtained from environmental sample
  DOMAIN (1)...(231): EAL domain
  misc_feature (1)..(402): Xaa is any amino acid
MNLSENNIIAYFQPILSADSNDVYAFEVLGRYTDEDGTVHSLGHFFNNSDISHEEALRVDRIVRRYAMKKYADEKRTEYLFINIRLAWLLPYVDNPEDMRTLKLAKEFGIPSERLVIEITEEDFNASEEYLRAIVHYKMAGCRIALDDYGKEASNIDRLAKLQPDIIKINIDYIHNCETSYHYREYLRSTAVFADAVGIEVLHEGVETKRQLDVCISSKGRFYQGFLLALPQPSMINPETNTFVFSELIAAAYNGIQTTVVNMETLRNSIDVQIERFLKENPFDNEKTNDDEYLKKLLLELPEVIRVYICNRKGFQLSDNIERQSGNIVCRDLKNKNWAWRGFFHETIKAFIRGRKTCLSNPYRDFTTKYKICTYCYAITDDIFLFADMIKEPEKVNDYAAG

SEQ ID NO: 88688 - protein, 123 aa, Unknown
  Obtained from environmental sample
  DOMAIN (8)...(123): Endoribonuclease L-PSP
  misc_feature (1)..(123): Xaa is any amino acid
MSKQIISTESAPAAIGPYSQAILIDGLLFASGQIPLLPETGDVVPGGINEQAEQVMKNIAAVLSAAGSDFSQVVKATCFLTDMNNFAVFNEVYSRYFTGKPARSCVAVSALPRGVLVEVEVIA

SEQ ID NO: 88689 - protein, 183 aa, Unknown
  Obtained from environmental sample
  DOMAIN (6)...(126): Carbamoyl-phosphate synthase L chain, N-terminal domain
  misc_feature (1)..(183): Xaa is any amino acid
MPLDKNIQKTMVIGSGPIVIGQAAEFDYAGTQACRVLRQDKIEIVLVNSNPATIMTDNNIADKIYIEPLTLATVKRIIEKERPDSILSGLGGQTGLTLCMQLARDGFLDKYQVRLLGSSPETIDKAEDRKMFKETMQSIEQPVIPFGNRNRRANGGKVCRRIGIPRYCAPRLHAGRLGRRHCG

SEQ ID NO: 88690 - protein, 442 aa, Unknown
  Obtained from environmental sample
  misc_feature (1)..(442): Xaa is any amino acid
SSCPFTVEPDAFEGVKRIARKVAADFEKICGKRPEITEKPENTPAVVLFATLGKSPLTDALIHGGKFDPSLIQGKREVYQIKLIDKPFDGVSKALLVCGSDKRGTIYGMFALSEFIGVSPLHFWGDAEPQKQERIEISEKIETVSKEPSVKYRGFFINDEWPCFGNWTFNHFKGFTAEMYDHVFELLLRLKGNYIWPAMWTSSFALDGPGNLNEELADIYGVFIGNSHHEPCLRAGAEWDKVRGPDSIYGNDWDYYINKNGLLKYWEDALKRSGKYEKIITIGMRGENDSAILDNDASVNENISLLKDIIKNQRKLIKKHVNPKLDKVPQLLALYKEVEEFFYGDGRVEGLKDWDELDNVICMFCEDNYGFMRTLPWKEIRGRKGGFGMYYHFDYHGAPVSYEWMPSTSFERTWEQMCMAYDYGIKDVWIVNVGDLKFNEVP

SEQ ID NO: 88691 - protein, 145 aa, Unknown
  Obtained from environmental sample
  misc_feature (1)..(145): Xaa is any amino acid
MNEQPKEITLLHLIDSVKTCSDARRRYCFILGAGASVSSGIPTASELATQWLKELLKIEPKTTKKWIIENKIKKKQIKKNKIGRFYSTIYEMRFSAHPVEGYVRLQSLMENAKPKIGYYHLANILVTDKKPINLVITTNFDSLMK

SEQ ID NO: 88692 - protein, 174 aa, Unknown
  Obtained from environmental sample
  DOMAIN (1)...(170): Ham1 family
  misc_feature (1)..(174): Xaa is any amino acid
FHENALAKARELYILLEKSRPALFSSGDPIIADDSGICVDALDGRPGIYSARYAGAINNEQLTINNGKKLKASERNSLLLEELGNAANRKARFVCAMVLMYSLDRFFVAQETMEGAIVKDMGHARGAGGFGYDPILFIPEFGRTVAELSEEEKNTSSHRGKAGKIIAEIITKEE

SEQ ID NO: 88693 - protein, 262 aa, Unknown
  Obtained from environmental sample
  DOMAIN (10)...(262): UvrD/REP helicase
  misc_feature (1)..(262): Xaa is any amino acid
LSIKNLKTELNEPQLKAVTTIEGPVLIIAGAGSGKTRVITYRIAYMLERGIPQNAILALTFTNKAAKEMETRVKELTGKKLQSLTVGTFHAFGLSIIRDEAELLGFRKNFSVYDETDRITLIKESLRECRLASKKFDLYALGQLFSNIKTGICSWNEGAGLGGRSASADLKPVYETYQSGLKVYNAVDFDDLLTLPLELFERNPDILANYRKRYRYIMVDEFQDTSLIQYRLLRALAWRNTEGISPDIRQVDTVNLPNVCVV

SEQ ID NO: 88694 - protein, 441 aa, Unknown
  Obtained from environmental sample
  DOMAIN (1)...(441): AcrB/AcrD/AcrF family
  misc_feature (1)..(441): Xaa is any amino acid
MVTSDKRTPEELREISEDTIVPRIEQTPGVATASVNGGREKIVRVEIPQSRLEAYGLTITQIQQMIAAQNMQTAAGTITEGGLSYILTTMGEYTSLEEIKNTVISYKGGGYSGGQVEMPKQIYLRDLANVFEGYRDETSTVYVDGQTAVMLMVQKQSGKNSVQTAKDLRVRLTGMAKQLPPDIKITEIFNTTDMVQNSLNQVTSSAFSGALLAVLILFIFLRSAKPTLIIGISIPVSVIITMMIMYFFHLTLNLMTMAGLVLGIGMLVDNSIVILENIYHYREKGAKLKTAAVIGSSEMIVAITASTITTICVFAPLVMFKGLLEMPGELFAGLAFTVVISLGISLFTAVFLVPILSSHYLPLVTRKQKPLKGMLAGIDAKFEQFFTWLENKYRNAVRKVLKHKLIVIVFLLVLFTGSMILIPKIGWEFMPQQEEDNVNIS

SEQ ID NO: 88695 - protein, 861 aa, Unknown
  Obtained from environmental sample
  DOMAIN (179)...(332): AIR synthase related protein, C-terminal domain
  misc_feature (1)..(861): Xaa is any amino acid
YGDAAYSRAVSLMDIALMGMRELRKKGLLDDLDASDEVNACSIVVPAVVDGETEDWLVMFKNETHNHPTEIEPLGGAATCLGGAIRDPLSGRSYVYQAMRVTGAGDPRAAVGETLPGKLPQRKITTLAALGYSSYGNQIGLATGIVAEVYHKGYIAKRMEIGAVVGAVPKSHVARREPVPGDVVVLLGGRTGRDGCGGATGSSKEHTEESIQTCGAEVQKGNAPTERKIQRLFRDPEVGRMIRRCNDFGAGGVAVAVGELAAGLDIFLDAVPKKYEGLDGTELAISESQERMAVVISSSDLKAFQAKAEGENLETAVVATVTDAGRLRMFWRETAIVDISRDFIDTNGVLQKAEVFVKSPKALYLPNVLSMTSKCRDEAGDAAGAFFDTMTDINACSQRGLKEMFDSSIGAGTVLMPFGGRYQRTPAEAMVAKLPVASGETVTGTAMSYGFDPYLSSWSPFHGAVYAVIQSVAKIVAVGGDHRKVRLTLQEYFEKLGSDKTRWGKPFAALLGAYYAQVKLGIPAIGGKDSMSGTFKDLHVPPTLVSFALAPVDVTKVVSPEFKRIGSVVVFVSIWVDDFGMPDFDVIDMCYSAVHKGIVDGKILAAHTVGRGGISEAVAKMCFGNRIGFRVDEGVNPAELFKPDYAGLVIELDKSVNTDRNVLGIGENCTILGVTTEEREIVCRNARIDIDELYEKWDGVLESVFPTRAGTGEFGDNIYDNFAGGVNPDTNVSANDYPSHKKAKIKVAKPRVLIPVFPGINCEYDSARKFARAGAECDFFVFKNINPQDIDESVKIISEKIANSQILMIPGGFSAGDEPDGSGKFIAAFFRNPRVKDAVSEFLNNRDGLMLGICNGFQALI

SEQ ID NO: 88696 - protein, 114 aa, Unknown
  Obtained from environmental sample
  misc_feature (1)..(114): Xaa is any amino acid
KNNWYILYDLAMLSFTSYTKAGLRLATIFGFLMGGMTFIVALAYFVYKLIFWDNFPTGIAPLVIGVFFIGSMQLFFIGFIGEYVMAINTRIRLMNRPLVIEEERINFEAAEDNT

SEQ ID NO: 88697 - protein, 478 aa, Unknown
  Obtained from environmental sample
  DOMAIN (12)...(304): Lyase
  misc_feature (1)..(478): Xaa is any amino acid
MDNNSYVNPLSDRYAGPEMLRLFSPQYKFSTWRRLWCALAEAERELGLPITEEQIAEMRKHVADIDFDAAREFEKQTRHDVMAHIAAFGAICPAAKPIIHLGATSAFVGDNTDLIQMREGCRILLGRLATLLSVLKTFALDNADRATLGFTHFQPAQLTTVGKRACLWIYDLLMDFEELRRFESALKFRGVKGATGTQASFLNLFDGDREKVRTLDKNVARKMGFDEVFPVTGQTYTRKVDSQIASILSGLAQSLHKLANDIRLLQHLKEIEEPFEKGQVGSSAMAYKRNPMRSERLTALCRFLISNALSPAMTAAEQWFERTLDDSANKRLSIPQSFLAADAALIIAANVCNGLAIYPNVIAKHIKEELPFMATENIIMEAVKRGGDRQLLHEHIRVHSMEAGKKVKVDGGENDLLKRIAGDEIFGMTESDLAALLDVRQFIGRAPEQVREFVAEYVDPVIETGKAYGSPERRELSV

SEQ ID NO: 88698 - protein, 263 aa, Unknown
  Obtained from environmental sample
  DOMAIN (4)...(102): Aspartate/ornithine carbamoyltransferase, carbamoyl-P binding domain
  misc_feature (1)..(263): Xaa is any amino acid
TGVLIFEKPSLRTRVSFETAIHELGGHAINLPGESVGMGKRESVEDVARNLNRIVHLIVARTFAHETLTRLASSCSIPVINALTDFAHPCQALAFGQTLAETRPDEKLNVVFVGDGNNVCSSIMVLCAKLGHSFTHAGPKNYEPHADLVNKCNEICAASGGSLSVTTNLNEAVKNADVIYTDVWTSMGQEAETEKRKQAFSAYQVNAELMAKAPSDAIVSHCLPAHRGEEITSEVLDSKACVAYAEAENRLHVQKAVIVYLFS

SEQ ID NO: 88699 - protein, 260 aa, Unknown
  Obtained from environmental sample
  DOMAIN (61)...(163): KaiC
  misc_feature (1)..(260): Xaa is any amino acid
MSEPESEKRVSFGIKSLDTMICGGLLESSANLIEGAPGTGKTTLGMQFIYNGITMYNEPGLIITFEEFPQQYYHDAMRFGWDLKKLEEEGKLKIIFSDPETALREFDKSDGKFVTLIEELGVKRVVVDSMTHFEPLAQDPSERRDLERRFINSLKREGVTSILLRENDSLLGNLSQITSKIPFIVDTYVLLRYVEIDSAIEKALCFLKMRGSDHQKEIRCFSVTDKGIDVSSKFSGKEGIMSGITHSKPQDAFMNAFGKK

SEQ ID NO: 88700 - protein, 294 aa, Unknown
  Obtained from environmental sample
  misc_feature (1)..(294): Xaa is any amino acid
MNDMQSIEREKAVARGNADSTTMTGLDSARAKPFKFNLNAYAYNKEPANEVQLGFFAHAKKALSGTQIAVFGNLATDDMAGAQISSFVNISTENIYGLQASSSFNIATNFNGVQASVYNIAGIGNGVQLGVMNIISDTLYGVQGSVFNIARKVSTLQGGVMNIAGNVGKVQGGVMNIAGDAGLVQGGVMNIAGKVEKLQGGVLNIGGHVGRQIGIINISAESDHTPIGLLNIVGNGIIDGTFYLDETGRTGIALHMGTPYLYTVLDCALDPTDKWPQSSGFGLGTRFGMRGNHL

SEQ ID NO: 88701 - protein, 390 aa, Unknown
  Obtained from environmental sample
  DOMAIN (156)...(340): Pyruvate ferredoxin/flavodoxin oxidoreductase
  misc_feature (1)..(390): Xaa is any amino acid
MGSSADTIHEYVDWAASKGEKLGVLKVRLFRPFSIKHFVQALPASVKKITVLDRVKESGAIGDPLYLDVVTALREAKEEGIATVDPKVLAGRYGLASKEFTPGCVRAIFENMSSAKPINHFVVGIVDDVSKNSLNVDPDFDIESSDVKRAMFFGLGSDGTVGANKDSIKIIAGEAGLYGQGYYVYDSKKAGALTVSHLRFGPNKIRSAYLIKKANFIACHQTEFINKYDMLGFASEGAAFLLNTPAPVDKVWDTLPKEMQETLIQKKMKFFVIDGYEVGRQTGMGVRINRIMQTCFFAISGILPREEAINQIKKFIQKTYAKKGEAVVKKNFDAVDQTLKHLHEVAVPASVTSNTCRPPFVSDKAPAFVKDVLAVMMANKGDELPVSAFS

SEQ ID NO: 88702 - protein, 471 aa, Unknown
  Obtained from environmental sample
  misc_feature (1)..(471): Xaa is any amino acid
MAVHVSEGAATIPEKKQNRESGGREPAMREPAMRELGAGAAVSMDSGGSIRSAPAAFVIQPKSNALYRKSGNEPLNIFFSWNRINLQPNETLRLEIAEDEYFSSSVRTLNGLNDSARAGLSAGLWNWRLTYNGTVLDSGRFTVTDVDGIELLSPARNRQFFYETEAPKLYFQWSQINDVSYYIVEVDVSPEFRNPIIKRQTTAASFFDSSLKEGIWYWRVTPVFSQTNANADGVINPPPSAFRIVKSKEPQTPALTFIEEPAPSSAPASVPAPAPVLTTAPTPAPEATPAPAPEPVPALEPALTPTPAPAPGSTPTSDPAPKPAPVSAPARPSQPKRITLESPSNETTLPGLTALRQQTVFRWTSDEAVAKSRFVLSHNSNPLTGRAVIEIIDPNRTIRIDSLEEGVWYWTVEAQTPEGINISAQTPRRLQVLPIPLLPAPSGLQPAERYRIGIEELKKITVNFKWAQVQG

SEQ ID NO: 88703 - protein, 70 aa, Unknown
  Obtained from environmental sample
  misc_feature (1)..(70): Xaa is any amino acid
QIEDIVNGIEDESAILSKGSREISSSVIGELVLKKLGELDKVAYIRFASVYKSFNNLEEFLEEIKHVGEP

SEQ ID NO: 88704 - protein, 245 aa, Unknown
  Obtained from environmental sample
  misc_feature (1)..(245): Xaa is any amino acid
MKIGLDTFACDGGKSGVGMYLTQFLKRIKPSEALFELFGWEYDRYTYTEVAPNFEFIPQCSIHGKTANSFWHVYRYPEFALHRKFDACFFAAAHRYLPYKSPCPTIGVVHDMAAYYGNRKTRVHLGAFLRMILPNSLRKLDRIIAVSEFVKKELVERANVKENRIEVVPNGIDHESFYPRQRNEESVLLIQPFSFKRPYVLCASRIDHPIKNHVRLIKAFNIFKEKTKYPHRLVLAGGDSNNASV

SEQ ID NO: 88705 - protein, 98 aa, Unknown
  Obtained from environmental sample
  misc_feature (1)..(98): Xaa is any amino acid
TGIAARYYADDLVFQGDDGVVYRLEFGADLSRAAPVYDIGRYKNEILKGPIDRLELGEIVYVKAEQPREKIPYRVIFNIVIIVIGILLGALIILKLKK

SEQ ID NO: 88706 - protein, 104 aa, Unknown
  Obtained from environmental sample
  DOMAIN (31)...(94): Bacterial regulatory proteins, gntR family
  misc_feature (1)..(104): Xaa is any amino acid
MTARMNKRAKQPADHKEPLNFTLDPVNGVPIYRQIIQQIEYAILSGRMRAGDRLPTIRALAVELKTNPNTIARAYNEMEIKGILVTQVGSGTYISDKKPVLDDD

SEQ ID NO: 88707 - protein, 277 aa, Unknown
  Obtained from environmental sample
  misc_feature (1)..(277): Xaa is any amino acid
MQAKKKAAKKTYKSSAKKKTVPSLNMVTMDELKAIIAETSKTMAENHAKTEASIDRLSAAQAKTDAAIDRLTAQNEKIAAESDKRHARMEERHAKTEAAIQELSAENRLLAAEVRKTSAAVRDLTQNMGGINNSFGTLVEIVLIPKIRADINAIGNHTFNRAIVDKKVSALVAGAKSTIGEIDLFLFSDAGNEALIVEIKAQFSVRQVAERLERLKKYRKYEEEAEIKGKTLFGAIAGIYIDPTVKDFALENGLYVIEIHEEEEKIDITKPDTCRKW

SEQ ID NO: 88708 - protein, 404 aa, Unknown
  Obtained from environmental sample
  DOMAIN (67)...(304): Iron only hydrogenase large subunit, C-terminal domain
  misc_feature (1)..(404): Xaa is any amino acid
MRELITNDVSKCVGCNRCIRVCPVEGANVVYSEGGQIKVKVDPNHCIACGACIRACRHKCRDYNDDTERFLADLEKGTPISLFAAPANRANGENWGRLLTWLRQMGVRKIYDVSLGADICTWGHIRYIQKHIPESVVTQPCPAVVNYILMHRQELIPYLSPVQSPMLCTAIYMKKYEGVNDRIAALSPCIAKSDEFAATGYVDYNVTLKKLYEHIEAHGIALPKEESGFDHAESSLGCLYSMPGGLRENVEWYLGKILRIDKSEGQGTVYRALDRFAKKRGTNLPAIFDVLNCPEGCNLGTGCAHERDEFDVNAIMDEARQNILQRRSQEDFEALYADYDKRLKLDDFIRQYTPVRLAPYTASQEQIDRSFERLGKETEEEKTSIAPRAARTPAAIWRKRWLAV

SEQ ID NO: 88709 - protein, 602 aa, Unknown
  Obtained from environmental sample
  misc_feature (1)..(602): Xaa is any amino acid
MDIYIVDNKIYIHPLKVWERYSPTMFFPHLIDGDGAISITSSADTATLFSQVSGSGQPSDYWNITLDHARTLLNGGDKESQEEMKRNLISVVIGKELRITKLAFKYFTLRDVLDIARREIGTGFVGGKSVGMLLARKILETDAQDAMRGHWEPHDSYYLGSDIFYTYIVQNGWWDLRMRQKTNEGYFTLAKELHEKMLQGKFPDNIREQFKQMLEHFGQSPIIVRSSSLREDNFGNAFAGKYESVFCANQGTPERRYAAFEQAVRTVYASTMNEDALAYRQNRGLTNLDEQMAILVQRVSGNHYGDLFFPHIAGVGNSSNLYVWDKSMNPDAGMLRIVFGLGTRAVDRVSGDYARLVFLDQPEKTPPVSHNDERRFSQHNADVLNLAVNQLEEVPLDKLSNIDLKTDNSIFFSLDTETIRRLEELGRSYQYTPKISDFKKLLCETGFPKFAQTVLSTITSAYRYPVDIEFTVNFDPNGEFRFNLLQCRPLQTKGLGRAIKIPDLKPEQIFFSSIGNFMGGNVRLGFDYAVCIRTMEYLALPEQEKYSVARAIGVINQKYKDKTMLLLGPGRWGTTTPSLGVPVHFSELCNMAAICEVSYPTA

SEQ ID NO: 88710 - protein, 427 aa, Unknown
  Obtained from environmental sample
  DOMAIN (154)...(342): ATPase family associated with various cellular activities (AAA)
  misc_feature (1)..(427): Xaa is any amino acid
MPDKAIDILDEAGAMRKLETREQPPEIASLETEIGKLCEEKNAYVSSQDYEHAAELRDKVRALRIRLEEAHDAWERASRNDWPQVTEDDVRTVVTEATGIPVIHLEEKESRRLLQIEEELHKTVIGQDEAIKRIASAIRRSRAGVSSPRRPMGSFIFLGPTGVGKTLLARQLSKYLFAGEEALVRIDMSDFMEKHNASRLVGAPPGYIGYEEGGMLTEKIRRNPYRVVLFDEIEKAHHDIFNILLQVMEEGELRDSLGHTVNFRNTVIIMTSNAGVREITKDSRLGFTSGSGLMSPSEIESAAMSELRRIFSPEFLNRVDETVVFNPLKRKQIEAIFDIEIKELTNRLTEQNYGIKISPEAKRVLVDKGWDQKFGGRPLRRTIQKELESPLSELILEGTWESGTVFNVGIKNGQVKITGKSKVKVFA

SEQ ID NO: 88711 - protein, 256 aa, Unknown
  Obtained from environmental sample
  misc_feature (1)..(256): Xaa is any amino acid
LKFVLDRTLDPENGGIICFVSNGAWLDSNSLDGFRCHLEKEFSSIYVFNLRGNCRTSGELRQKEAGNVFGLGSRTPISITLLVKNPKQKTVKAIIHYYDIGDYHSREKKLEIIKEFSTVSNINWNIITPNVHNDWINERNSKFNEFIPIEPFKKFENNSQSFFSTYASAIVTSRDAWVFNFSEELIKNNMKKMINFYNEQRKLIENECKKNKKVNIDDYLDTNPQKISWTRALKKDVSNNTIHKFKEKEIIIGLHR

SEQ ID NO: 88712 - protein, 162 aa, Unknown
  Obtained from environmental sample
  misc_feature (1)..(162): Xaa is any amino acid
MDGNVYSARMEKVKERMAEAAFDAFFISPSSNLFYLSGYAPGSDERLLLLVLPSKGEPFLLANLLYKEQTKIIPTKDQVYWKDGEDPFELLKTEVEKRNIKLNKVAIEPYIPAFFSLPLGKTFPSAVFELGSSLIDPLRQYKDENELDLIRTACRESDRALG

SEQ ID NO: 88713 - protein, 76 aa, Unknown
  Obtained from environmental sample
  misc_feature (1)..(76): Xaa is any amino acid
MLPGMTFPIELMINLGGYEVTTDRKDGWTVRTQDGSLSAQFEHTLVVTENGVEVLTLTPSQRAAGVRLIVDGEAYR

SEQ ID NO: 88714 - protein, 88 aa, Unknown
  Obtained from environmental sample
  DOMAIN (1)...(66): Bacterial flagellin C-terminus
  misc_feature (1)..(88): Xaa is any amino acid
MLDRIDEAIVRKDKIRAHLGAVQNRLENTADNLTIQSENLQASESRISDADVATEMTEFVRSSILTQAAAGMLAQANSLPRMTLQLLQ

SEQ ID NO: 88715 - protein, 273 aa, Unknown
  Obtained from environmental sample
  DOMAIN (30)...(168): Bacterial flagellin N-terminus
  misc_feature (1)..(273): Xaa is any amino acid
MSMLSLRTNLMAINASRNLETSYSALSNSVRRLSSGLRVGRAADDAAGLAVRELMRADIAAMQQGKRNVNDAISMIQVADGALQIIDEKLIRMKELAEQAATGTYDSTQRLMIHSEFQAMAAEIQRIATETNFNKVKLLDGSLAGDHDGSGLKSEGALKVHFGTGNASAEDYYYVEIGDATLRGLGLAAPAMGGTLLPDVLGEGGWFIGYYTLNYGLIIPAGATDLVINLSPYYWGDMGNSTIQIFTTSGRHLAGSTLDSATWATNKDFFSSG

SEQ ID NO: 88716 - protein, 509 aa, Unknown
  Obtained from environmental sample
  DOMAIN (257)...(398): HDOD domain
  misc_feature (1)..(509): Xaa is any amino acid
MDWIVWVILPLAGFTLGWIIRWLYARFQLTASEQRADRIKQDAIKEAEAKKKEILLEAKDQVIRDRNQQERETRERKAELQRYERRVFQKEESIDKKTAHLERIEQALAEKEKICQEREEALTKEEERYRSELERVSGLSSEEAKRLIIQNLESEARHDAQALINKIEQDANMAGEKKARDILLSTIQRLATEVTGEVTVATVTLPNDEMKGRIIGREGRNIRTLETLTGVDIIIDDTPEAVVISCFDPVRREIAKVALERLILDGRIHPARIEEIVTKVSKDTSQKIFEEGEKVLFDLGIHNIKQDAIRALGRLYFRTSYGQNVLNHSREVAVIAGMLAAEIGCNRDLTKRAALLHDIGKGIDSDSDLNHAEIGMDMARKMGEDPRIINAIGSHHNDIEPTCIEAVLVQIADAISAARPGARKETLDNYIKRLENLENIAKEFGGVLNAFAIQAGRELRIIVNNETVSDDQSRELAKGIAKKIENDLHYPGRIKLTIIRETRITEYAR

SEQ ID NO: 88717 - protein, 1342 aa, Unknown
  Obtained from environmental sample
  misc_feature (1)..(1342): Xaa is any amino acid
MSLWMNKRWFVEATFLDDSEKNTYRAGYQGLPGEFIKYAGVGNTGLDFPSFPYLDLGGDSPSSFGFYGRMGSGGIDVHTLFRYDAASRDEKVFLGGRERTFNYVELSNSVRGVSFVLPDTDIDSEIIVYIEDEKGSLRDSGGRRWRLAAASEYAAGKTQGLLELNIRPEGMAAVSYSKGGIRPWNVSMGSYSGGSGFLSEVQKYFGVNLADYPLPGEILIGGSYALVLREPGIFSPFERQNRYEPPSSLSEEAALVRLSSGAAIGGYRLVQLDISAASADIPLFVAAVSKRNIYELVPEVSGLNQRSPETRWPLAKEYPEVYLPGSQVFSGDACLKFTNYGGEGSFQIGADVVPGSIQVWRGGIMDANFNYNQSTGEVTLHGPAGANELIRITFLKRSAETRLGSIASGLGAVYQKEGNPFSAMAAIGVRWNMTDSSFSEEGASSPGTVGLSAKTAWDFDNLKARITAGAALDQNDTTGLYRAAGMEGHETVLSLPPETSFLSNPPSGFSVFNRANLIYRNYYNNTVIGSALMPIDWNGAVIVPSLNKPYPVKDPQIKDAQSLAMEFTLNDAEKWTGFQVPLDYEAEIISLSGEIEIPYRLYGFKQNILSDFKLIVQIGSLSGKDFAYNENLSLVWEKQLFSSGGAAFDNSLRIARFVITETERALLADAKYLRVIAALDGVGEEITGVVILSPPIVRGAPFRPVTFDGSAMSGTGGFSSGRNRVTALETVDSGNTLEAAYSEIINRLHSTDRTQRVLRIEWENMEPGISAGIDGRIGELPLADYRALSFFVKGPAEKNGTLSFFSAAGPDSILQPQLEAHIPLSAFREGQWSKVTIRYNGTNTGISADGADVPGAWFRYLPAAKLRDRIDGKSGYTAVLISPEQAGALNDDSICIDEIILEDAAMVYRINAGTAFEYKKGGTLLSVNSVNVFSDFLFSTSVESELRADPVNKESETEESAAHRSGVEISFFGAKISGNLLYTLTKDDFLWSADHGILREWEVFSFSENFYISPKDNNAKHGFNAGFSSLFYAKIGADVNYDYSGLERKWTFGMGFKPEKEIIPSVDISAGAVWAQEGKVEKDDDYAGVWLRTWERMIPDEGMDAKGRKASAKITITEGTKPVGAVITLEGKTNSAGITTVTNLENSAFLDIPVTFNKTQLFFRAGRLFKKQIYFFGSDVKLESEKFFESINDFIPLWKTIPGYSLFAYDINEAMDKSRNNSPSFDITQYMAFNDHFSVKANFPSMINLAAFFVPSGVSLRLERILEQKLDTRSDMLNFAGSLGFSAVNMFGALGYLPLFKFYKSDEFTHTAQAAVIFPRNEDVSWRVQSALGMSFRGLKTV

SEQ ID NO: 88718 - protein, 327 aa, Unknown
  Obtained from environmental sample
  DOMAIN (78)...(327): Bacterial extracellular solute-binding proteins, family 5 Middle
  misc_feature (1)..(327): Xaa is any amino acid
MKRVITVLVALLMLAVVFVGCKPTSVTTTQNAPVVFKFGIRNSWPDSRNPYTSSWAISTSTFHSIHYEGLMWLTPSLDIEGRLAESWTMSPDGLKWTFNLRKGVKWSDGVDFTADDVVFSYRAIIDNQLPRLYGEVNSIIDIKKIDSHTVEFTLDKPRADYLLMFVAEIVAEHQWNVNKTKDDFLKYENPNPVGTGAFVLIEEVVDEFARYKANDNYWGGRPNVDELIFVFFANDDTKLQALEAGEIDMTSLTAAQLNYASSLSNVSLVKFGTIRLTELGFNMWNDKASKGNPIIRDVKEIRQAIDHAINYDELIEFSKGGLGIPRK

SEQ ID NO: 88719 - protein, 353 aa, Unknown
  Obtained from environmental sample
  DOMAIN (9)...(151): GTPase of unknown function
  misc_feature (1)..(353): Xaa is any amino acid
MNNAELGLLKFITCGSVDDGKSTLIGHILYDSKLLYADQERALILDSQIGSRGGKIDYSLLLDGLMAEREQGITIDVAYRYFTTEKRSFIVADTPGHEEYTRNMAVGASFADLAVILVDATRGVLPQTLRHARICTLMGIRYFVFAVNKMDLAGHSRERFDAISRDIKRLAGELQLAHTAIIPVSATEGDNVTKRSESMPWYNDATLLSYLESADIGGGCPEAGFYMPVQRVCRPDHTFRGFQGQVESGTVSVSDTLTAMPSGEMAIIKEIYVADKQVDSAAAGQPITIRLDREVDVSRGCVLTRNAELKIVKDFEATILWMDDQQLIPGKEYWIKIGTKLLLAIVSGITHKV

SEQ ID NO: 88720 - protein, 87 aa, Unknown
  Obtained from environmental sample
  misc_feature (1)..(87): Xaa is any amino acid
MIIRAATIALLASISPVAQAQESKADELARKGHWSGAKWESHKALLGKPAPKLELSGWVNGRIEEDDMKGKIVVIDFWATWCGSCVA

SEQ ID NO: 88721 - protein, 529 aa, Unknown
  Obtained from environmental sample
  DOMAIN (38)...(528): V-type ATPase 116kDa subunit family
  misc_feature (1)..(529): Xaa is any amino acid
ANTGSSDANNAKSANADDSRSDSVSKADNASKTDNAKNANSVNKANNAKASADAELLRVKGLIEKLRSSCEFLGVELPAEPTQDSVLPGEAEEVLCEKLCSAVDALKQREITVRQEKLGVEEAYSEAKAFSNLNAPFSDLDQLSFLTLRVGRLDPKVQSELKQTLGERAVIIPLGGGASDGGDGNDRFLAASSRKGRFALDSELKKCSFKPIAIPEGYQGVPAELLEGLEGRLKIAEKELEQIENEKNKMRDESQAALYRLGSILLMAIAAEEIKSRLVSTSSVYLLSGWIPADMINQTAGDLSKITHGRTAIRIYVPDEVPEVKDGSEKVPVSMKHGKFVKGFEGVIFSYGAPLYGTIDPTPIVAIFFTLLFGIMFGDSGQGAVLLLLGLLTGNYRRLAKFKSYSTPLISVGIASILMGFVTGEIFTREDLLVVPTRAITQVLTGRPIDRLLTVMPLAEHGGSVIKLFYFFGFTIGMGIILNSLGLLINIYNKCALKKYEEAFFGKTGLAGLLLFWYAIFIALRCIFF

SEQ ID NO: 88722 - protein, 395 aa, Unknown
  Obtained from environmental sample
  DOMAIN (33)...(395): Serpin (serine protease inhibitor)
  misc_feature (1)..(395): Xaa is any amino acid
MFMNCSLDESYGKSINVVNVKAKELLAPVYGEQDSAAIKAATGANDFAFRLSAALVKNVGNSNFVCSPYSAWIPLAALVNATDAQNKAALLTALGASGITESDINRASSRMLYSLTNLQNKEYKEYYNPLRIANAIFVGDNVTLKKDFAQTFMDYYRGSSINVDFSSRDAVDAVNRWASENTNGLIKNVIQEFDPLTVAAIANAIYFSDRWEWEFNSDQTKEGVFHAPGKDTTASFMLRSGDAQLYYEDQKVQAMPLRFMTGGGLYIILPKTGSAAQLLSSMTNDYFNEIQRDAVRATGKLLLPRFSIESTIDDLAEALVALGVPLFDEVSAPLTGGLIEGGLRVWLSDAVQKAAIKVDEKGTTAAAVTVLGVNATAMPVPTKPFEMICDKPFVF

SEQ ID NO: 88723 - protein, 266 aa, Unknown
  Obtained from environmental sample
  misc_feature (1)..(266): Xaa is any amino acid
DARASQKKGKPLALNHLGIISVDTRSHVICGVAVDYADKKDSETTENIMEQTIGNLSESGLSVEEMLADTNYSSGQTYRYLASRGVTAYIPPCGSYKSGRDGFSYDGEADCYICSRGVKLTFRGITRLKDHKTTGRAYLSNARDCRNCHLKKQCCKSKGHKRIDHSSDKPYYDEAHERIGTALGKRKMRLRSATVEPVLGTLLTFRRMKKVYTIGQELARKQFLMAAAAYNLKKLMGAIGLKKAVAAVNAAKEAIRKNWNMAQFIF

SEQ ID NO: 88724 - protein, 200 aa, Unknown
  Obtained from environmental sample
  misc_feature (1)..(200): Xaa is any amino acid
MGDIRRKGNDGMRLSIRLTIIGITAVFIFLAIITLSIIGISRLEALNHEIAAFMAENKLKGDTQAIETLSLIRMGLITLGAALVIIFITILLRIFAEQKKAKERMLTIFSSMPFGANIHNDDFSYFECNESALNLFGLSSKQEYLEKFFQLSPEYQPDGILSSEKMAEFDAKTLTDGYCRFEWTHRKLNGELIPCEIILV

SEQ ID NO: 88725 - protein, 290 aa, Unknown
  Obtained from environmental sample
  DOMAIN (11)...(287): Tetraacyldisaccharide-1-P 4'-kinase
  misc_feature (1)..(290): Xaa is any amino acid
VGIDMKKNNKNAFGSPLPAALSTSIAARLLSHVYSAVIDTRNLAYDSLPFLSRQPDFPVISVGGIRAGGTGKTPVTRLIARYLIDRHNCGVAILSRGYGRSSKKNVVVKPGETADWEQTGDEPCMLHNNLPESWLGVGADRSAVARLLSPLLPDRSVFLLDDGFQRRQTRRDLDIVCLNEEVFDDRLMPAGYLREPMSALIRADIVLVIGAQERADKLNEIRRRVDEYLSTALKSTKKRPVTAVLLRYPDLWVDARSGETASKPPMKSPAAVTGIARPERFLAALPQFSV

SEQ ID NO: 88726 - protein, 190 aa, Unknown
  Obtained from environmental sample
  DOMAIN (89)...(189): Methyltransferase small domain
  misc_feature (1)..(190): Xaa is any amino acid
MTLSELLIDIRRRLLHVLGDSTLADNEAVLIIEQSLGIAKERIYSDNSIRIDTNDIDRVNTIVERRQSGEPLQYIFGKAYFYDREFFVNRDVLIPRPDTETLVDTVINSEKKRPATFIDIGTGSGILAAVLTAHCPDWTAVAVDISFKALQTASRNLNNIYLICGDMLNAIKPDKQFDFIVSNPPYISSP

SEQ ID NO: 88727 - protein, 358 aa, Unknown
  Obtained from environmental sample
  DOMAIN (63)...(178): PCRF domain
  misc_feature (1)..(358): Xaa is any amino acid
VITAKVEGILWRHRELEEKMASPEVAADPSLLEKIGREYNGIARNLPTFKRYLELVNDIDSARQIIADGSDADLTALAVEELADLEKELPDCEERVKMLLVPRDPKDMKNAVLEIRAGTGGTEAGIFAADLYRMFTHFFEKKGWETEVLSSSYGDMNAIKEIIINVRGENAYGTLKYESGVHRVQRVPLTEAQGRVHTSAASVAVFPEADEFEVQINPNDLRIDLYCSSGPGGQSVNTTYSAVRIMHVPTGLIVTCQDEKSQHKNKAKAMKVLQTRLYELELAKVEAEESAARKSMVSTGDRSAKIRTYNFPQNRVTDHRINLTLYNLDKFINGDMDEMVEALAIADLNERVKNSSEG

SEQ ID NO: 88728 - protein, 108 aa, Unknown
  Obtained from environmental sample
  misc_feature (1)..(108): Xaa is any amino acid
MGTVTKTRKPAKTARTTKAIKPTKTKVTFSDWDPADDIETKEDVISLLEVSLEENDPDFLLSVVGDIARSKGMTQIAKELNLDRKGLYKSLAPDGNPSFKTVYKLLDI

SEQ ID NO: 88729 - protein, 98 aa, Unknown
  Obtained from environmental sample
  DOMAIN (1)...(81): Response regulator receiver domain
  misc_feature (1)..(98): Xaa is any amino acid
MFTEAPHKYEMIFMDIQMPEMDGYEATRRIRALDIPQAKTVPIIAMTANVFREDVEKCLEAGMNSHVGKPVDFEEVLGKLHFYWNTPGVKKPDASHGL

SEQ ID NO: 88730 - protein, 280 aa, Unknown
  Obtained from environmental sample
  DOMAIN (1)...(58): His Kinase A (phosphoacceptor) domain
  misc_feature (1)..(280): Xaa is any amino acid
MSHEMRTPMNAITGMTAIGKNAKDIEQKDYALDKIEDASMHLLGVINDILDMSKIETNKLELSPVEFNFENMLQKAVMVINFRVDEKQQKLTVHIDRKIPQTIIADEQRLAQVVTNLLNNAVKFTPEKGLISLNANFMGEKNGLCTIQISVSDTGIGISAEEQKRLFSSFQQAESSTTRKYGGTGLGLAISKSIVEMMGGTIWVQSELEKGSVFTFNIQVRRGTGEKPEVINEHSGVGKQQEEETQTAEVEGVFAGQRILLVEDVDINREIVKSVLEPAQ

SEQ ID NO: 88731 - protein, 285 aa, Unknown
  Obtained from environmental sample
  misc_feature (1)..(285): Xaa is any amino acid
MNYVPQNGKDQRTVNVAANAVTTVLIPKLDETFSEAGQLLSPRSFLLLRNASSYSFELHRGRSSIRPDGASGSPVVNSGERAFYTLNTSDIFDPGAGEAANYSLLVGADYKEFPDSPSKFEPGHFYNFTYNGNIVLDTEIPIKIDNIVIKTYEVTFNANGSNGTPPDSQTAKAGSTVTLPNNGGLSKTGHTFGGWNASASGKEINYGAGATYTVTGDINLYATWHTIGTKTYTVTFNGGGGSATASQDIVSGKQAFRPVDPIRRGHIFTDWYADPGFNKAYDFTK

SEQ ID NO: 88732 - protein, 147 aa, Unknown
  Obtained from environmental sample
  misc_feature (1)..(147): Xaa is any amino acid
MKKKNGILVLLLTGLCVTAFAQNKTDFEFNPEGAIIIGYTGFARDVVIPEKIDGVIVTSIGNSVFKDKNLTSVSIPDNVKNIGPNAFTGNKLEKVIIGNEVDMMTSAFPPDFITKYLLDEPQRAGGTYTFVDDKWEYNPAGIRYLAE

SEQ ID NO: 88733 - protein, 477 aa, Unknown
  Obtained from environmental sample
  DOMAIN (27)...(106): Cache domain
  misc_feature (1)..(477): Xaa is any amino acid
EPPPEYLPWERPWFTVAREKHGELAETIPYVDAQTGEIVISYSKELFDVSEKSLGVLSIDVLLNQVGEYVESIHLSETGYGILVNQNFEIMACPDPVYMGKHLDSISGDYAKIKTLLADGKPLVSLSVTDFQDIKHIAFFKRLYNGWYIGSMTPYSVFYKDMYVMFIVLMMVGFALMFIVSLLVLRQHRRIENYTDAVMQLNEASRRFVPTQFVKTIGVENITSLKLGDSVKSVITVMFFDIRFFSVHSQMMSPNETFNFVNKVFGLAGIIIRKNNGFVDKYLGDAAMVLFESAGDAVRAGIEIYRTLILNEETRIKNGIDGINIGIGVHNGDVLMGVIGDTEHYASTVISKHVNTASRIEGLTKQIKTGMLISADVMQQIPADERTFAYRYLGMVNPALSRETIGLFEILDVLPDDARDRKMKTREIFESAVRNFLTESYQIAAARFQEVKDSDPTDECAKYFYEVTMAHIEGVTT

SEQ ID NO: 88734 - protein, 74 aa, Unknown
  Obtained from environmental sample
  misc_feature (1)..(74): Xaa is any amino acid
IIETHSDHIFNGVRKSIMSKKIDKDNVKIHFFELNENYISTSTEIELSEEGRVLKHKKGLFDQFDDDLDTLLGL

SEQ ID NO: 88735 - protein, 297 aa, Unknown
  Obtained from environmental sample
  DOMAIN (1)...(296): Protein of unknown function (DUF1015)
  misc_feature (1)..(297): Xaa is any amino acid
RYEQMETTLSNTGQIFGLAADDDGKFYGLIREIMAASPLLGEFTDDNGAKHSLYKCSYAGLIDRAKELMKTRSILIADGHHRYETALRFYRERGDEAFSHVMMTLVSMADPGLIIRPFHRLVRKTDQGRSVGNMLDELAKYFDVVPLGKASADGVYKALAGQSKAEMVYWDCAKEEIYDLRLNKGGEAFLAGVMPEQSDKWKRLDVSKINCIIINGILSLPLDGQVLHDIVHYANDAAVGAEKLLGAENGYYYGGIFIRPVSIGVVSDTVKGGERMPQKSTNFYPKLYSGLVLNKMK

SEQ ID NO: 88736 - protein, 367 aa, Unknown
  Obtained from environmental sample
  misc_feature (1)..(367): Xaa is any amino acid
MKILKYVIGLLLAAIGLYIFFRGSGDGGESVYQALAGEISRSNPTAAAVCAALALFAMWLRALRLRMILPDTLPAPPLGVAASAIDIAVGRNAPHKGGLFSVTMVMAMLNNVLPIRAGEAARVAILWKRNGFPIMVCVGSLLVEHALDIAVYLSFLFIPPIASPALLDKLRGLHPAMIAAIWLSAVAFAALLGLFSLYALLPRIFRGAAARVGKYLPPKIRSAARKFGAEIESNLDWTATPGKAAYVAALTYAIALCYSTMLFILVCDVTPSGFINSLFSQAFAAFGSAVPLAPGSVGTLHAVLLQGMTITGCPPPKARAVIIVYHAVQYAAVTGAGLLCLLGMKSKQQRTATPRCSSSQNQSSARP

SEQ ID NO: 88737 - protein, 77 aa, Unknown
  Obtained from environmental sample
  misc_feature (1)..(77): Xaa is any amino acid
MKCGTCKAEMKESTVTYTEDVEKGVIVIRHVPACVCTECGNIWYSGTVAVQLERMVDQFVASAGSEVSVINFAKSVA

SEQ ID NO: 88738 - protein, 520 aa, Unknown
  Obtained from environmental sample
  DOMAIN (221)...(491): Alpha-2-macroglobulin family N-terminal region
  misc_feature (1)..(520): Xaa is any amino acid
SGGIPAGAELLIQDLEDVNGKRLITPVQYTVPDKWELPEIRFAGNGAILPTSQGAQLIIETKNVTGILVEAFQIYNQNMVYFLQTNNFDDKNELDRVGEPVWTKAFDFQWVPSDQNRWIRRGLDMAELSKKFPGGMFHVRITFRQRHVKYVCSKNHNDFSGYEFPDDSFSPRYTPSGETYYNYYDSPNYDWDEWYSYNNDPCHPAFYTNMYDHNITKNRNVLVSDLGLIAKRSFDGSWIIATTNIITARAAPNTEYKVYNYQGRVLNQGKTNSNGIATVPASTDTESGSRLVVYAESSLGRAYLKANDSLALSVSHFDISGSAPSSGIRGLIYGERDVWRPGDDIYLTFLLADPLGTLPQNHPVIFELEDPRGRSVINRTYTSSVDGFYSLAAVTASDAPTGDWTARVRVGGKTFNKNIKIETVMPNRLKIDLDFGENEFIKNGTSKIPLRSQWLYGAPASGLRADISAVYIDKETKFKGYDDYSFRDPSRGVSSERQDIWDGTLDSEGKATVTMNFNPG

SEQ ID NO: 88739 - protein, 185 aa, Unknown
  Obtained from environmental sample
  DOMAIN (64)...(182): Insulinase (Peptidase family M16)
  misc_feature (1)..(185): Xaa is any amino acid
MKTKGNFLIKFIQAVGFAVIAAVFLYVYFALPDTAMWGGLGKPSDPVPVMQNLRTGVLPSGLRYYILENSMPENRAYLTLAVKAGSVLEEDNEQGLAHFVEHMAFNGTERFPESKLVSYLRSLGMRFGPEVNAYTSFDQTVYGIEVPVENDSRVQGVSPKPRLPLLTTGRGQSLFPPRMWTMNVP

SEQ ID NO: 88740 - protein, 103 aa, Unknown
  Obtained from environmental sample
  misc_feature (1)..(103): Xaa is any amino acid
CELDFSLFSNAKGEGNDKKIDDSLLNQRLTDLAKNYRYFFDMFETKYNEGKLDMVLVWGIDDGHSWLNDHPVSGRTDYPLLFNRKYGYKEAFIKLTEGRTVLH

SEQ ID NO: 88741 - protein, 76 aa, Unknown
  Obtained from environmental sample
  DOMAIN (6)...(74): ATP synthase subunit C
  misc_feature (1)..(76): Xaa is any amino acid
MDLNVLLGIGAGIAVFTGIGAGIGIGIATAGLIQAIARQPEAANKFTPMFFVGAALAESTAIYGLVISIILISKLG

SEQ ID NO: 88742 - protein, 240 aa, Unknown
  Obtained from environmental sample
  DOMAIN (17)...(233): ATP synthase A chain
  misc_feature (1)..(240): Xaa is any amino acid
MEMLEIKTILTLQIVGFTVPITETVIISWVVMLIIIVASLLLVRRLKEVPSGPQAILETGVEFLNNFTNNQLGSFSKFLGPYIGSLFLFLLVANIISILSPLPLKAFGHVFTPPFEIHPPTKDINVTAALAVISITLVIVCGLSARGFVGWLKSFLHPLPVMLPFNIMDYGTHLISLALRLFGNILGGFVLMSLIERAIPIALPVVASLYLDFFDGIVQAGIFVFLTTLYISEAVKIETE

SEQ ID NO: 88743 - protein, 381 aa, Unknown
  Obtained from environmental sample
  misc_feature (1)..(381): Xaa is any amino acid
MRKGLSFCIIFLAAFVFIYAQDGPIRTSPTGGTGAAALTAAEEFRLGVQAYNRFSYNEAILSFERALSFRPGEAIVLDWLGKAYYRSGFEETALRQWRSALNIYGRNSGVGMLLSSRIETVSNRRFLFPVADDGVRYVESGRYPGRKQDIVYYRQPSSILPNNDGSVWVVAYGSNELVKIDVNGFVRDRKRGPLNGFDRPYDLVRGIDGRLYVSENRGGRVSILDKNGNWLSYIGSKGIGKGQFIGPQNLTIDEDGYLYVVDYGLRRILKFDPDGAFILSFAEKSPVFPGMLSPTGIAAGGGKIYAADNLSKAIFMFDTNGSYLGRLAVHGLKSPESMRFLSNDKLLIADANRILLVEPEAAIVRELGLAGHDKTLVTHVN

SEQ ID NO: 88744 - protein, 380 aa, Unknown
  Obtained from environmental sample
  misc_feature (1)..(380): Xaa is any amino acid
VANLRDRLKVIQEQKKNEVKNENRQDTEQIIKKKSPAYQDENSTLKEKGWISCGYKTLKREIFTDSPFNAITALPQSLPVIIYDLAENLPEYYDFLFFDLETTGLSGGAGTIAFLAAFGCIVKHGSVNKLKITQYLLLDYPGENDFLDVVLNEFTKNRVIVTYNGKCFDSQILKNRCLMNRIKPPEYHHVDLLFPARRLWKNIIQDCSQSSVETRILGLDRSGDIPGSLAPEIWFEFLKTERTDRLMGICDHNMADIKGLAAIFSAMIMIAEDPFNVKYDYDTGRLALFWRFFCRRNDSEDLQKTGDKLLCFAAQKNINCLPYIKYAIYRALAIDCERKEKNYELALEYVNEGLLLSELNNNMRNDFERRTERLEKKYKN

SEQ ID NO: 88745 - protein, 288 aa, Unknown
  Obtained from environmental sample
  misc_feature (1)..(288): Xaa is any amino acid
MVKLTGTHSGKPSAFALDSDVLSKHTMLIGGTGCGKTTLFYHFVSQIKRSMTKDDVMIVFDSKGDFHSKFYNKSSDLVIGNSKQYSADSEHWNIYKEILADGWEDRDFIINTQEICKSFFEERSKNTTNAFFPNAARDLLAAVIAAFIREGKKDAAIKKEFFYNVKLKEFLDLSNPQMIMDLLADSPDANAVMSYINGGNAQSQGVLSEMYSIMREIFIGVFAEKGAFSMREFVRGKGNKTLFIEYDLSIGSMLTPVYRLMFDLALKEALGRKQPQGNVYLICDEFKL

SEQ ID NO: 88746 - protein, 296 aa, Unknown
  Obtained from environmental sample
  misc_feature (1)..(296): Xaa is any amino acid
MRSLRTKILTIVLAFLMFVSAAFVIYSLFAAGNYKRLRLENIRRTVEFETEEVNKTIAEIERSAIIFAAIGQESYKAQSKALGKAMALELFRGFPTVIGGGFWFAPYAYDENTYREGFYAFYDKEQDAVRLDDTFFTDKYDYHHSSWYVEISENLTEPYQAVWTAPYYDDSGSLALMTTAGAGVFDENGGLIALSTIDWEIEEVIKELSEIKPTAGSFVLLCAPEKNYIISNTYTRDGAGSPLDSISWKITADSFELDGVHTWRSGAEWITAGFCRYRFRFLRFSRKWKARTTVLH

SEQ ID NO: 88747 - protein, 152 aa, Unknown
  Obtained from environmental sample
  DOMAIN (56)...(113): Bacterial regulatory proteins, luxR family
  misc_feature (1)..(152): Xaa is any amino acid
NRAPWFIWDGAKSYLDLWEGNEEFQRGLRIVREGGQYISPKVQYLIDNRDEWPDTKNKMTRRRMECLIMLCNGCSIEQMCNMLNISPKTVDNHLNSLYFAYHVHNRIEMVALAYKLELMTSGDIHLYNKEKKRLPFPELAAVKRKRDRFYFD

SEQ ID NO: 88748 - protein, 108 aa, Unknown
  Obtained from environmental sample
  misc_feature (1)..(108): Xaa is any amino acid
MIGYVIYRDFKIIKNWAANHHEKLDGSGYPFGKPGEVLDFNSRLIACIDIYQAVSEERPYHSARSHAETMSVLYSMAAKNLIDEKIVKDIDDVMAKCFPDIEDGMIYV

SEQ ID NO: 88749 - protein, 272 aa, Unknown
  Obtained from environmental sample
  misc_feature (1)..(272): Xaa is any amino acid
MEAHSGISGLIVEQLEVEKEDGLRSFDGIWSSSLTDSASKGKPDIEAVDLTTRLQDLTNILECTTKPIIFDGDTGGKSEHFVYTVRTLERNGISAVIIEDKIGLKKNSLFGTDVTQELSPIADFCEKISAGKRAQVTKEFMIVARLESLIAGRSVSDALERARAYVAAGADGVMIHSKEKTGDDVKEFCREFRGEYKNIPLVLAPTTYNRFTEREFMDWGATIIIYANHLLRASYPAMMKVASVILEKERSLEADDICMPISEILELIPGGK

SEQ ID NO: 88750 - protein, 169 aa, Unknown
  Obtained from environmental sample
  DOMAIN (5)...(133): Cytidylyltransferase
  misc_feature (1)..(169): Xaa is any amino acid
MKTIYLGLRGDIIHPGIINIIREAAARGEVLVGLLTDSAIASHKRLPYLTWDQRREVVGNIKGVSRVVPQEEWSFIPNLKKYRPAAIIHGDDWISGPLSKEREEVIAFMKGIGGEVIEIPYTKGVNSSALNEAMRSIGTTPDIRLKTLRRLIEIKKYCGLWKRTPVCRD

SEQ ID NO: 88751 - protein, 331 aa, Unknown
  Obtained from environmental sample
  misc_feature (1)..(331): Xaa is any amino acid
IVADDISGDTVVASGLIFKNLDRKVTSVFVQPIFNNLEQIEMRIKWTDEESTREFIKTLYKALPHENHTAVQTCGNVSELTITFSGRIFFDEISQIAVNRQIPFYFSGLRILVVSLLFFAIILFVYKPLRAKTAYYLFEYKFDTVNKKQNIVYVCLVILTILFSGFCVYTSISEQYSNTTMNHQYNRYLVDAFLAGRTNIDFGHPEKLLNAEKPYDYYWLATNGYERGVDWSWDVAYYKGKYYTYYGPIPAALLYLPYKLITGNYLSHHTGVFVFAAISVLFLALLWRFLVKKYMPNARFAFYLLSFLALFLVSHLSYGIRHPSVWLVVQV

SEQ ID NO: 88752 - protein, 81 aa, Unknown
  Obtained from environmental sample
  misc_feature (1)..(81): Xaa is any amino acid
MDTITVCMGSSCFGKGNSSNADYITRFIEQHNLQNSVEVSGCLCSNACARGPNIRINDKLVSGISEQTLADVIVKELGLQL

SEQ ID NO: 88753 - protein, 345 aa, Unknown
  Obtained from environmental sample
  DOMAIN (69)...(337): Iron only hydrogenase large subunit, C-terminal domain
  misc_feature (1)..(345): Xaa is any amino acid
MSAALGTAKAPVYTELAECHDCYKCIRKCPVKSIKVEKGQASILFDRCVYCGRCVMSCPAHAKHYRNDVEKVKLLLADGRKTLVSLAPSFVSEFTDWKTEELIAALKKLGFAAVSETALGADFLSASTARDLASLAGRSAAEGKPPLMISSACPVIVEYIKLYSPSLAPYISPHASPLLTHARFLRSRYGGESRAGTAVVFIGPCIAKKHEADLYSEEIDAAISFAELREWLQKERITPKTISSSLSPSALADCAFEPRRSAKGAFFPLEGGEITAFSAYVADAAASAGTRVRTLSASGFHAVGSLLEGFDPATLKAPLFLELLSCPGGCLNGPGMTGAAPGAIR

SEQ ID NO: 88754 - protein, 444 aa, Unknown
  Obtained from environmental sample
  DOMAIN (224)...(408): ABC transporter
  misc_feature (1)..(444): Xaa is any amino acid
MFIVHWKMAILVSTTIIPLALLTRFFQKRILAVNRIMRKLNSKMTGAMNEGITGARTVKVLVAEEQCLAEFTGITNEYRVYANRMARLKAIFFPTVFFIGSAATALVLGYGGWEIAVMGADLAILAIFLQYAGGFFDPVQNIANILTEFVSAQANVERVCGLLEQSPHITEKPEIIEKYGDTFNPKKENWEPLTGDVEFKNVTFKYPDGTENVLEHFNLHVPRGTYAAIVGETGAGKSTLVNLVCRFFEPNDGEILVDGIDYRERSQLWLHSNLGYVLQTPHLFTGTIRDNIRYGRLDASDEEVEAAAKSVHADKVIAKLEKGFDTEVGEGGDRLSSGEKQLISFARAVLANPRLFILDEATSSVDTETEMLLQDAIHRLLENRTSFVIAHRLSTIRNADIILVVQDGKIIERGTHNELMLRRGQYYNLYTRQFEEEAEEKALR

SEQ ID NO: 88755 - protein, 262 aa, Unknown
  Obtained from environmental sample
  DOMAIN (6)...(249): Branched-chain amino acid transport system / permease component
  misc_feature (1)..(262): Xaa is any amino acid
MMLFRGLTYIITKVNPVSLKDTGYSHLSTGTLDEVLKTNQIGPYYPTALVLAVLVLLVYYIAEILGRRKKVANGFEVSPFPLFITQLVLVSLLTLGLADRFARYRGLPIVVLVLGITVFVFHFLLNNTVLGRFIYAVGGNPRSAKLSGINSEMVTFIVFCFMGGLTGLAAVVSTGYMNSALPQAGNLFELDAIAACYIGGVSAGGGIGTVIGVIVGGLVMSAINNGMSLMNLGAHYQYVVKALILLFAVFYDVYTRRKAGLG

SEQ ID NO: 88756 - protein, 696 aa, Unknown
  Obtained from environmental sample
  misc_feature (1)..(696): Xaa is any amino acid
VHTIELDIEYLTCNKGDWIQYSGDIALTGSVHGRITGLIFNNDICLGIRVDEPVVTEPGKQYAVRIRKSDGTVLLKDVAAVQQPNVVFFSEPFKKDDMPREGDIYAFGIRGYEVIDLVITDIQPQADFTATLTCVEYSPEIFGVDDPDFKLPEFQNRITPVSGDVDSGIVGPERWRLFVTYHDNEEEPPRPEGAGQDGGWHYAQTLSSLWQSSKMAESAESGGWGAPVRIKNFRSGADVVPVFLTLSSQIKILDCDSNGNMLAGLLPFTSQAALYKWNYKVPVVAGIQRFPGTGGDLFDPMLGDFVPTDKGIVFSLENAPQGVSIDYKGAITVSKNAALDGDHIVIVKAEYEGAVYSEKLLIQVKKRVGENNYIGTVGTLTLNNPDVTIIKGNPTSGKLTAIPGNYVLAVAGGTVGANIWEAGFVYQWSGLAWEKREPEKYSDLYISCFKDGLDKLANNTEWFGGVIAKRIIALKAFIEEFESVFVLLKKGGVIQSETETNGEKDFIIKANGEAIFNKATIRGKSTLKGEIIAEGNSTFYGTITAIGNSTFSGKITAGEIEATAIKVNGTVASGTTYVLKSNNNMVRAYSEAVPVKEILTYAKGSCTVRAKFPSLPSTQGTNGGKYKITVAGINDQEETVIKNWTDYSGNDIATIAGVTLKYNPTKVRLYMDTRASGGQLSFIQINTILNCAVMKT

SEQ ID NO: 88757 - protein, 696 aa, Unknown
  Obtained from environmental sample
  DOMAIN (27)...(165): Bacterial flagellin N-terminus
  misc_feature (1)..(696): Xaa is any amino acid
MRINHNLIAINTHRQLGISENSGAKSMEKLSSGYRINRAGDDAAGLAISEKMRGQVRGLSMASRNAQDTISMIQTAEGALAETQDILQRMRELSVQSANDTNTDADRAELQAEVTQLRYEIDRIANTTEFNTRKLLEGSAKGVAEEVQGTARYNNNSRITIDSVKSKAMMDAVQNDKSWAFDGAYMLIKTNQTFNSGDPVYDPSDYKLVGPDGTMYNFKALSADTKVKATELEAGTIVADGGAVTKVTKAGAISAAFTGTPPASIVLGNALTEHELSSVTSGSILASGSNFTLLTGGEIALDKASTGTGAITYTATGELQLLDSPGGAVITTVEVGKTIRLNDGTVLKNNGGGNVSVDSGSLEIGTNLTSANVLSFTLASQTTINTNSQTSRDNVEVVSASNYLVASGELSVNITLGNSSPLISRTDTASTSDPGDVAVLAEGSILSKGSIIEMLTPGPGSSPTAIKIMVNGNEVTVSYDDVSKTLKVGNEVVSPGKSITLEDGTVLTHMTDINDKNTATGKLFIDTGRITLAEDISADSVGGVRNVKAFSLAKDSILAAGTKLNTVVPQAGTQLMAGTVVTAPDKFYPGSVTMGHEGRRIQFSANIDVSLEARYYEAAVSESLTFIFSRYEPASSNLKDSVMAQIGANSGQTAFISMGDMRAAALNVANIDISSKWGAATAIETVNNALQRVSHS

SEQ ID NO: 88758 - protein, 98 aa, Unknown
  Obtained from environmental sample
  misc_feature (1)..(98): Xaa is any amino acid
MIYKTFGKTGIKVSALGFGAMRLPMKEVNGKKIVDDDLAVPLMQQAFDMGINYVDTAPLYNESQSEISVGKALKGYRDKVYLSTKNPIEDNDGDHWMQ

SEQ ID NO: 88759 - protein, 256 aa, Unknown
  Obtained from environmental sample
  misc_feature (1)..(256): Xaa is any amino acid
MPLGGYPNGVNMKEKKAVTREYKPRYQKASKKEKKALLDEFTRLTGCHRKSAVRLSNTKPAKQAMAFIDGKAVKVKPEKKRPSNRKGKRIYTDEVISTLRQVWTFFWFKCGKILAPLMRQQTAYMVQWPAFGITGEIAEKLKKISPASIDRHLKKDRQALRLKGKSLTKPMDSLKSRIPIRTFYTSEERKKPRFWQIDTVHHCGQATSGQYLHTLTATDVASGWIELRSLLNNAHKWTFEALSNIKATAVLPVLSS

SEQ ID NO: 88760 - protein, 98 aa, Unknown
  Obtained from environmental sample
  misc_feature (1)..(98): Xaa is any amino acid
MEKITVSDWNLADEIKTREDVIGILEAALEENDMEFLFSVIGDIARSKGMVQIARELNLNRESLYRSLSQDGNPSFSTIVKVLDNLGFQLSIKQKVPA

SEQ ID NO: 88761 - protein, 206 aa, Unknown
  Obtained from environmental sample
  misc_feature (1)..(206): Xaa is any amino acid
MRYRYNAIIGFTAALLFSLLYIIGAFNSLESRLYDFFMHFRANRERINSVVFLDVDDTAIFYNGVYPWPRSIMAEGLLRLKEYGIRAAIFDIEYIDHGPKGVDSIYLDQGLSNDFNRGFSEINSNALDLFSSLKAGRIGRSDMDRYAGDFIGFVNDVHKDLLTKAQSIARDNDQFLAQSLALSGVGWSTLNLREDPLDGEQAQRRP

SEQ ID NO: 88762 - protein, 540 aa, Unknown
  Obtained from environmental sample
  DOMAIN (280)...(469): Adenylate and Guanylate cyclase catalytic domain
  misc_feature (1)..(540): Xaa is any amino acid
IYDFYKIDSSISRAPIILANLNELSDTINAARNSAIEQTSNSLFNNYIGFRNEAYSMLDDLISLDLGVRVKEIAIQLSEIFPDNAEILEKAADNISQMNNIIKENLKQRREISEENERMFKNKFCIMGRVDTGTTDIGANPFYGKYVNVGTHGVVLDTILSESFINPMGNWQRVLFLLIIIPLFFILTARQAPVIRASTGFVSALFIFIASILLFRFTGIYWGPLGAVFAMIGAIITREVISYAGAEEEKKFLRTAFSTYVSDDVVKEIISDPSRLQLGGTKRHMTAIFTDVRGFSTISEQLDPEHLVSLLNKYLGAMSDVILAEKGTIDKYEGDAIIAFFGAPLELKDHALHACLSAIAMKKLETELNKTIMENNLSPLPLLTRIGINTGDMVAGNMGTANKMNYTIMGNAVNLASRIEGVNKQYRTGGILISEYTRAKIGDEFLLRPIDRVRVVGINTPLRLYELLPADTEQGAVEIWEKALALYEHREFRKAFALFISLIKRYPHDNVALVYAHRCKSLIETPPPEDWDSVRNLTIK

SEQ ID NO: 88763 - protein, 63 aa, Unknown
  Obtained from environmental sample
  misc_feature (1)..(63): Xaa is any amino acid
MRTTLDLPDTLIHEAMSLTQISTKTEVIKYALENIIQREKIKGLTGYYGKLNLDIDLDKLRKR

SEQ ID NO: 88764 - protein, 303 aa, Unknown
  Obtained from environmental sample
  DOMAIN (1)...(302): UDP-3-O-acyl N-acetylglycosamine deacetylase
  misc_feature (1)..(303): Xaa is any amino acid
LKGNVLTSCGISGRECSASLELLNANSSEGGICWFYGETEPKNFKAVYENRTTVLVHSSGKRIIGVEHLNAAALTFPNCEFALTAPQGELPLLDGSAKLWQAALAAAAAVGADLRVCPYNGGGPYNGTARPDNGGGGNLNFYVPQKKQFEIGTNERYLKYDGAAVGADLRVCPYNGTARPDNGGALEIQYTINRFNQEFSATVQIKTPDDLEKIFLARTFIFEQELPAANLSENLRSCGLLLQSGKKNDLRFENEPAYHKILDFLGDISIYSNALPLGKFTILNGGHELHQAATRAMYSVSPR

SEQ ID NO: 88765 - protein, 77 aa, Unknown
  Obtained from environmental sample
  misc_feature (1)..(77): Xaa is any amino acid
KHDKIEPVITCGIPVDIRALVTHHILSQEGIIEAVFEDDTEKAFRVFSHDLAVQKLPLGEAHSLFDEMRRANNTKKG

SEQ ID NO: 88766 - protein, 302 aa, Unknown
  Obtained from environmental sample
  DOMAIN (7)...(295): Family 4 glycosyl hydrolase
  misc_feature (1)..(302): Xaa is any amino acid
MKKEKLKICYIGGGSRNWAWVLMQDLAFEKDISGTIELFDIKYEDAQTNEIIGNKLMEKHNRGVWKFHANPSLQDALSESDIVIISILPGDFEEMAVDVHAPEKYGIYQSVGDTAGAGGIIRAMRTIPQFRQIAHEIKKNAPAAWVINYTNPMSICTRTLYKEFPQIKAFGCCHEVFHTQKLLAAVLEEAGYAPHNSVKREEIKVNVLGINHFTWIDKAQWKDIDLFPLYKDFIKKYADTGFRKAKKSDADESADDIERQKFFGSSDRVKMDLFRRYGLIAAAGDRHLAEFCPHSWYLSSPQ

SEQ ID NO: 88767 - protein, 136 aa, Unknown
  Obtained from environmental sample
  misc_feature (1)..(136): Xaa is any amino acid
MQYLGFDAFENSINEINSAVVFMANENEETVIIIAGKNGDIHLPADGIFGFNAVDLGGGVYKAALTRENARVLRKIFPFTAPVCGLKNPISFGLGDRLGIATPGHIDLFRNKDIFPVFAQQSIRELNLTNRTYEDV

SEQ ID NO: 88768 - protein, 573 aa, Unknown
  Obtained from environmental sample
  misc_feature (1)..(573): Xaa is any amino acid
MRALPTADMRGRKGGYGMYYHFDYHGGPISYEWMPSISFERTWEQMCMAYDYGIKDVWIVNVGDLKFNEVPLAYFMELAYDFEKWGTNSPNSINEYTKMWLEKTFPQAEAGLRGKIADVLHGYIRMNAARRPEALNADIYHPCHYLEADRILDLAASIEKTNEEVYSALPKNEKDAYYSMIYFPAKTSVNLLRMHLYAGKNLHYAKQGKKIANKFSALVTECIEKDRSLNKEFASFKGGKWKGMELEQHIGFVKWNDDNYRYPLRVTVEPAHKPRLSVSRKDRTEVYSKAYGSPMTINVEDFLYAGNDEVIIEIANDGIGSLDYVIEGAQEYKWLNISSIQGTVESQEEITLSCNRQWLTNNIQSARLLIKDKETVVAVEIKARNPVTKNLPPMTFLENNGVIVIEANRYCEKKDAASAGFIELKNYGRSGVGMKVYPTTADFTENDDLPVLIYRFLIEESGKYTAEVWTTPTNPVQNKRPLRFRFESRKDDRQIITAVPSDFIAGSLSDQRWCDGVLDNIRVSKIPLTLEKGVREISIGALEAALVLEKVLIYKEGREPMPSYLGPPNSINN

SEQ ID NO: 88769 - protein, 280 aa, Unknown
  Obtained from environmental sample
  misc_feature (1)..(280): Xaa is any amino acid
MLLNPVTRVKKFAVSNPVAARYAMDGLLVALAVNIASNNNNLFALRLGAGDYQLSLVQFLPQIFTMLILVPGGLFAGSLHNKRRIITGALITGATGYLLCALSPFLRFLLPGNESIPAYSVYFFLVFLAIAAGSMATYNISWQSFFPEVVDIKERNYVLTKRSHMDVFISIPLPLLVGAVLLHTAAGRAKILVHQFFYFFAAMFLVLAALNYRRIKAVRQVTPKQVSFSEIKKAVYSLSHNRRYLLFIASALFFYMTWHFDWTLYFIGQVTYLKMNEFKS

SEQ ID NO: 88770 - protein, 145 aa, Unknown
  Obtained from environmental sample
  misc_feature (1)..(145): Xaa is any amino acid
VLKLAKYLKPFIPLIILAVAVLFLQAFCDLSLPNLMSRLVNMVIGQTNPENQSLPDRNVFSLGLQMLAIALTGGAAAVGVSFLSTRIAAGIARDLRFQVFKKVESFSIAEFDKFSTASLITRCTNDITQVQQLFVMGIRMSCYAP

SEQ ID NO: 88771 - protein, 470 aa, Unknown
  Obtained from environmental sample
  DOMAIN (395)...(441): RNA-metabolising metallo-beta-lactamase
  misc_feature (1)..(470): Xaa is any amino acid
MGINFYSLGAAEEVTGSKHLLEIDGKSYLIDCGSFQGSRAEADRKNRNFGIEANRIEAAILTHGHLDHCGLFPLLTKKGYKGNIYTTPASRDLASLIMMDSANIQARDAEYLREQAERKGEKFNWLPLYEEKDAIQATSQMMGVSYNRPVFMDSNLKLEFFDAGHILGSAMAYLTVKGGDGKEVNIIASGDLGRPGKPIIRDPARPPAPDYIILESTYGDRLHENSEDAMNKLAEITKRIVRTRGRLLIPSFAIERTQELVYYFHLLTDRGIIPEIPIFVDSPMATNATTIFQVHPECYGEEIKEAFIKHHKNPFGFNSLHFTTSVIESKALNDRPGPLIIISADGMCEAGRIQHHLIHNIASPNTTILIVGFMAENTLGRRILEKADEVKIHGNWIKRRAAVEKINAFSAHADYSEAINWLKSLDTSRLKKIFMVHGEPKGQAVFKKHLGEAGFPNVDIVKYGQIYDLM

SEQ ID NO: 88772 - protein, 539 aa, Unknown
  Obtained from environmental sample
  DOMAIN (2)...(539): AcrB/AcrD/AcrF family
  misc_feature (1)..(539): Xaa is any amino acid
MTAEELFSIDQIRRLTVRTVNLPASGAAQANRSQVVRLEDVADINLGYNDNASRVYVNDQSGVYIQVTSENDSNQVKVSDNVHAALDEINASLPQGITLEVLSDNTSLIRATLKQVYTNAFQGASLAMLILLLFLRNFKGTLIIGLAIPISILLTLMCMSIFGFTLNLLTMTGLIMGLGMTMDASIVILENVHSYRERGAKAEIAAILGSREMFRAIIASSATTMCVFIPLIIYKNTLKQMGLLFSDLIFTVVISLAASLAVAVTLVPSLCGSILPLNTRKQKPLKNFLFRKIDDIMEDFFRGVENKYRSALEYCLSHRFIILILVILIFAFSLMQFSGIGMNMYVRLRTDDNVNINVAMPRGTAIDVTEEILFEVQEMIKREVQGYRNIVLTASRSGNNQGSIQITLPPPARQIDTPDTIIRKLTPYVNAIPDAQISFRAGRGIGSSSPVEIAVSSKNYTAIMETASEIQQILIRYLPEIENPTVNIDEGAPQLQIEIDRDRAASFGLSLATIASEIRTAMDGKHAATMSLGDRLLNV

SEQ ID NO: 88773 - protein, 227 aa, Unknown
  Obtained from environmental sample
  DOMAIN (11)...(205): Methylenetetrahydrofolate reductase
  misc_feature (1)..(227): Xaa is any amino acid
MHIGNFPKIIGINIPELRSVEIKSFGASEHLLKNSVPAIPHFRLIDRTLEDLENLIEKLIAIGLKQTLLISGDPPLDPQGFVPSGIKAPQAIKHIKTKFPQLKVYAGQDPHRQSFKKELDYCKEKLDSGADGFFTQPYFSEGLLNQWLEHLPDTEMWIGLSPVTVKSRNYWETVNQVVFPPNFKFDLEGNCIVDRRLLTLIEAAGKDAYLMPFTTSTDKYLHALRMF

SEQ ID NO: 88774 - protein, 746 aa, Unknown
  Obtained from environmental sample
  DOMAIN (368)...(433): His Kinase A (phosphoacceptor) domain
  misc_feature (1)..(746): Xaa is any amino acid
MKKPKTSLRKMVWGEHKISLRFRFINIALFLLTSLIMAVVLLSVLQNITKQVSVDYARYFAANAAGTFGAHLSKEIALVSKTVSSHEIIEWFLDENNYQKKLMAYDEMMGTINQLASNNLYIAIQKTLNEFTLAKNSDIDDIKAVGSLDPDYYDDAWYFECIASNFEYVLNVDIDKVFHRKLVWLNYKVTHNGVPIGVFCAGLNFADVVEELFSHYDGSKIRSLIIDADGVIQMDSSLLNTDFLKYDDEIRIEEEFKDPKLIEAVNTWLEDITGYFEIGDEPAIVELSSGLNRRGLSSNDKYRYATIAPIGSTNWSVVTLFDSSSLFSLSKLIPLFILMGVLFIAFAFVTSIMSYRFLYKPAVELARSKDDFLAKMSHEIRTPMNAITGMAELALRENVPDAAQEHIITIKQAGANLLSIINDILDFSKIESGKLEIIPVKYMLSSLINDTVNIIRMRFKEKPLRFFTNIDGTIPNELYGDEPRLRQIILNLLTNALKYSEKGHIGLIVTMDRRNDKQIWLNIAVTDTGKGVKPEDQKKLFSEFIQVDTRKNKGIEGTGLGLAITKHLCLAMGGNIKMESKYGEGSVFTAIIPQGIESQEPFASVEESEKKKVLIYERRLVYAKSICWTLENMNVSHTLVMTFNEFTDALRREEWSYVFSGYGFYKYIKPLFEQNNFYGGKKPPVALMGEWGTEAHIPGVRFVSVPVHSLAIANILNGREDSKLYHKNFSVVRFNAPGVRILVVDD

SEQ ID NO: 88775 - protein, 614 aa, Unknown
  Obtained from environmental sample
  DOMAIN (439)...(614): Methyl-accepting chemotaxis protein (MCP) signaling domain
  misc_feature (1)..(614): Xaa is any amino acid
MMKEKQKQERRTSIKKRFIIFSAVLFLVIFIGGNAAFAFSMWQILHNTAGNELVQTMELERTKLEASVNSEIAIALKMAGSPVIQRNFLNPADIELKKIAFEEIDAYRQAFKGDSVFWASDINKEFYFSEDNHYTVDTENPDNYWYKMTLYETEKYNFNINYNPEIQRTLLFINAPVFDTKHKPIGLVGTGIDLTEFVNNIYQNYKGSADLYLFNDLCEITGSKNVSLVTNKTTLDKALGDTGKEFLEKVKSNKNLFFSVPKGVAALVKVPSLNWYIAAIAPLTMTDALNSGMTILFLVMMAVIAAIFVISYLFISSLLKPMHYMVQTLDQIAVDRDLTRRLVFKHKDEIGTVGDFFNRTFEEFRILVGTIKYKINGLNHTSFELSANMEKTSTAVNQISSNLDNIENLVVKQENGALVAGEAVGIIKKNIDSLNKMIEQQAESVDMSSSAIEEMTANIRSVTQTLAENSKNVGVLVEASENGRTGLQTVAQEIKEIAHDSEGLLEINSVMNNIASQTNLLSMNAAIEAAHAGEAGKGFAVVADEIRKLAESSGQQSKTTVVMLKKIKASIDSITKSSNDVLDRFGAIDSSVKTVSEHEQNILHTMQEQEIGGK

SEQ ID NO: 88776 - protein, 79 aa, Unknown
  Obtained from environmental sample
  DOMAIN (1)...(60): Global regulator protein family
  misc_feature (1)..(79): Xaa is any amino acid
MLILSRKVNEKVVIGDDITISIIEIRGDQIRIGIDAPKKVKVFRQEVFDAIKAENKAASESASVIPQVDFHGASRQKIN

SEQ ID NO: 88777 - protein, 176 aa, Unknown
  Obtained from environmental sample
  DOMAIN (94)...(176): PRC-barrel domain
  misc_feature (1)..(176): Xaa is any amino acid
MTEKFIIGLVGAPFGVKGFVKVNPCSGESGHLLKLKSVVISKDGKEQTLQIEEIAPASPSVLMRFSGIDSPEKAKTLNGAQLIAGREQAAPLGDDEYYIEDLKELPVIFSGAEGEKSASDVVVGYITDIIEGGGGELAEIKLLNSEKRLVPFRKEFFSEINPQKGRVVIKNIWILE

SEQ ID NO: 88778 - protein, 310 aa, Unknown
  Obtained from environmental sample
  DOMAIN (7)...(305): tRNA methyl transferase
  misc_feature (1)..(310): Xaa is any amino acid
MVWRMNKKALIAMSGGVDSSVAAYLLKQRGFDCTGITMKLFENEDIGASGDKKCCSLEDVADARNVAYSMGISYYVCNFTQDFRERVIGPFIESYQNGATPNPCIDCNRYIKFEKLLCRAKQLDMDCIATGHYARIEYDAESGRYLLKKAADKTKDQSYVLYAMTQEQLSYTLFPLGELHKSEVRDIAKKQGFVNADKHDSQDICFVRDGNDYADFIEQYTGKKYEEGDFIDMHGNILGRHKGLIRYTIGQRKGLGLSLKRPMYVYFKDTENNTVTLCEDDGLFSKSLDAADFNWISCKKIDSPIRVKAK

SEQ ID NO: 88779 - protein, 443 aa, Unknown
  Obtained from environmental sample
  DOMAIN (28)...(173): GAF domain
  misc_feature (1)..(443): Xaa is any amino acid
KDVSDRRAAIIDALIKSIEIFSANKEETFDEVITNGIRPFADAVGLDRVVFYKMVDTEEGKRPGQIYRWDKSEGGLMSLDEELKILPKHPVLDEWFSTLSKGGHIRFRKSDYTKDVAALMKVYGIMSILIVPIFTRGEFWGVINFQEHTDDRYFDEDCSDLLHTAARVFSNAVIRKEFNYSAEEALKALKRREKMEAALNKAAIMFLSRNEKTFEETMTVGVKEIADVFDLDRLSIWRNLNRPDAMHVSQIYRWDREAGGTTEPTKGLEDVTYARFAPRWEKLFASGESINSPVRLLPEAPMLQSFGCISAFVTPIYINNAVWGFALLEDRHNERFFEDDSIEMMRSAILLCANTVIRADMEREIANTNDFNRALLDASPVGFSVFDEDARIIDSSDIIWKTLGTTKKYFLNHFHDFSPEFQSDGVRSQDKAIEIIKRAIRGE

SEQ ID NO: 88780 - protein, 68 aa, Unknown
  Obtained from environmental sample
  misc_feature (1)..(68): Xaa is any amino acid
MKTDTLIRTEGMDTLIKNLGLIEAERFVMLIQKEPFDYTKWQENLFKDMTIDEIYNNAAELRQKNKLI

SEQ ID NO: 88781 - protein, 291 aa, Unknown
  Obtained from environmental sample
  DOMAIN (1)...(125): Glycosyl hydrolases family 2, sugar binding domain
  misc_feature (1)..(291): Xaa is any amino acid
MHEIDLNGEWKLVWDLENRGVANRRFTDIPDNAKNITVPHIWNENEATTAFYYKKFSALSKNKRYILRFEQVAVYAVVWVNGKFAGNHFGASTSFEFDVSSYVKSGAENLLCVKVSTVSKNGDFELMAGGEPVPAETMPLGLPWKRFPFVGLSGKVSILGGERALISTLEIAPDCDRKQISAKVSFNNARNCAIKLKIGIRNPKGEISFLQKEVKLEKENSNATLQMGFKEIKLWTIEEPSIYALEVSVEGSNSIASNFGFKKFDCKQGDFFFNDSIIKIQGIVYSQRKGF

SEQ ID NO: 88782 - protein, 494 aa, Unknown
  Obtained from environmental sample
  DOMAIN (55)...(452): Glycosyl hydrolase family 57
  misc_feature (1)..(494): Xaa is any amino acid
ANTRYVVSLVLNANLPFVREYTDSARPSDLFEDEADVKSVERPEYTYETEQEQEVLVPCSVEESWFFEAVSETYLPLLGVFDRLEGSHIPFRLGISLSPVLGHMFCDDYLIKKYIAHLERQIEFGRHEVERLEGRDECALAQHYFDQAVERHAAFTIRYDRDILKSLDYYQKKGRIELIAAPATNAFLPFLCRFPEAVRAQMETALTFYHYALGISPRGFWPGELGWTKDLSSYLYSYGLNYTIVNSHGLLFGKPPPSRGTFYPVKTEEGLFVLTCDYNASAIVSGMKKKGPYRDNNRDVVDEPENGEINLFIARNGEKYHSGYKYWQNRGDNLYDPAQAKSCAQEQARELLENLNGRLAAASAYMKEMPISLCAFNADSFGRQWHGGDHFIESLFRLAAGYRELQFMTPSEYLFQQPITALDVSCPEFSSWGDNGYAEPWLDSSNDWIYRHINHSIERMVELADRFTEDSSLKERALNQAAREILLAQTSDWP

SEQ ID NO: 88783 - protein, 1072 aa, Unknown
  Obtained from environmental sample
  DOMAIN (151)...(434): RNA polymerase Rpb2, domain 2
  misc_feature (1)..(1072): Xaa is any amino acid
MTKGKNASKRIYIGNDIQDVMELPDLIDIQLCSYERFLQREKTRSREKVALQGLEEVFQSTFPIDSPNGDMKLTYEYYTLDEDAIKFSELDCKQKGITYAIPLKARVNLIFQQTGEIRQKDIYMGDIPIMSDRGTFIINGAERVVVSQLHRSPGVIFSHEKGIFSSRIIPYRGSWLEFEIDQKRELIYAKVDRKKRILGTIFLRALGFDSREEIIKSFYVTETIKVKDDREFRDDISGRVLAAAVWIKDTATGRKSGKQADDHDGMKKLFRAGEKLHPHNVDELLSNNVKSIEVIRFVDREDSSDEKSFNYSLDSDILLNCFEREEIKYTKEGNEEPTKEESLMAVFAVLMQGETMTMDAAEKELTGMFFTSRRYDLGRVGRYKLNKKFAFDPPLTDFTLTKDDIIATMKFLIKVYIGDENFDDIDHLGNRRVRSVGELMSVTMKTAFSRMERIAKERMSMKETDTIKPQDLVSIKPIVAAIKEFFGSSQLSQFMDQVNPLAELTHKRRLNALGPGGLSRERAGFEVRDVHYTHYGRMCPIETPEGPNIGLIVSLANYTRVNEYGFLETPYRKINKGVATRDIEYLSAMDEDRYFIAQASAKLKDNGSFAEGQISCRRQGDYTNRSPEDIQFMDVSPKQIISVSASLIPFLEHDDANRALMGSNMQRQAVPLVFPEAPRVGTGMEAKCAYDSGVLVKACRSGTVLRVTSGEIVIKPDKPGPLKSLSQVLIDEQGNDIYKLVKFQRTNQDTCYNQRPIIKVGEKITAGQVIADGPATENGELALGRNILVGFMPWNGYNYEDSILISERVVKEDMFTSIHIKEFITEVRETKLGPEKITDEIPNTSEKSLDNLDKEGIICIGAKVRSGDILVGKVTPKSETETTPEFKLLNSIFGEKAKEVRDSSLRVPHGIEGTVIDIQRLKRTEGDDLNPGVDEMVKVLIATKRKLREGDKMAGRHGNKGVVARILPEEDMPYMEDGTPLDLCLTPLGVPSRMNIGQLLETELGWAGSTLDEWYSTPVFQSPSTDQIEEKLKEAGLPVTSKAILHDGRTGEAFVNPIFCGVIYFLKLHHLV

SEQ ID NO: 88784 - protein, 135 aa, Unknown
  Obtained from environmental sample
  misc_feature (1)..(135): Xaa is any amino acid
DGNAKGKITYSTNGETWMPVTDSTIDNIGVIDSIAYGNGKFVALGGIVYSDDGVTWTEADTRGSFGIVYGGGKFYSLDREKIKYSVNGVNWTEIVADDILGGYAIYAFTYGGDIGSGRLVVGTAGGGIYYSNVLE

SEQ ID NO: 88785 - protein, 314 aa, Unknown
  Obtained from environmental sample
  DOMAIN (86)...(215): Glycosyl hydrolases family 2, sugar binding domain
  misc_feature (1)..(314): Xaa is any amino acid
GGAWTVATAETLHEFSVVAWFFARNLYEKYHLPIGLICTAWGGTPIEAWMSREALANFPEKTVQGEQYADPAVCKEITIKNEAAIQGWEGQLIREDDGLKEGWQNPEISLSGWDDITLPGDFTEAELDSFCGVIWLCREFDVKVDFTAHDARVWLGTIVDSDTVYINGVEVGNTGYRYPPRKYLIPAGLLREGKNRIVIRVSCVNGEGGITRDKPFRVFSERSCVELAGKWKYRIGVKAPPRPEAFFFQRMPMGPFNAMIAPILRFPLRGVIWYQGESNDRNPDDYAALFKAMIQDWRIKSGQENLPFLFVQLP

SEQ ID NO: 88786 - protein, 186 aa, Unknown
  Obtained from environmental sample
  misc_feature (1)..(186): Xaa is any amino acid
MLFDFLFALKRIKVFSLIGESGTGKSFRAKLVAQKYGIDYIIDDGLLIKENRILAGHSAKKEKTFLAAVKVALFDDKAHRDEIARKFQSEKIKKILVLGTSEKMVRKIAARLQLPPPSKLIKIEDIASQDDIDKAIRTRRIEGKHVIPVPSIEIKRSYPHIFHDAIQIFMRRGSTAGIGPTPKVLK

SEQ ID NO: 88787 - protein, 327 aa, Unknown
  Obtained from environmental sample
  DOMAIN (26)...(247): Male sterility protein
  misc_feature (1)..(327): Xaa is any amino acid
VDKRDSALGALVEMTLDFYKNKKIFLTGHTGFKGTWLCRILLQAGAEVTGYALEPPTTPSLFVQTNTKKDIHSETGDIRNKDALVKAITKTKPDIVFHLAAQPIVRLSYSEPVSTYETNVIGTVNILEAIRLTSSVKSFVNVTTDKVYENTERDSGYRENENLCGHDPYSNSKSCSELVTYSYRNSFFNNVNSPAISTARSGNVIGGGDYAVDRIIPDCIRAVIEKKEIIVRNPHSIRPYQHVLECLCGYLVLAEKQYNDKSLQGAYNFGPDDESCITTGDLAGLFCEAWGSGATWQVQGDGGPHEANFLKLRLFKSKNRIRWKPYG

SEQ ID NO: 88788 - protein, 52 aa, Unknown
  Obtained from environmental sample
  misc_feature (1)..(52): Xaa is any amino acid
GLTVQNKRELGWKQTINFEEGLSRTVDWYLANREWIDSIRSGEYKKWIEENY

SEQ ID NO: 88789 - protein, 140 aa, Unknown
  Obtained from environmental sample
  DOMAIN (5)...(140): Abi-like protein
  misc_feature (1)..(140): Xaa is any amino acid
MAAIKPSTTYEQQIEKFRSRGCIIQDKNHAIDILSKVNYYRLTAYFLPFKKHDETYIDGTDFDIVYQIYEFERKIRLILFSAIEEIEVNLRSILAYYHAHKYNALGYLDNKNYSPKHKHIEFISRMKRKKRKGKRTFVQH

SEQ ID NO: 88790 - protein, 334 aa, Unknown
  Obtained from environmental sample
  DOMAIN (1)...(169): Stage II sporulation protein E (SpoIIE)
  misc_feature (1)..(334): Xaa is any amino acid
MITKTMLKDSSPSKSLKNIFESVNKKLCEGNEAEMFVTAFMGIYNIPAGKFVFLNAGHNPPLIKKRGGAYEFLETEPGYVLAWMKNAKYKETEISLEPGDVLYLYTDGVTEAMNRRKELFGEQRLLAVLNAGKDCALKELLPAVKREIDNFEDGAEQADDITMLALKVNGGAEHCEEAPPNGASQSDAMKKLEIKASLENLNKVLDFINTELDERGCPQDIQDKIEVAVEEIFVNIANYAYAADGGDSPGTGDGGADGAVVIFISVTDKIVIRFEDTGKSYNPLENPDPDLDKPLMERDIGGLGVFLVKKMMDNVEYSRVGNRNVLVMTKGMEN

SEQ ID NO: 88791 - protein, 753 aa, Unknown
  Obtained from environmental sample
  DOMAIN (555)...(685): Aconitase C-terminal domain
  misc_feature (1)..(753): Xaa is any amino acid
MLFNADLIRDVYTKIPHRIIEARAVFGRPLTLTEKILYSHLVEGTEKQAYVRGKDFAEFHPDRVAMQDATAQMALLQFSTSGRASSAIPVSIHCDHLIQACESAAVDLFKAREENKEVYAFLESVCRKYGLDFWEPGAGIIHQVVLENYAFPGGLLIGTDSHTVNAGGLGMLGVGVGGADAVDAMVSMPWELKYPRIIGVKLRGSLSGFTSPKDVILKLAGILKASGATDCVIEYFGEGTQSISTTGKGTICNMGAEVGATCSVFGFDASMERYLRATDRAEIAAAAKKIISYLRCDAEVEVEPEKYFDKVIEIDLSTLKPHYNGPFSPDRSFTIGEMEKSLEEFESPSEISAALVGSCTNSSYEDLARAASIIKDAQAKGIKPKVPLYINPGSEAVRATAERDGILRTFTDFGATVFANACGPCIGMWARNDIKKGQKNSIVHSFNRNFTGRADGNEQTHAFVASPEMAVIASLSGSLLFNPETDTITNKTSEKHKLAWPWGEELPEKNFVSNPGVVKISAGDGSVKIAIDHSSNRLQKLEPFAPWNGKDISNARVLIKVKGKCTTDHISKAGEWLKFRGHLENISGNLLIGALNAFNEEKNKVRFQPSNAEMTVPDAAKAYKAAKVPSIIIGDENYGEGSSREHAAMEPRFLGVVAVIAKSFARIHETNLKKQGMLALCFSDKSDYDKILENDVLEISGLCEFSPGCQFTLLLHHADGTNEKILLNQSYNESQWEWFKAGSALNALCKTSP

SEQ ID NO: 88792 - protein, 687 aa, Unknown
  Obtained from environmental sample
  DOMAIN (274)...(553): Glycosyl hydrolase family 79, N-terminal domain
  misc_feature (1)..(687): Xaa is any amino acid
DIKSQTKTNLQDWVEGQTISKDWKLVKIPLKKFQDAGKYWDANKGGEVTKNVQWNKIQEVRFSVGKADNKRDGRQDDPVTIYVDQITFTENIDWVDPDLKWDSFKSNAPDLVLHDFENNPGFEPSTGPKSKVSFDISKGHLDGKSLNVSHYMLGDWVDIVYDFEKQKAKKELTDWTKHWGIMFDIYTDKAWQGITVQVGDKGREIFVSSTGAPRGKSTVIVPFRSFTKFPYYQPPEAIQNGVLDLDGVKVLDFKPSGEGSEGYFEIDNVKLTNLREVPRPKVPELANLTITGDFNKVINPEISSAVFGINAALWDGDLLKPETKTQVKRINHGIVRYPGGLRADDDHWEQILTNKDWMVDTDEFLEWCRETGTSPMFTVNFGTGTPEEAARWVEHTNKKKNANVRYWEIGNEIYGDWHPQYAKYGADKGHTYGKRAREFILAMKKVDPKIKVGVLGVLDGEWNENVLKYTADVADALIIHHYPQHFGEENDFGLLASPQDLEKIFARVRESVKKLSPKKDIELWLTEWNSVDFNPGPQSISLINGLFVADYLGMLAKVGAGSAQYWDIHNDITPEGGDYGYLSRSYEELIGGNKPRPSYYAFQLASDGIRGKLVESNSGNTDLTTYLSVNGKKKTLLAINKNPYTAFNGTIKIPGFAGKAKVEVLAAPKGQVASKVIKIDPPKASNQ

SEQ ID NO: 88793 - protein, 148 aa, Unknown
  Obtained from environmental sample
  misc_feature (1)..(148): Xaa is any amino acid
MRKLILTTAAVAAAIAGAFAAETAFGTFTDTRNGQTYKTVKIGKQTWMAENINYQTDSSWCYNDSLSYCKKYGRLYNWNTAITVCPIGWKLPDTADWNRLVATAGGKEIAGKKLKSKRGWKKKGIIYLTPQGPPARLGRATRQDSGGF

SEQ ID NO: 88794 - protein, 313 aa, Unknown
  Obtained from environmental sample
  misc_feature (1)..(313): Xaa is any amino acid
VTKTEIEAIPQLEWSDWSVTPATCETAGSRTRVCIGNTSQTQTETITKLTWGEWSVTPATCETAGSRTRVCIGNTSQIQTETITKLTWGEWVETIAPTCAEGVETRTCPNNAQPDQTRSVAAVIPYENTTHLCDARDGKLYKFVVIGNGTTAQTWMAENLNFNASGSKCGSVLTGSGTLDDANTSTCDTYGRLYNWSTAMGGVCPAGWHLPSDAEWTALTTFVGTNPGTKLKANSTLWSTNTGTDEFGFSALPGGIGLASGSFDNVGYYGYWWSATEYNASNAYYRGINYDIAGVRRGGYDKTDLYSVRCVHD

SEQ ID NO: 88795 - protein, 462 aa, Unknown
  Obtained from environmental sample
  DOMAIN (126)...(390): Penicillin binding protein transpeptidase domain
  misc_feature (1)..(462): Xaa is any amino acid
VKELSLSEIVSLVVIPQNPSKRAPLNGRASAELIDSRKTLYEAWLKQHSQDALLETEMDLPPFLLNKFPRRLLHLTEYLNTRPMPKANMPDTNRYRTSVDLTLQNICERELEFFLVRNRGWGIKNGSMLLIDYSSMEALAAVGSANYFDNDIQGQVNGFASKRSPGSTLKPFIYALALEQGLIHPEKMLRDTPVGFSEYTPDNFRGEFKGPVKAWYALADSRNIPAVQLAREIHNPDLYDFLNMAGVSGLKEKGHYGLSIVLGSADLTMLELASLYCALANGGVNKDIRFFSARDNFNTGDASGNSAAGKKILSPAAAAITVRMLERNPAPDDFSAKAGRPAPVAYKTGTSIGFKDAWSVAVFDRYVLCVWLGNFSGEGNSAFIGRLSAAPLCFSIIDAILAEIPNENLYARRPLPSEVKTVQVCAVSGDIPSDDCPQLVNTLFIPGVSPINRCKIHRRVYI

SEQ ID NO: 88796 - protein, 521 aa, Unknown
  Obtained from environmental sample
  misc_feature (1)..(521): Xaa is any amino acid
AQIGSAQALIRSAVESVERVNSGISASIKPVVSPSVSSGINTNVGASINPNINTGVSINSGINANVNPNVNMGVNSGINPGINTNTNTGVNHNINRNLSANANVNHGINADINPVAGTNVNSGVNPTVNKDTNPGANPNVSIGVNVNANANINPGINANVNPTVNPSAGTNVNTIDTNANVNPNANINTAANTGSRPDEFLQIARRIWANTEKLRAGFREAFSTLDLQNRASPLDKPVDDSTAGTVRRSADTLRTEMLLDVSRALRDVFSSVDELQEIVSQLSSGQKALPEVEAALLRAVQTLEHQARQSGADVMERLKDVLRELNRLQADAARAQEQGAAGATRSAPADAIRAAALTAARSLENLQLLSTQTRTAETEQHLLALPAKIGGEWTEVQIKFVKERKKDKGEAKDGHVSIYLNVAPSVLGQVTAHLDYHPPNLKLAFQFEKPEVTRWFRQQSGELREALSQAGLPGTVLEFHNRRPVGSESPIPTRPPIGVDGDGIDQADGFEIKNGRVDFKI

SEQ ID NO: 88797 - protein, 249 aa, Unknown
  Obtained from environmental sample
  misc_feature (1)..(249): Xaa is any amino acid
MKDLYAFHAVVGYFRSSGYFDIQPYFHNLKDIKILVGINVDQMFAEAQRKGLLYFGDNEKTKEEFLKWFIQDIKEAKYSEDVEKGILRFVEDLIDGRIEVRAHNTKTIHAKFYLFLPEHHNEHSEGRVIMGSSNLTKAGLGNTESPNYELNVELKDYEDVLFAKNEFVALWEQSTPILPADIQAFKQKTHIGQTFTPYELYIKFLIEYFGKNIDYDPDTVGDLPKTYKKLSYQVEAVNQGFQMLMEHNG

SEQ ID NO: 88798 - protein, 324 aa, Unknown
  Obtained from environmental sample
  DOMAIN (183)...(319): Riboflavin kinase
  misc_feature (1)..(324): Xaa is any amino acid
MKIITENDAPLPPGRKTVVTVGNFDGVHRGHARLIARAVGLARESGAAAAAVAFDPHTRKVVYPELSTMLLTTISERAALMAEMGVDYLFLARFDEKFREMGQDEFVEKVLVRRLRAAAWVMGEGHHVGRDREGGKKNLHFVCGKYHISTFSEPPEMCRGAMISSTRIRAMVGDGHLREAREMLGRPYLIAAQRVKGLHIATERLSCPTLNFRMPETGKVLPPAGVYAAELETGTGGGGKKRLSGALYFGDCPTYEGRDTHFEFHALDFGGVGAAEPAVGENVSLWLHEYIRPGVAFPNEDALKAQIALDVDRIRDIFIDKIER

SEQ ID NO: 88799 - protein, 469 aa, Unknown
  Obtained from environmental sample
  DOMAIN (237)...(345): Miro-like protein
  misc_feature (1)..(469): Xaa is any amino acid
AWAKGGAPGSSPHSGSGHGGHGGGGHAGGEGGRGGHGGSGGGPGGRGGHGGHGGHGSHAGRGGHGGGDSGASVWGAPPKSPDAEGKKAASGKGGERGKKKGGKHRNERTEINEIELKANVKKTLARIGSGIGRKKYKKEGGAEVEEDTSKKVLQVAEFVTPNELANMMNVTPNDVITKCLELGMFVTINQRLDFETIELVVDEFGYTASLMEEYVPSDEIGAEADEVSGAMLPRAPVVTVMGHVDHGKTSLLDYIRKTNVIAGESGGITQHIAAYEVKTKQGPVTFLDTPGHEAFTAMRARGSQITDVIVLVVAADSAVMPQTREAIDHAKAASVPLVVAINKIDLPTANPEKIKGELASYNVLVEEYGGQTSCVEISAKTGQGIDRLLEVLALETEILELKATPEGRAHGVVIEAELDKGKGPIATVLIQRGTLKKGNAFVTGIHSGRVRELHNERGSIVENAGPSQP

SEQ ID NO: 88800 - protein, 284 aa, Unknown
  Obtained from environmental sample
  misc_feature (1)..(284): Xaa is any amino acid
VGDLSSKARDILKSNPDFGVSPENSDIFIVRDRPVSVTEKLYNEFCAQKNFYDKVSAIRDYVNNKNASADSEMFMEMFSYFTAFLRAPSRVEAEDSRRSADTVIQNAEYAVASFLLLNELIANKNYSHLKSSFSSDFAEIFANIKDVPSLFKNLKDTKLKTELLTNVKLFIGNWPDIYIKLFPYSQLVSITEQLEEAGFTDKLSALCTDCFDRYRECREAVVWLYKNAMEKPWFKAANIGKEKQLITLIHILDVTFRDIENSKDTVENRKINKLVHNILFKDGE

SEQ ID NO: 88801 - protein, 311 aa, Unknown
  Obtained from environmental sample
  DOMAIN (122)...(155): Tetratricopeptide repeat
  misc_feature (1)..(311): Xaa is any amino acid
MENGQTAGLLKSAYEKLKTSDPSAACSILEEAMDHDYENEEVKHALKCVKWWLQHIGRIDDIKTPYEKGASLISLLKQYYVFLSQLNQNFEQCQYSIRYFVYSKALFFFEGLLSNPANQHDGGLLLLAGRCYKGIGDYDEALNYLEQAVRIKRDDAEVLAEVADINALLAQTKTAKALFREAFFIDPSKIDMRFMESAFILKLRDSVSQLGYKGEELSEWIPVYGYLWGVFSVKRELKQTEAGRLKQSIFSLEAEYESNPARRPILKPRLLNHYFWLIDYYENSHEDPSFIEETLLKIKVTDPDIYGMYAR

SEQ ID NO: 88802 - protein, 67 aa, Unknown
  Obtained from environmental sample
  misc_feature (1)..(67): Xaa is any amino acid
MPDLDGWEIFNRLRAVSFLKNVPIVFLTSVSESVGVTRAQEIGAADYITKPYDKDDLLNRIEKILEK

SEQ ID NO: 88803 - protein, 195 aa, Unknown
  Obtained from environmental sample
  misc_feature (1)..(195): Xaa is any amino acid
ALIDPYAKALTKLDKWDLKTCAGFDPDAPTGDLSFSTEENLTTLPRCIVIDDNDFDWQGDAPLNYPLRFSILYETHVKGLTAHPNSGVKHPGTFLGVIEKIPYFKELGITSLEFLPIHEFNEHEFPRINPRTGNPLTNYWGYSTVAFFAPKESYAVDHSPGAQVKEFKMMVRELHKAGIEVILDIVFNHTAEGNE

SEQ ID NO: 88804 - protein, 540 aa, Unknown
  Obtained from environmental sample
  DOMAIN (276)...(496): Methyl-accepting chemotaxis protein (MCP) signaling domain
  misc_feature (1)..(540): Xaa is any amino acid
WLKKIGAVPIKRIALNVVSHAVFLGIVFSGGYLGIDPSIKGSLFLAALSFGMLVGTFVYVAGDGLVSRTLLAHNFTRYPPDCREKRQEAKAWIIPIMAILLTLFFTYSVTMLGIHKTGGTLDAMKGSALSSIWFPLVVFFISVSALAFTLKRNSGVIYTSVIAQLENLSSEQKDLTKRISICSVDELGTIAGMVNAFCEHLGGGIKNIRNETDVLSDIGIDLSSNMNDTAAAVNQITANVQSIKSRIINQSASVSETHATMEQLVVNINKLNNHVENQSGDISQVSSSIEEMIANINSVTGTLVNNADNVRTLQDASEVGRAGLQEVASDIQEIARESEGILEINSVMANIAGQTNLLSMNAAIEAAHAGETGKGFAVVADEIRKLAESSSEQSNTIGTVLKKIKGSIDKIKHSTGNVLNKFEAIDSSVKTVAEQEEDIRNAMEEQGTGSKQILEGIGRLNEITRQVKDGSNEMHEGAKEVIRESENLEKATAEISSGMNEMAVGAKHINSAVNHVNEISGRNRQAIDVVIREVSQFKAE

SEQ ID NO: 88805 - protein, 460 aa, Unknown
  Obtained from environmental sample
  DOMAIN (396)...(453): Bacterial regulatory proteins, luxR family
  misc_feature (1)..(460): Xaa is any amino acid
MSVESLIGFINHYVKNLPAEFIAENLSLILRSSTAAYHSGDINGYIRYLDMLYEKQGEITAKYPALLQTFGFVKGVDPRITFLEYTKGLIKTIPQMSKTTVSVKAHIATITQNLPFFHRSMRDFSEYHELKTEVVELLKTTIGVMIGKDYEVMDQALVAGLYYERGQLMDAVHHALIGKKACEEGMHPETRFSVNMILAAVLYAMGDFRDAGNVMAQTEVFIGEKARFLYSNFKALQTERVIRLGDIAAAREWLAVYANSVERLPFYQIYRHFTSLRSYIALEDYKAAVDFGRRIHELATDYKRPLDRIESGILTAIALWKKGDKYNAAAEMEQALHIAAPCGFIQLFINEGKEILPLLWMIRKKTDMDSQLAQFIDTLTHRISGFDEGRKEPEQAPRLSVMRRKMLEYLNKGMSYNEIADKTGIVRGTVKRHILLLYKQLGVNSGEEAVIKAKMLGLLE

SEQ ID NO: 88806 - protein, 68 aa, Unknown
  Obtained from environmental sample
  DOMAIN (10)...(67): Protein of unknown function (DUF433)
  misc_feature (1)..(68): Xaa is any amino acid
MGNEEIINYIVIDQGIRFGKPCIKGTRITVGDILQWLSEGIPISEILEDYPLLKEIHIKAGACFCRKT

SEQ ID NO: 88807 - protein, 343 aa, Unknown
  Obtained from environmental sample
  DOMAIN (19)...(342): Dihydrouridine synthase (Dus)
  misc_feature (1)..(343): Xaa is any amino acid
MNLYKPIKIGSLELSGNLFLAPVAGYTDRAFRSICAEEGADFSFTELVSAEALYRNFGRYGLGAEADAFSGNSAAINLVRRGEKEKRYAIQLFGGESEAIYKAAVLLAPLKPDAVDINAGCPVPKVVKNGAGSALMKNPSVIGKIVEAAVRASRESLGSVPVTIKIRSGWDSKSINYAECARIAVEAGAAMISLHPRTRAQNYGGKSDWSHISDLVSRLSVPVTGSGDLYTPENAQKMLKDTGCAAVMFARGAQGNPFIFSQTRSLLETGSWEQASVSARIAAAMRHLEMLAVDIGERTACLEMRKQFCAYTKGVVGGAVLREKAVHAETIEEYRRITEEAFT

SEQ ID NO: 88808 - protein, 321 aa, Unknown
  Obtained from environmental sample
  DOMAIN (1)...(282): D12 class N6 adenine-specific DNA methyltransferase
  misc_feature (1)..(321): Xaa is any amino acid
MFDVFSGSGIVARYFKQFSKLLIVNDLEKYSSLINECYLSNDDERNEFTLRKYYYELIEQAENNLVKGIISELYAPKNDKNIKQNERVFYTTRNAMYIDTIRQLIDNIPKEYQKYFLAPLLSEASIHANTSGVFKGFYKNKKTGIGQFGGINQDALFRITGDIKLPFPVFSNFNCETMICNGDSNEIIHSLPEVDVAYLDPPYNQHPYGSNYFMLNLILEYKYPENFSKISGIPENWKRSDYYKGNYALRALTSLVENIKSKYIIISFNSEGFINFDEMKNMLEKVGKVEILETKYNTFRGCRNLNNREIHIKEYLYLVEK

SEQ ID NO: 88809 - protein, 550 aa, Unknown
  Obtained from environmental sample
  DOMAIN (334)...(519): ATPase family associated with various cellular activities (AAA)
  misc_feature (1)..(550): Xaa is any amino acid
MNILDHFEKIVALAGGNGLNSKFFEAAREHIEAAGALLHTNPTQTALFALILENYGENSVSADDIAKTLKCGKMQFLRYMDDFDALKQKRLIKTASSRYSSGNFQRYTIPSDVIKAIRNNTEYQCTRFDDLSPEDFIYCANNLLKAAKRDDLTTDSLIDELKYLFEHNQNNLFVKKSKEYDLNEGSIIIMVIFSYALLHNDEELVKADDLMEELREIMGYSEAHHVENRLKSGKHKVMEKELVQFDCRDGIADTENFRLTEKAVSEFLADISFMEKERRRSKYFIMAKNLSERKLFYGEKIRNRIDELTDLLKEDNFAGIRKRLAESGMRTGFACIFSGPPGTGKTETAYQIARKTGRDIMLVNIAETKSMWFGESEKRIKSLFDRYRGIVKNGGLAPILLFNEADAVLGKRRELSQSRSGPDQTENAIQNIILQEMENLNGILIATTNMTVNLDKAFERRFLYKIEFEKPNTESKIQMWQNFIPNLNEDDAAKLAGKYDFSGGQIENIVRKNTVSYILKGTEPNLSILESFCKEEMLEKPVTRIGFCSE

SEQ ID NO: 88810 - protein, 87 aa, Unknown
  Obtained from environmental sample
  misc_feature (1)..(87): Xaa is any amino acid
SLHACRSTLEDPTIDGVYLVDLNDGLSLRGSSNQNICMITERYAKEAKELYGVQGRKIELHFREGQTTMVGIPDKNSLKILKGGGDK

SEQ ID NO: 88811 - protein, 485 aa, Unknown
  Obtained from environmental sample
  DOMAIN (64)...(179): PAS fold
  misc_feature (1)..(485): Xaa is any amino acid
MSDNAKLHPDIAALQKENKALARKLKETEYLVSSYEQYAIFQKSIYESIKKQKSEQDTYLRLIFGNTPDVILVLDANLMYVLGTKNSMRVLGINTDALTGQDVSAVFLQIMPMDWVSALTNDLRGVLSSGISKRFGKFVATVHGSEYYFETSIIPIKDDSTGAVTGVILTMHDETTLHEAVLNAERSNKAKTNFLAKISHEIRTPMNAIAGMAELILREHISGLVREHALSIRQASGNLMAIINDVLDFSKIESGKLEIVESEYQFSSLINDVISIIRMRVIDKQIFFTTNIDCDIPGRMIGDEIRMRQILLNLLSNAFKYCDRGFISIHVSSEKASDGAVTMVFDISDSGIGIKPEDHGRLFTDFVQLDKVTHKEVEGTGLGLVITKSLCEAMGGSIDVYSVYGEGSTFTVRIPQKFADYERFANVDDPDSKNVLIYETRQPYSASIICSIDNLGVKCKLVSNQSMFLEELNKNKYTHVFVSSF

SEQ ID NO: 88812 - protein, 404 aa, Unknown
  Obtained from environmental sample
  DOMAIN (2)...(277): CTP synthase N-terminus
  misc_feature (1)..(404): Xaa is any amino acid
MTKYVFVTGGVVSGLGKGITAASLGRLLKQRGLKVAAQKLDPYMNIDPGTMSPFQHGEVFVTDDGAETDLDLGHYERFIDENLTKLSNLTSGKVYWNVLERERAGGYLGGTVQVIPHVTETIKNFIYAGAENSGADVLITEIGGTTGDIESQPFLEAIRQISLEKGGSNCLFIHVTLVPYLKCSGEHKSKPTQHSVKELRAIGISPNIIIARADEPLSGGIKDKIALFCNVKPDCVIENMTLSSLYEAPLMLHQNGLDTVACRELGINAPEADLNEWRNMTQKITAMKRNVNIAIVGKYIKLHDAYLSIIESLNHAGFETASSVNILWIDSEDITNENAAEELKLADGIIIPGGFGDRGIEGKIAACRCARENNIPYLGICLGMQIAVIEFARNVCGLERAHSS

SEQ ID NO: 88813 - protein, 326 aa, Unknown
  Obtained from environmental sample
  DOMAIN (73)...(139): His Kinase A (phosphoacceptor) domain
  misc_feature (1)..(326): Xaa is any amino acid
MDKNKNQFKGPASPGQSKIDMKSAVRVTLNNAKHRTRVATEALEKAEKAREEAEKAREKAEIAREEAEMANRSKSNFLATMSHEIRTPMNAIIGIAQIQLQRKDLPEDYATALEKIYSSANSQLGIVNDLLDMSKIETGKMVLSPVEYNTPSLINDAVQLNVVRIGSKQIEFTIDIDENLPSKLYGDELRIKQILNNLLSNAIKYTGKGSVKLSVGYSRENDDVTLRFAVEDTGQGMKQEDKERLFSEYTRFNAQANRATEGTGLGLNITKKLVEMMGGTIGVESEYGKGSVFTVTVRQKAVECSAIGASIVEQLSKFAFAGDRHA

SEQ ID NO: 88814 - protein, 371 aa, Unknown
  Obtained from environmental sample
  DOMAIN (39)...(278): Rad51
  misc_feature (1)..(371): Xaa is any amino acid
MGKKGASSADDKDSKEGKEGKDGGHKQRNAAIEQAVSQIEKQHGKGSIMRLGTAALQTDIQAIPSGSLSLDTALGVGGFPKGRIVEIYGPESSGKTTVALHAIANIQKQGGVAVLIDAEYAFDATYAKGLGVDVDNLLVSQPDTGEQALEIADTLVRSGAIDLIVIDSVAALVPAAEIEGDMGDNHVGLQARLMSQALRKLTGILSKSKTCLIFINQLRMKIGVMFGNPETTTGGNALKFYASVRVDIRRIAAIKDGEDVVGNRTRAKVVKNKVAPPFREAEFDILYGKGISFEGDVLDLAVEMKIVDKSGAWFNYEGERLGQGREKARDYLRENREVLAKIEGQVRAQAASRRAGGHQDAGSDEGTEEEE

SEQ ID NO: 88815 - protein, 499 aa, Unknown
  Obtained from environmental sample
  DOMAIN (409)...(442): Tetratricopeptide repeat
  misc_feature (1)..(499): Xaa is any amino acid
AYLREETDMSAAIKRYEANTKAYPRDYRNFMRLGLIYAKDNNMHTQAVTNLRTASTLVDTITVIWKALGDVYGKQKNVDGELTAYAKYLTLKPDDVAISKRVGSIQIERKQYAAGVVNLEKVAAAKPDDYEVCMMLATGYTNTGKSKEAAAQYKKAKSLKPENVSIRLSIIEALEKAGDADGAKEEKASLAELDRKIVASDKKNIEARQRLVAFSKANSDNARAYTYLSELAELTPKEPTVFKNLYDIAIADGKKKEAIGHLKKYLALKPTDAVAQKSLGLLLYEEKDFDGALAAFRDARKTDPAVSGIYKEYMTILIQKKLDGEVLTVGAAAIAAKEIDAVVYAAMGDIYVKQGKYSDAAKMYKGALDIDKQNTTLLANYAECLAKSGDLKSATIAYEQVIMMNSNASKEYKELGAIHAKQGNQDQAIANYKKYLEKNASDEEIALAVGNYEYGKKQYKNAIKYFEMVKKGRYAEYSVPHKAGRFLLSDRELQEDLRG

SEQ ID NO: 88816 - protein, 296 aa, Unknown
  Obtained from environmental sample
  DOMAIN (7)...(86): Protein of unknown function DUF58
  misc_feature (1)..(296): Xaa is any amino acid
RVTHNAVSRGRTYPDFRQIARGTELKGNPVTGENRLIRKRGQGLEFESLRDYQEGDSIRLIDWRATSRNRRLDGRLKLIVRNYQEEQDQQVLFIIDSGYRLPDFQFDSALNAMLLLSYVALKHGDGVAAASFGAHERWIPPRKGMSALNGLMNGLYDLHSAPVPSSPFSALENALARLNRRSFIILISNFREEDEKSLSWILPRIERRHLLLLVSFHESEAEAMAWPMPAFPAVALPSRTDEEILETAAAFSYLASRRRLYRKWEHSGLLVLDTSPQYISTALINKYLSVKKSGKL

SEQ ID NO: 88817 - protein, 380 aa, Unknown
  Obtained from environmental sample
  misc_feature (1)..(380): Xaa is any amino acid
NLENPENYIIPTGPRPSPWQAIRAASGFPVKVPVYKIESLGKKVSSYETFNPQGISLFKNGFSCPWKQAGVWEEEGGVPRLLRPDHFSRYQGRLVDFADDFLKPFIVKYINTMKEADERSLFFIEGLPNCMKAESHPSWDKNDPVNAINAFHWYDGFALFTKSFRSWLTFDQNTFKIILGRENVAEHFTKCLAQGIGWTKKKMNNMPSLLGEFGLAFDLNNRRGFKKGDYSIHEQALSMYYDAVDANLLHSTIWNYAPSNTNKYGDSWNDEDLSIFSENSERAASGWKRPYPMATAGKPLFFSWNKKRKKIVFYFNAESGIKAPTVIYLPEYIFASEPKIEIVTPTGAVLHWEHNREEQKLFIYNGDYNGEALVKITNNK

SEQ ID NO: 88818 - protein, 501 aa, Unknown
  Obtained from environmental sample
  DOMAIN (27)...(92): ATP synthase alpha/beta family, beta-barrel domain
  misc_feature (1)..(501): Xaa is any amino acid
METETSIFEKYFETAERVDTIKCVGRICKVQGLLVESRGPQAIIGEICKIQVPKGKGTVFAEVVGLRNEIVQLMVFEETDGLEVGNLVIAQGGRLEVPVSTKLLGRVLNALGKPIDDKGDIDSPVMYPALASPPDPLKRRRITERIVTGVRAIDGLLAVGKGQRLGIFAGSGVGKSTLLGMIARNTSADVNVVALIGERGREVNDFIENDLGPEGLARSVVVVTPSNSPPLARLRGAYVATAIAEFFRDQGLDVMLLFDSVTRFARAIREIGLASGEPSATRGYTPSMFDSMPKLLERSGTSDNGSITGFYTILVDADDMDEPVSDTVRGILDGHIWLSRRLAQAYHYPAIDVLQSISRLAPVVSGPSVTKAAGAIRRSMAVYAEAEELINVGAYRAGSNPAIDEAIAKHQPIEEFLIQEVTDRSSIEDTYSGMEQLSGIPIPAEEISGSQDAEQSTGTVSKGKIPVGGSESSQSAAVNWQGNSVASLFASHLNSEGDSDL

SEQ ID NO: 88819 - protein, 437 aa, Unknown
  Obtained from environmental sample
  DOMAIN (105)...(436): Alpha amylase, catalytic domain
  misc_feature (1)..(437): Xaa is any amino acid
LVIEVVSPLIEHGKYPVHRVTGEYVTVQADIFRHSHEKYDAAIEYKHSSQKKWERIPMKLVDNDLWEGSFQVQKLGYYQYKIIAWTISPPDIPTESSVFEARVDSLCARQGTWYEMWPKSQGKNPNKSATWADCINRLDYIISLGFDTVYLVPFHPVGETNRKGANNALKAKPGEPGCPYAVGNSRGGHFAVDPELGTMDEFENFSSACKQRGLKLAMDIALNCSPDHPYVKQHPEWFFHEADGSIKFAENPPKKYEDIYPFDYYNENYQELWKEIKKIILFWADKGFDIFRIDNPHTKPFPFWEWLIGSIKEERPELVFLAEAFTRPKIMKRLAKVGFEMSYTYFAWREQRWELEEYFKELTTKPVCEYMRGILFPTTPDIFLESFNGQGPAIFKLRYFLAATLSSLTGMYNGYELCENEKNPAKEELYNSEKYQY

SEQ ID NO: 88820 - protein, 293 aa, Unknown
  Obtained from environmental sample
  misc_feature (1)..(293): Xaa is any amino acid
VLNIAGTVYICLFAGPGSVMNNSAEGTFNKTLTIIYAVFAFLIYTAIPIVSTYRAKLNFKKSDIALLAINTVFSGLIMYGVFLRYDLEIYNGLLAIAYAVFYLLLGKFIEKKFSTEERHTRVLFYLTALAFVVLIIPLQFGRAWLSLGWLAEGVILAVYGILNEEKRFRKAGFIICLLCLGAFLLFDLSRAGRSIFVWKYSAITIGSLIILGSYMYKKMMMGGFVPVYKYFAVINAWGYAIYIINKLGNMLYSLYSGEQVYQIGYLISAVGVTATFFIAYFITRIKLLQGKGM

SEQ ID NO: 88821 - protein, 730 aa, Unknown
  Obtained from environmental sample
  DOMAIN (510)...(690): Protein export membrane protein
  misc_feature (1)..(730): Xaa is any amino acid
SGAVLAVLILFLFLRSIKPTLIIGISIPVSIVITMMLMYFAKLTLNLMTMAGLVLGIGMLVDNSIVILENIYHYREKGAKLATASVIGTQEMLVAIAASTLTTICVFAPLVMFQGLLEMAGELFAGLAFTVVISLGISLVTAMFLVPVLSSHYLPLVTRKQKPLKGLLKILDNVFARMLTGLDNGYRWAVSKVLKHKAIVIIFLLLLFAGSIFMVPVIGWVFMPTQESDNVSVSVTLPMGTPLPETEAVLMQLQEIVKREVKAYGSLVINAGGGGFMGIGGSGGGNSGSLRISLPKFEDRIETADDIKAILRPHFNEFPGVSFSLGGGFSMSMMGGNPVDIILRTDNLVKGKALAERIAALLKERIDDITEPSVDLSDGLPQIEIRIDREKMYALGLNTYTVGNEIKAAVDGVTATRYKSGGKDYDVLLILAEADRSTRPALDHIFINSQMAGRVPLSSFVQYAEGTGPMTINRENQSRIIHVTAGAKAGTRVNTLQSRIEALMTAEVPVEDDVIIEYGGDNAEMVKMMTRFALICVVAILLVFGVMASLFESFRDPFIIIFTIPLSFIGIVAIYLMTGDTFNILTAVGLLVLVGVIVNNGIVLVDYTNLLRKRGYSLHDACVEAAGNRLRPILMTTLTTILGLLPMAFFPGEGSELVAPIGKTVLGGLSFGTLMTLFLMPTVYFIMNKRSDERAAKAEARRERIAAGLRKKDVKAEVIVEVKEAKNVTA

SEQ ID NO: 88822 - protein, 98 aa, Unknown
  Obtained from environmental sample
  misc_feature (1)..(98): Xaa is any amino acid
MLRLEIVANHSVEENIMEAFKKEGVAKYYTKYPTIYGVGTSGPRMGDAIWPEENFALVIWCEEDEARKIVQAVNGVKKVFPKEGIKVFPIRVGGGKSG

SEQ ID NO: 88823 - protein, 229 aa, Unknown
  Obtained from environmental sample
  DOMAIN (4)...(220): Flagellar filament outer layer protein FlaA
  misc_feature (1)..(229): Xaa is any amino acid
VFAQSPQPQRTELGTPDAERLGIDSAQQLLKEVSVDKFEHDGFWRSTMSSDEGYTTTRLFTGSPSAKEAIPDEEGKNITDKYVLGTRVDFLRRGHNSFTIYPTRPIPIEGITKTVSVWVAGRNFNHELTLLLQDFFGRYYEFYVGRLNFIGWKKLTVAIPPQAEDGFSGVVQRNYHYNNQMGLKIMGFRIDCDPMEAYGSYYIYFDDLRAVTDLFAENNRDPDDMVDGW

SEQ ID NO: 88824 - protein, 392 aa, Unknown
  Obtained from environmental sample
  misc_feature (1)..(392): Xaa is any amino acid
FFKNYKEVTVWIQLSERDNVGGRFWESFVHSVSKANANMAEAISKIGFPDTKEKLRHYKALIREYAVAGRKRLVVIDDFHCIEDPSVLRFMEEGFFRNMLPGTSVFLISRSISRVNIADLFYRDQVFNISESDLRFTENELSSYFRRLGISFRPDSLREIMQDTEGWAFAINLIARSSQKAPGYGGYVRNAMKQNIFRLLETEIWDDFSEQMQNFLVRLSLIDHLSVDLIAELAGGDEELIAGMEKQSAYIRLDSYINAYLIHPLFLEFLATKQELLSEKQKQETYAIAGDWCNRNGFRIDALSYYEKIRDYKSIVNIFFDLPLQIPLDVSHYAMPILDRARPDELYKVEFLAEMHVRAYMCQGLLQKSLDLVKYYEAKFLELPGDSAVKKR

SEQ ID NO: 88825 - protein, 680 aa, Unknown
  Obtained from environmental sample
  DOMAIN (585)...(649): DNA gyrase B subunit, carboxyl terminus
  misc_feature (1)..(680): Xaa is any amino acid
MPVKKQVKKINTKTSAKAKVKAKTAVKKSPPKPEVKKPSSVAASSKAPVYDESKIKTLSSLEHIRLRTGMYIGRLGDGSNPDDGIYVLLKEVIDNGIDEFIMGNGKLIETVVKDIDKPGKALVKVRDYGRGIPLGKLVECVSVINTGAKYNDDVFQFSVGLNGVGTKAVNALSVHFRAVAIRGGEFAEAIFERGKLKSERKGKLKDPLKDGTMVEFIPDPEIFKDYLFNIEFIEKRMQNYAYLNAGLTLSFNGKHFVSKRGLFDLLCEETGDDCLYPVGYYKGEHSANGQLEFAFTHTNNYGEEYFSFVNGQYTSDGGTHLSAFKEGFLKGIQTYFKKDYRSEDIREGTASAIAIKLKNPVFESQTKNKLGNSDIRAWVVQETRNAVEDWLHKNPEAGKKLEQKIVSNESLRTELNAVKKEAREAAKKIALKIPKLKDCKYHLEDGKDGAESTIFITEGDSASGSIVSSRDVMTQAIFSLRGKVENMYGKKRAAIYKNEELYNMMMALGIENDVEGLRYAKIVLATDADFDGFHIRNLLLTFFLSFFEELVTAGRIYILETPLFRVRTKKETRYCYTEKERDEAAAALGGQTEITRFKGLGEISPKEFGQFIGEDMRLVPVSINTLKAVPQVLTFYMGKNTPERRDYIMKNLIEERGLILFVRYISLIISKKGFKMGNQN

SEQ ID NO: 88826 - protein, 278 aa, Unknown
  Obtained from environmental sample
  DOMAIN (1)...(198): 3-beta hydroxysteroid dehydrogenase/isomerase family
  misc_feature (1)..(278): Xaa is any amino acid
IGDLRDTDYVDYILGHLKADAVFHTAAYKHVPLMEENPVAAVENNVFGTENLVLAAIKHNIKRFVHITTDKAVEPVSVYGASKYLCEQMVLEAAASSGGPNFMVVRFGNVLGSRGSIVPLFQQQIQKGGPVTITHPDIRRWFMTISEACSLVLKAGGVGVNGGLYLLDMGEPVRIKDLAEQLIRFHGFEPDTEIKIVYTGLRPGERMDEPLWSQDEKVKETEYSRILQVNREKPFNVDLKEMLEQLRPICRFDPAKPQVYRDAELLHAILIEKVMKLK

SEQ ID NO: 88827 - protein, 487 aa, Unknown
  Obtained from environmental sample
  DOMAIN (5)...(102): Aldehyde oxidase and xanthine dehydrogenase, a/b hammerhead domain
  misc_feature (1)..(487): Xaa is any amino acid
MRASAFLEDIYPQHLLYGITIRSPTANGRLKLIQFPVLPDSYTFITARNIPGENRLEDTSIPILADSKLSYIGEPVAILLGQDKIKLEEFAKQCKVIYEEETPEFNAIEPAAAVREIQIGDCKSVFEKPGKIIAGSYITGIQDHWYAEPAGAVTYYGKNQKAKNEKAPNNLPDGSPDGSPDGGEEKKETKLKKSEKLLIVKTATQWPYHVKRSVARALGIDQSDVCVETTSLGLHMDGKLMFMSLVACHCSLGTFLTNKPVRFILNREEDFLYSPKRCKTNIDLVTTIDDKGNITAAEADIVVNLGAHGVNGEEILDQICLGVIGYNNVENFKITARAYVSNIPPQGPFSGFGLAQGFFAMQRHLAQIADTVQTNPLEWRKTHYNPFMVLPSGTNPKNHISVDKLVSAVTNIGDYNRKWASYELLKQSRREKTLAYEKGENLRGIGLTVGFQGNGLLYNGEDKGIYSVEVTLTKDGFLEIKQALQAR

SEQ ID NO: 88828 - protein, 359 aa, Unknown
  Obtained from environmental sample
  misc_feature (1)..(359): Xaa is any amino acid
FTTLLKPEEIEEVQYAQNYDTMILTHENYPPLEIKYSDSNLQINKLKMTFNKTVVKGKDVTDSDAVPYRKDDGVYENGRLTKEGHYPLAVSFFNGRLVFANTMSERQRLFFSAVKKEKENYNFATNKIFLTEKKEYVIVRGKIQAGKNTITVKDYESPLRFDKTLSSYFTDSPFFDNGTYIVSITDNVINLSRNSNITANVNDTELAELDRWKASIESARAAEMLPTLRIIGASWDFIRFTCMRCMVDEAQFFKATFLPELLETDPETGLSIRITESAAREVIASNDIQARQYLKDMFDSRLKDAFDAFLITQSSNPRNIDYNGALDVLINQIRTYWQYTFRGEKIIGHPNEIYGKITG

SEQ ID NO: 88829 - protein, 301 aa, Unknown
  Obtained from environmental sample
  misc_feature (1)..(301): Xaa is any amino acid
EETNIQALVENAWKQINNEPNLSPGIKSLVELLIGVIQILAGKRLAKNSKNSNVPPSMDPNRDKKPKPKLERKPGGQPGHTGVTLEQTDNPDAIIKIKVDRNSLPPGNWKQAGHEKRQVFDLKIVTHVTEYQAEILVNETGDKVTAEFPRGVVQKAQYGNGVKAHSVYMSVQQLVPCDRVSEHFASQMGLPLSAGTVHNFKEEAYTLLEEYETWVKARIKNSKIIHCDETGIVIEGKRVWLHVASNDKYTLYYPHEKRGRAAMDETDVLSAEGGVLIHDHWKPYFTYGNQAHGLCNAHYLR

SEQ ID NO: 88830 - protein, 96 aa, Unknown
  Obtained from environmental sample
  misc_feature (1)..(96): Xaa is any amino acid
VEGINRETNGEPPGFSGGYPDTMARVHAAGGVLYDEKAEAPYAYDAKEKTFITFDNERSLKAKRKYVKTEGLGGIMFWEYSCDDEHSTLLNALALD

SEQ ID NO: 88831 - protein, 569 aa, Unknown
  Obtained from environmental sample
  DOMAIN (191)...(226): RHS Repeat
  misc_feature (1)..(569): Xaa is any amino acid
KNKVKFDSNNEDTLATVITVDGLGRALYTAKQGETWNNGTPKKGWNVSGFTAYDAKGRTVVAGQPLFVEFATAEALAGWNLTGYNLLVNPTEYEYDSLDRTVKTTLPAGPGAQRPVQTAGYAIRAGRTVVTTVDPLGNMSEQEADGKGNITLVRRLDKFGSELTRAGYIYNGLGEMLRALDADNNPLSAEYDRLGRRTKLSSADIGVKEWRYDASGNMVSETDSELSRQGKRIQYDYDGMNRLLKITYPFSEATVYEYGEAGRGDNAAGRVLKVTDETGSTGYRYGLLGQVEEETRVIRLLPVSSGKTKTATMKYESNYLGQTEKIEYPDGEAVSYGYNWGGQISKVTGNRKGTEFPYVKNIGYDEYGQRVYIEYGSGVKTKYSYDPYRRWLSTIRTESPEMGHPFQDIKYTFDAVGNVLGYENTAYGHTTSQNYAYDGLYQLIEAKGASSSHPYGSGVEYKTDYRQDFSFNRIGNMTNKTSTEYVSNTNRIGVNLNYNLDYAYYAGTHMAERIGNRYYDYDRNGNLVAEREGGHAVTPEVYRPYYQDGDMYYTEYGFGLVRPNAAPPT

SEQ ID NO: 88832 - protein, 343 aa, Unknown
  Obtained from environmental sample
  DOMAIN (1)...(211): Respiratory-chain NADH dehydrogenase 51 Kd subunit
  misc_feature (1)..(343): Xaa is any amino acid
CLHADEGEPGTFKDKLILDKLPFKLLEGIIIAGLTFKARAGYIYVRGEYRNIQKRLIEAIKNTKDAGFLGKNILGTGFDFDIHVISGAGAYVCGENSALLNSTEGKVGRPRIKPPHLAEVGLFLKPTLVNNVESLASIPAIIELGGDEYLKIGHPDSGGTKLICLSGHVQNRGVFEIPLGKLTLREIIYDPELGGGIQQGKKLKFFHLGGQSGPIGGPELLDTVYSYTDMRKAGLGVGSGAIVVMDETVSILEYLQCVSKFFVHESCGKCIPCREGNRQIFKLLRRLSVPNAAASGDLDTLRGLIRAMTDASFCGLGQTAAAALNSAWKHFKSEFEAQVKERP

SEQ ID NO: 88833 - protein, 395 aa, Unknown
  Obtained from environmental sample
  DOMAIN (14)...(78): 2Fe-2S iron-sulfur cluster binding domain
  misc_feature (1)..(395): Xaa is any amino acid
MSHYKPDPNKNVNLTIDGKAVTVPEGTRILEAARKVNVHIPTLCEHPDLCKRGVCRLCVVECDGRGKLLAACANDVWEGVNIVTHNLRILGIRKMILELLLANHPQDCLSCIRSTNCELQTLAADFGIRESCFRHDAADCVPPVIESETLVRDMSKCVKCGRCVEACQEVQTIRAINTSHRSKEYEISTPYGQALKESSCVFCGQCASVCPVGAIYEHDQCAEVRAALNDSGRKTIAQVPPSFASALEDVLSLAAGTITTGKINSAVKLLGFDKVYDMKTAATSASAEINSEVTARRKAAGKLPVVTGCAEGVGNFVKNFYPDLAAHLITEKTARRTFASVIKNGYAKEAGIESSAVTSVSLVPCLAQKYAAEKNKTDYALTAAEFARMINLAGI

SEQ ID NO: 88834 - protein, 413 aa, Unknown
  Obtained from environmental sample
  DOMAIN (46)...(305): Protein tyrosine kinase
  misc_feature (1)..(413): Xaa is any amino acid
MHILDESEIEKTVVERDPVLSEPDPQTAPSPTRPLIGQTRICSGLVVDTVGVGGMAAVYKVWNERLELFRAVKMLSLDTLHARFETEAKITAKLRHPLIVEVYSIGEWNGVPYMEMEYVDGGNLQEALETRGRFPDAVCCAAALFIATALDYAHTLKFTLGGNSYDGIIHRDLKPANVLISKRSEIKLTDFGIARPAQASLHTMDGNIVGTLHYLSPEQLRCGNIDLRSDIYSLGAILYEMATGVKVFPQKDITELTMQRAANNFKPPNEYDTPVAPAVSNIILKCLKTSPQERYRHAAELIRDLQKAYAEIAPKCAPQKTLHDFFSEDTAEAGVTPTVLISVDTDTDYAVDTTSVIDKDSVVDTDFILNADPIVDNDPFIVNTDSVIDDDHVIINTDSIININSIDDNDPIF

SEQ ID NO: 88835 - protein, 423 aa, Unknown
  Obtained from environmental sample
  DOMAIN (263)...(391): ATPase family associated with various cellular activities (AAA)
  misc_feature (1)..(423): Xaa is any amino acid
NDHEKDLLNLIKANVSVIQIVSYETLRIHGMLVKSALELKRDLYIWNRVKGLRKWDNEKKIFGTQNENLLDGESIFNFYNKENNCILLLEDFYPDLTEHYPKNIRCIRDVALDNRSNKTLVLSQPIKDLPKELEKEVHILELPYPDIADIEAIYNTVCEKYEIKNPDKQNNELLNAALGLTIMEAEKAFSLAYIENESLTDSEVPLVIREKENVIKKSGFLEYYHPKEEIKDVGGLDHLKNWLEKRGRGFDKGAKEFGLTTPRGILLLGIPGTGKSMTAKAIGNLWHFPLLRLDMGKIFGGIVGQSESNIRGALNIAEAIAPCILWIDEIEKAMSGISSSGSTDGGTTSRVLGTFLTWMQEKTKPVFVVATANNISQLPPELLRKGRVDEIFFVDLPTQKEREEIISIHLKRQDRDPNDFDVV

SEQ ID NO: 88836 - protein, 520 aa, Unknown
  Obtained from environmental sample
  misc_feature (1)..(520): Xaa is any amino acid
AATRALINEINSGVAVVNWFGHGSSSQIADELLFSRENVAALENRKRYPLFSIFSCQVGKYDQPGEEPLAATLVKRPQGGGIAVVAAARDVYSGPNEDLAIPFFSELFGPGDHAELSIGGALVKAKARSAGYQDRYYVLFGDPSIKIIGRGSGVQEFRITDTAGVPDDTLKALQRVTARGKVSGVREGDSAYAAVTLFNPPQDSVRRKDGGRFDDTTIYSLPGSPVFSAKIPFDKKTGTFEHPVLLPMNLTFKKPGVKLIAHVWKEKEAMVGAGYLGNLIFDGSENANFGDTTGPKISVRPVYGVNAMDTNFRVKNRITVQLPLTLEVFVEDENGVNVIGSGPDEGLTMEVKGALSKRSINHLFQFDPGSFSKGKAPLSFDENVLKSGTYELIISAQDLLGNVSKLSVVWEVVDPADIKLDHVINVPNPVKMGQQTRFYYTHSNVTGDLDVSVTVRVYSLGGRLLSVIRNPKNGEPWVPRDNRGNYLTPNVYLYQVTATSQNVGKTVKSKIKKLAVLPPR

SEQ ID NO: 88837 - protein, 164 aa, Unknown
  Obtained from environmental sample
  DOMAIN (9)...(159): S-adenosyl-L-homocysteine hydrolase
  misc_feature (1)..(164): Xaa is any amino acid
MKIDIWDDSPHIVKDMDLTDWGRKEIEISEFEMPGLMAIREKYAKDKPLAGVRVSGSLHMTIQTAILIETLKALGASVRWASCNIFSTQDHAAAAIAAGGVPVFAWKGETLEEYWACTFKALSFPGGLGPQLIVDDGGDATLLIHKGYQLENGSKWVDSPSESH

SEQ ID NO: 88838 - protein, 461 aa, Unknown
  Obtained from environmental sample
  DOMAIN (33)...(202): ATPase family associated with various cellular activities (AAA)
  misc_feature (1)..(461): Xaa is any amino acid
MRPRVLEDIIGQDHIVGPGRLLRRAIQADRLSSLIFYGPPGTGKTSLARVIANTTRAAFESLNAVLSGVKNIREAIDRADERFRLYSKRTILFVDEVHRWNKAQQDALLPWVENGTVILVGATTENPFFEVNRALVSRSRIFQLKSLDAQGLMKTARNAITDVERGYGKWKISFEEGALEHLVEVAGGDARSLLNALELAIETSSWGDDSKWPPPTGTAIYISMEAAEESIQRRAVLYDRDGDYHFDTISAFIKSVRGSDPDAALYWLAKMLRAGEDPSFIFRRMIILASEDVGLADPHALGVVVSCAEAFDRIGFPEGNFPLAHACLYLATSPKSNTAMALFDAMKEVDKEDAEVPNHLRDASRDAESFGHGEGYTYPHAYRDHWAAQQYLPTALRGRTFYIPSPVGYEGKIRDEVLRKRGTAGGCYPWRPNRRRRAFKLVGRGERKRRLVQASESGRSA

SEQ ID NO: 88839 - protein, 522 aa, Unknown
  Obtained from environmental sample
  misc_feature (1)..(522): Xaa is any amino acid
GWKSRGGREFFEEIENRRVDPGLLERVEGNNFRTRVYPIPSYGTRTIAIGYEEELALEKNSLNYRLPMAYPDSLEKFAVKATVWKSSLKPLVPDSADGLRFDKVDENYVASFSREKYRPARALNFALPTPVDIPQLMMQPAQGNYYFFASVTPKLETRKKRWENDLAIIWDVSLSGSQRDLKRELDLLNTIFTDKKDANVHLYFLNNKFKKIANKGTSNGEYKVSNGKWDELKEVLETAVFDGGTDFSKINPNDITGNEILFFSDGISTLSDADFLKNANANRPIHCLVSSAKADYSAMKLITGKSKGKFININALSSQKLKDELLNETLQFLGAEHGKSVREIYPSIAAPVHGNFSIVGISDTNDAELTLLFGFGGKVERRIKVKLDAKSADGQVNVHKIWAQKKIEELDLNYEKNNAELIALGQQFGIVTRNTSLIVLESVDDYINYNITPPISEPQLYAEYQRRTKGLQGQKSNRVQPSRLGGAATSDDLLRRGGFATDIDAILSSAGGLRSGGDGGAG

SEQ ID NO: 88840 - protein, 93 aa, Unknown
  Obtained from environmental sample
  misc_feature (1)..(93): Xaa is any amino acid
MGKEKESYFVCPNCGEELPANARVCPNCGSDENTGWSENTYLDGIDLPFDEDDYEEVKERELGGSKKGFRVNWMAVIGIVVLAAMFVAFVWQC

SEQ ID NO: 88841 - protein, 346 aa, Unknown
  Obtained from environmental sample
  DOMAIN (31)...(342): Initiation factor 2 subunit family
  misc_feature (1)..(346): Xaa is any amino acid
MARLKTIDWQNDRVKLIDQTLLPNEVRYIDIVNAEGMYEAIQVLRVRGAPAIGVAAAFGLYLGVRDFNGGGVNSFLGHVNERAAYLSSSRPTAVNLFWALDRMKEFARAQAESCGDIDVDTLKKRILEEAVRILEEDKRMCRAIGEHGFELIKDKECILTHCNAGGLATSELGTALAPIYVGQERGVTFRVFADETRPLLQGARITALELSEAGIPVTVICDNMAASVMASGQIKACIVGADRIAANGDTANKIGTYGAAISAAYHKIPFYVAAPSSTFDLKIKSGADIPIEKRGREEVALLGGVKKSIPDKAEVFNPSFDVTPAELIAAIITEKGVIYPPFTGNI

SEQ ID NO: 88842 - protein, 197 aa, Unknown
  Obtained from environmental sample
  DOMAIN (52)...(88): Sigma-70 factor, region 1.2
  misc_feature (1)..(197): Xaa is any amino acid
MAKSYNGILSAAAEKSEELLARSTKDTPWPVKKGQKQKGPKDPHKTKNLKEADPLGLYFKQISKYPLLTVQDEQLIGEEILRLRRQIADLDASYENKRRGVTFQNKHKALEDSLLEHKNKMIKSNLRLVVSIAKNYQHRGLSLLDLINEGNIGLIEAVERFDYTRGCRFSTYGTWWIRQAIIKSIADKGRVIRIPIH

SEQ ID NO: 88843 - protein, 531 aa, Unknown
  Obtained from environmental sample
  DOMAIN (139)...(227): MGS-like domain
  misc_feature (1)..(531): Xaa is any amino acid
VKVKGLVNIQYVFYENDIYVIEVNPRASRTVPYLSKVTGIPMCELATKISAGQTLSSLGYISGFGRIPPYIAVKVPVFSFEKLAGVDTHLGPEMKSTGEVLGIGKNFEESLFKGLVAAGYKMKKKGGVLITVRDGDKAEITDVAKKFAQCGFSLHATRGTARYLNEKGLDVQPIDKITDNKEVNTETLLAGGKISYIISTSEKGRDPALDDVKLRRKACSLGVPCLTSIDTANALADGLLSGYSEISTELIDINRLREERTKLAFTKMHTCGNDYIYFNCFEKEIESPESLSVFLSDRHAGVGGDGVVLILPSDTADAKMRMFNVDGSEGSISGNAIRCVAKYLFDNDIVKKHDMKIETKSGIKKLYLSTRNGVVSSVKVDMGRAELRPEKIPVNLTGESVIKRKVVIDNEGYEITCVSMGNPHAVIFCDKIDNLDLSKIGPLFENDPLFPDRVNVEFVKVMDKNHLKLRIWERGSGETQASGSAACASAVAAVLNGHCDKDTNIKVRLPGGDLYIHYTDEAVYMTGDCIK

SEQ ID NO: 88844 - protein, 177 aa, Unknown
  Obtained from environmental sample
  DOMAIN (8)...(103): Aldehyde oxidase and xanthine dehydrogenase, a/b hammerhead domain
  misc_feature (1)..(177): Xaa is any amino acid
LKDPCEFITDMSVPGMLHAITIRSPVACGSLKEIKCPELSGSYRLITAENIPGKNCLSNFSIPVLADHKLSYIGQPVAILAGREESVLEDLASKIEIQAEEEKPTFSCKTSGPDDELVNREIVSGDPHKTLEEGGLILSGKYITEIQEHWYSEPHGAVAAPMGISKKEITAMTISQL

SEQ ID NO: 88845 - protein, 280 aa, Unknown
  Obtained from environmental sample
  DOMAIN (100)...(279): Male sterility protein
  misc_feature (1)..(280): Xaa is any amino acid
IPVVGPIRDVARLLRLQSGDEAIIAIPGAGREYLKELYGILKSAGFKSIRILPGISQIIEGDAHLIQTRSIDPQDLLGRTPIAVNLRESLKYLRGKRVMVTGAGGSIGSEISRQLLSAGASRLYLFGHGENSIYQIDRELRLLQEEGVGEKAVLVPIIGDLKDRDYMDWLLSKMKADVIFHAAAYKHVPMMEDNPVAAIENNFFGTDNLIEATKKHKVKRFVHITTDKAVEPASVYGVSKFLCEGLVLEAAREPGSPSSSFMAVRFANVLGSRGSIIPLF

SEQ ID NO: 88846 - protein, 212 aa, Unknown
  Obtained from environmental sample
  DOMAIN (1)...(85): TruB family pseudouridylate synthase (N terminal domain)
  misc_feature (1)..(212): Xaa is any amino acid
VIAEAEVPSLEAVEAVLESFRGDILQAPPAYSAKHINGRRSYELAREGKVPEMKKQPVTVHELSLLSWTPPEACFRFRVSSGTYIRSLARDIALAAGTRARLSHLRRDMVGPFLLEDAVDKDSLDANDALRPIDVSLFKKIQLPCFILDRKAEEGFIHGRSLDGILTAENLSAWAEASAEAVGVFSRDRLEFLGFLERKNGKWSYGHVFAGD

SEQ ID NO: 88847 - protein, 273 aa, Unknown
  Obtained from environmental sample
  DOMAIN (1)...(272): Hsp90 protein
  misc_feature (1)..(273): Xaa is any amino acid
GTALWRRAKSELKDEDYKEFYKSLGHDSDDPLFYVHTKAEGALEYSTLFYVPKKAPFDLYHVDYRTGVKLYVKRVFITDDDKELMPTWLRFVRGVIDSEDLPLNVSREILQQNKILFNIKNASVKKLISEFKALADKAAAGDEEAKKNWETFVGQFNRPLKEGLYQDFANREAIQDLVRFKSSTVEGWASLAEYVSRMKSDQKNIYYITGGDEKTLKASPLLEAYTAKGIEVLIMDDEIDDIVIPSLHSYRKEVPGADGKTETHTWELKAVNR

SEQ ID NO: 88848 - protein, 505 aa, Unknown
  Obtained from environmental sample
  DOMAIN (129)...(470): Glycosyl hydrolase family 20, catalytic domain
  misc_feature (1)..(505): Xaa is any amino acid
MIKYAIIPEPAFIQNQNGNFQCRGIFLPTIPENNNIQKEVQIFNTQIINTWGKEACIGDSGKINLITAEGFFDTESYQLEILPNEIRLCSSAEAGMYRGLQTLRQLFLSGYHEGVLSIPCGIIKDKPRFPWRGFMLDCSRYFYSVEFIKKLLDALSLQHINIFHWHLSDDQGWRLPVASYPLLTEIGSRRREHRLNGEFSGGFYTETEIRGIVSFAAGRHIEVVPEIDFPGHASAILAAYPGLGCTGGPYRVEDRFGIFEDVLCAGNDGIFPLAEAVFDTLAELFPSRYVHIGGDEVLFKRWAECPKCRKRLAELGLVEPAQLQSWITSRLVRMLQKRGKTAIGWDEVLENTEKFPLPADVIVQSWRGKEGGNKATALGHRVIMSPLTNGCYLDYRAIDRLEEIGRLGICTIAQSFSLDPVTKEMNEASASLVLGGQGNLWSEIIYAGKIAEYMIFPRICAIAETLWSQRKQKTAPDLEEFAQRLAIHQSRLDKLGLLQYRGPLG

SEQ ID NO: 88849 - protein, 257 aa, Unknown
  Obtained from environmental sample
  misc_feature (1)..(257): Xaa is any amino acid
MKALCVLYGGRLEPEAFEKVLPGQAGNESAFSLAVAAARAFPGVEKTVFLGIQDKGYPDLPHNVEVEIVTRPSWTRTSLLEEISRLSVGWDFTFFAWADCPLLDPALAGAMAERHLRYKAEYSYADGWPYGIAPEIVGPGTAGILAKLSEGSDGTVERDALFQVIQKDINAFDIETEISPVDLRPYRLSLTADSKRNLLLLSRFMKELRQFATNRQIAAADIEKLISEKPALLRTLPAFFISRYWALVPRPVPSAPG

SEQ ID NO: 88850 - protein, 327 aa, Unknown
  Obtained from environmental sample
  DOMAIN (1)...(322): Protein of unknown function (DUF1432)
  misc_feature (1)..(327): Xaa is any amino acid
MDVNMLIYFGLAVLAVIAVVLVYFLASFFSLWLQALFSKASVSIFQLLGMRLRKVNPRMIVEARILSVKAGIPVETNLLEAHYMSGGNVLRVVQAIIAANKANINLSFTESAAIDLAGRNVLEAVQMSVNPKVITTPKVSAVALDGIQLQAVTRITVRASIRKLVGGAGEETVIARVGEGIVSSIGSAKNHKEVLENPNMISKKVLASGLDAGTAFEILSIDIADVDVGHNIGAILETDRAEADKKIAQAKAEERRAMAAAAEQEMKAKVVEMQAKVVEAEAQIPLAMADALKNGRMGVMDYYNLQNIKADTQMRTQISGVSEKDLK

SEQ ID NO: 88851 - protein, 184 aa, Unknown
  Obtained from environmental sample
  DOMAIN (32)...(184): ABC transporter
  misc_feature (1)..(184): Xaa is any amino acid
VSWIINLENVSYSYPCKKNRALENINLFIEQGEFLAVMGENGAGKTTLCKLFNGIIPGLAEGRFLGNVTVDGENTRETQTQLLALKVGMVLDDPDAQLFTSTVREEAAFGPENLLLPPNEIEERISFALNATGLCGFEERSVATLSGGEKQRLSIACALAMAGKILVLDEPLSRLDPRGAQEVI

SEQ ID NO: 88852 - protein, 488 aa, Unknown
  Obtained from environmental sample
  DOMAIN (299)...(482): ABC transporter
  misc_feature (1)..(488): Xaa is any amino acid
MTGIQVPGIINFENVYYSYQGEKKWALDNINLTIERGEILAVMGENGAGKTTLCKLFNGIIPCLATGRFLGNVTVDGENTRESQVSRLALKTGMVLDDPDAQLFTSCVRDETAFGPENLLLPPHEIEERVSFALAATGLCGFEERSPATLSGGEKQRLAIACALAMGGKILVLDEPLSRLDPQGAEEVISVLRDIREKYQITVIMATHDSKTAAVIADRVCVMKDGRIAACDKTEKFFSNTALLEENGIQAPNDSDIENVFTSGSKPVLTEAVKIIDFCYFYEKTGVSIENISLTVADNDFLAIVGKNGCGKTTLLKCITGLLRPASGDIFIRGKNIKENSVSDISKEIGFVMQNPDSQLFTDSVFNEVSFALKNARFSKAEIQKRVNEALVTVGLTEPDAFPHSLSRSDRTKVVIASVLAMGGRILIFDEVDIGQDYKGCIHIMNIAKELHSRGCTIIFVTHNMSLVCEYARRVIVMNRNGILQYEK

SEQ ID NO: 88853 - protein, 255 aa, Unknown
  Obtained from environmental sample
  misc_feature (1)..(255): Xaa is any amino acid
MKNKLSGVIHPAVIAVWAAVCAAGFLLPTVPIWGTGSVFSVSSALAPLSGIFFGPIAGALCSAAGGFIGSLIAPHTAWMGLGTFLIGTVTAFTAGCIAWGKWPPIMINKNGSFIVSGGIIVYIIGTVLWFTQETGRKAILLPLVSYGLGFIVMIAGIIFARRVFTGKSRLLKFPVIWLCAFGGLTGGASIGNFFSLLLYDLPSDIWKTLSMVQPVERAIFALGAMFIGVPLLEGLNKIGIAAGPLPEAEEEENED

SEQ ID NO: 88854 - protein, 164 aa, Unknown
  Obtained from environmental sample
  misc_feature (1)..(164): Xaa is any amino acid
MTGTANKPIPSGVVFEAASGERYYLENAYRMGSNCQAIVAVKAENPGQQGNLAAGEKLSVISAVPVGIDSEAIVSDNGIIGGADAETDEEYLARVLAFLRNPSRYGKKDDFALWAKDASAEVSAAWEYKNFGVFGAVLVQVIKGNQIDGIYPVDNLVEVRNYIN

SEQ ID NO: 88855 - protein, 491 aa, Unknown
  Obtained from environmental sample
  DOMAIN (211)...(358): GTPase of unknown function
  misc_feature (1)..(491): Xaa is any amino acid
ALAVVRLTGDGARELFAGVIAEKEKFRKEAPRRIGIYTVVDTDHTDRAAIDEITAIKYEAPHSYTGEDMVEIFCHGGAIVPEKILEQLFRQGAKSAGRGEFSRRALINGKIGILKAESIRELIECQTETRLRSAQLAYFGKQSESIEQLKKEIVAALSDIESRIEFDEDDDVAESKQQQISANKAALALIISRLEDELRRGDRVKALDDGIIVAIAGPANAGKSSLFNEILGYDRSIVHDRPGTTRDIVSERLSIDGVTMKLIDSAGIRETGDTVERLGMDRTRSAVAEAHAVLWVTSASEVFGVDEQKEILGAAGICGEGDNNAQGDSQKVQHVDIYDDYGKNRGKDGLVVIINKIDVYESLAKDVAIPSSKLKSYLTEKRLFCEEYGLKYVETSITQKLNQMQLFEAISATVKGVMKDVPTPAIIINERHRGIVEAVIGDLRECLDNFDREEVAAHGLRSALDRLSEFSGHVGSDEVLNGIFERFCIGK

SEQ ID NO: 88856 - protein, 498 aa, Unknown
  Obtained from environmental sample
  DOMAIN (6)...(171): Hydantoinase/oxoprolinase N-terminal region
  misc_feature (1)..(498): Xaa is any amino acid
MKRKLGIGIDTGGTYTDAVIYDFTEKKVVATAKALTTRQDLSIGILEALALLPEDTLKQAKIVSLSTTLATNACVEGRSGRAKLIFLGGDEKVINELGQQYGLPQADEIYIQECFSAFSGEVKKEPDWDLFEKNISGQFNDLDGAGIVEIYAVKNSAVLEKKAKEIFQRKFSIPVVCGHELFSDLNCLQRASTTLLNAGLFPVIKEFLDAIKKSVLERQINAESVIVRSDGSLMSDALARLRPVETLLSGPAASISGGTLLSGKKDCIIIDMGGTTTDIALVKDQFPVMADDGISVGKWKTFVRGFATRTFGLGGDSAVHYNDARLSRERLFLEEYRVVPLCITGSKNPQIIENLRNLADSHTNHSYYLHEYFLLNTGIRDSARYTDNEKRFCAALERGPLSLTEAANVMGTDIYNFSFGRLLTERVIQASGFTPTDAMHIKNDFSSYSREASFQAARHIAFNLGISVDELCDNVYDEVKRTLYVHISRILLEYRDRH

SEQ ID NO: 88857 - protein, 290 aa, Unknown
  Obtained from environmental sample
  misc_feature (1)..(290): Xaa is any amino acid
MSNSRKFKERRDGLKVRFSIGAKLITIISIIVLISLGSITALVSWLVREDLTISAEENNFEANRRAAAETEQTLEKMRLLSLSFSRTAALAEHCGLIQEEAGYFFTQNPQIAALFYTTASSAEWSDRAFVNERFFLSRGIDASLADTFFDNSKKTRENAGMGQTILINASPLFNKAQGSTYLSAMFFPIQEGSGCVLFSSENINESFGIGVNKSYLINADGDIIADADIERIKSHATLGEQEIIKQILDSPDRNKQMLVELDKVRHYLAYTRLNTAGSVVITTIEYDKVL

SEQ ID NO: 88858 - protein, 751 aa, Unknown
  Obtained from environmental sample
  DOMAIN (253)...(361): Miro-like protein
  misc_feature (1)..(751): Xaa is any amino acid
GKEKKPAQEPVENAKGASFQLPQRPAAAAGRVGGKLVGGKTPSSHHGRQGQPRGNRTEAGAPGGRGGFGQRQSGAGQPQRAGGFQQRQGAGGNKQFGGGFNRGGQGGNRGGFGGGAAPAGPIPEGKGPAKRKFITKKASYNRKEKELEMEEKLLQTKKKITHIANPVPKSIDIMEVISVSELARKMNLKASDLITKLMSMGQMVTINQQIDADTATILAAEFGADVKIVSLYDETVIETTSDDNAALLPRPPVVTVMGHVDHGKTKLLDAIRKSDVVSGEFGGITQHIGAYMVETPHGALTFLDTPGHEAFTRMRARGAQITDIVVLVVAADDGVMPQTIEAINHAKDAKVPIIVAVNKIDKPEANPDRVKSQLSELGLMPEDWGGQTIFVELSALQKTGIDKLIESILLEAELLDLRANFQCSAEGKILESKVDHGRGVVATVMVERGTLAIGDAYVAGIWSGKVRAIFNDKGEKINKATPSMPVEVLGFDGIPNAGDPFQVVDDDKVAREFSSKRHELRRFEDAKILKKVTMDNLHDMITDGTIQELKVIIKADVQGSAEALKSSLEKLSTKEIRLHVIQALPGPVNEGDVDLAIASKAIIISFNVRPLPKAKILAEQEKVDIRKYNIIYRAVDEIRLAMEGMLKPDTKEEVIGTVEVRDTFKVPKIGTIAGCYVQTGIVKRSCSINVIRDQVVIHHGKIASLKRFKDDAREVAAGYECGIGLEGFDDIHVGDMFEAIETVEIARKLSS

SEQ ID NO: 88859 - protein, 333 aa, Unknown
  Obtained from environmental sample
  DOMAIN (1)...(132): 3'-5' exonuclease
  misc_feature (1)..(333): Xaa is any amino acid
ALAPHGESKCTFLDPDKVRALLSPLLADGEMTIIAHNAKFDYKVSRGWGIDRWQCKIWDTMVAAWLVNPERGAYSLDSLVSYTFDCTPIRYNDIVPKGNTFNSVDLETATRYSGEDADFCIRLKHFLEPIMKKTESLALFETMEMPLLPVLAEMEGEGIKIEPKVLKDYSKELAVELDHIQAETWKTVGHEFNLSSTKQLQEVLFVERKLTPTKKTKTGFSTDAAAMEDLARQDPVPALILRHRTLSKLLSTYVDTLGDMADSEGRVHTNFVQTGTATGRLSSREPNLQNIPVRAEEGRRIREAFIAKPGSLLISADYSQIELVVLAHLSEDK

SEQ ID NO: 88860 - protein, 137 aa, Unknown
  Obtained from environmental sample
  DOMAIN (1)...(62): RuvA N terminal domain
  misc_feature (1)..(137): Xaa is any amino acid
MFEFFKGKLFFSDTTAAVIDVNGVGYKLGISLNTSLALPKINEDVFLFAYFHVTENSQGLYGFISKEEREVFLKLIDISGIGPKVALGILSGISVEQIINAVENEDVSTFTSVSGVGKKTAERLILELTGKLTQIMP

SEQ ID NO: 88861 - protein, 287 aa, Unknown
  Obtained from environmental sample
  DOMAIN (1)...(221): Amino acid kinase family
  misc_feature (1)..(287): Xaa is any amino acid
GSKIIAPQENDAHIARISSLAENICALINGGIKVILVSSGAVANGRAVLGLSQKPKTISLKQACAGVGQIEIMNLYRTQFDKRGKNIGQILLSWDDLRNKERYLNLRNTLFTMLENGIVPIINENDSVCVDEIKIGDNDTLAGQIALLSDADLFVALSDINGLYTDNPKTNPAAKHIAVFSFDETVNAGAAGSDVGTGGMATKLRAAETVCKAGITAVVGDGYNNDLLSVINDCTLGTLFCPQRKKMNSRHRFIAFTGDIVGAIHVDKGAMDAVISGKSLLPAGILE

SEQ ID NO: 88862 - protein, 243 aa, Unknown
  Obtained from environmental sample
  misc_feature (1)..(243): Xaa is any amino acid
ESAARNRLSKNRRLKKRLSKNRVAKKPAAKKPVVKTTATKQAAVKKPAEKKVIDAPDTNVRYRNLFDAFEQGKLPFANGYIVSSFFSDKTAYSIFEIVSYAGVKEIFMTETGLQFVTGGKKLYVLVENDTYDKKFIEPVSRAQDESIPKRFSELETIIAHNQTRIMVAKEPNELYGSFTIIKPTSINFSIVFYQLTDVYSSLATFFEETLNRQRKVPQIDAKKAAQLISTILQKTMGPQGEFG

SEQ ID NO: 88863 - protein, 496 aa, Unknown
  Obtained from environmental sample
  misc_feature (1)..(496): Xaa is any amino acid
MLDTSPPVIEILSHKAGDILNGNVSIKGRATDPNGIRSVEISEDGKNYDMLDLLNARNLLGFIKSQRRSDVFDFEIPIKINKAMPSGPKVYHVRAIDTTGAVTIKQYMYVIRNDAAAEGSKLIVNSPFDGETVTGNFDLSGIAPGANTVHWRFLGPKMDSIAKGDPGRAAMEAARAFMSNPNVPFSEAKAGRNFSVPVDFASLSDGEYDCEVYVKFGGGAQSETVSHLVKVSKAAPVTRLLSPPISRYSSHVILVRGFSGDANGIEKVSVSMDRGLTWQDVTLRDDGNWDLPLNTAIYTDRVYSALITAEDIYGITSFATAMINIDNTPPAVFITSPLSGDYVGADMPVIGRIADNIELKSLNFQVISVVDPSNRLALDIEPRPVIFETFNLSTFKAGEYILRVVAKDLADNETVISRKVFYDPLDIDAQVAIYSPLPGEEHTGPVYVAGIVTGTVLPEKIQLMLDGNEFQELPLDRFGVFRYDISEEELATYGQH

SEQ ID NO: 88864 - protein, 236 aa, Unknown
  Obtained from environmental sample
  misc_feature (1)..(236): Xaa is any amino acid
MPWLDYTVGKSGYTYLAHESMVTLFNGSEIWIGGFGDREQADKILGHEYNTIYFNEISQLSYAAVTTAYSRLAMRIQGCRNLFYYDCNPGSPLHWAYKIFVLKRQFLSGEPLEKPELYQSMLLNPEDNKDNLPEDYIADILDVLPEKQKARFRDGLWVKAEGVIYDRFDETMIVNATDLPKEFDRLAAGQDFGLNITFVKIGWVGDAIYVIGDYGAFNMTTQSFNEELSARGCLRA

SEQ ID NO: 88865 - protein, 323 aa, Unknown
  Obtained from environmental sample
  misc_feature (1)..(323): Xaa is any amino acid
LDYSELTDLGNIMNLKIARPLIHASYRIGSFSKIEALFVPTFEPLRFAEEGRWVPAQMKPLYQMNDQLKEAGKIYDIELPEISVNVPDISTVKYAQAGTRFTTTIGPADIGLQYYYGYLTRPAVTVTFTDTVINIPSIPITLPPIPLPTAINFDYNPYHQIGVDWAQVFFGFNVRAEFAANITYDFNGDDSSVYNPSLLWSLGFDRDLVWGINLNFQCNESIRLMDSKIGSNAMLDIEADTDMTSTQIIAALSKKFFRDELEARLAVLYGVEDGDFLFIPSFVWTKDALSVELSCGTFGGNKDGQFGQYSDNSFVKAALKYSF

SEQ ID NO: 88866 - protein, 176 aa, Unknown
  Obtained from environmental sample
  DOMAIN (7)...(147): ABC transporter
  misc_feature (1)..(176): Xaa is any amino acid
YAQAEHLRAICLKVGLVFQNFNLFPHFSVMRNITEAQIHVLKRDKAEAENRALALLAKMGLSDKAKNYPCELSGGQQQRVSIARALALDPQVLFFDEPTSALDPELTSDILRAIRALAEEKMTMVIVTHEIPFAREVADRLLFMDGGVFVEERSAAEVIDNPKQERTKAFLSKLER

SEQ ID NO: 88867 - protein, 479 aa, Unknown
  Obtained from environmental sample
  DOMAIN (351)...(447): Nucleoside recognition
  misc_feature (1)..(479): Xaa is any amino acid
MIFALAGNQNCGKTTLFNQLTGSNQHVGNFPGVTVDQKSGEIIGYKDVSIVDLPGIYSLSPYTSEEIITRDFLLKQKPDGIINIIDATNIERNLYLTMQLIELQIPMVLALNMMDEVQANNGSIDIHQMREVLGIPVIPISAVKKSGLAELAEQAVETVRNQKIPERIDFCSGAVHRAIHATIHLIEDHAQRQGIPMRFAATRLVEGDEQMLKILSLDKNEAETIEHTVKEMETEMETDREAALADMRYQFIEDICKKCVIKAHESREYRRSVSLDSILTHKFFAFPAFLGIMLLVFALTFGVIGNRLSDLLESGVDFVSGIVDNALTAYGINPVVQSLLIHGIFAGVGAVLSFVPIIVVLFFFLSLLEDSGYMARVAFVMDKPLRKIGLSGRSFVPMLMGFGCSVPAIMATRTLASERDKKMTILLTPFMSCSAEVPIYALFAAAFFPGHSTLVMSSLYLLGILFGVISGLIMEKTRF

SEQ ID NO: 88868 - protein, 661 aa, Unknown
  Obtained from environmental sample
  DOMAIN (291)...(434): ATPase family associated with various cellular activities (AAA)
  misc_feature (1)..(661): Xaa is any amino acid
MVRVEPIRTIGLSDPLSPEDLGLMRSVQKSFSQYAEYSGRIGPDTLTAVEKAEDPERLANLVCNAINVKSEKKIELLGYGDTRERFLSILEMLEKENEIYGIQKNISGKVRRRMDKRHREYILNEQLREINKELGKDKIEDEFAILEKRIMEKNPPKEVREKTEKEIKRLRKLQPLSPEAAVLRGYLEWIADLPWSNFTTDSVDLAEAEKILDEDHFGMKKAKDRIIEFIAVRQLLADEINRSEALKDNALKDTILKDDTIKDDTLKDTPKNEPAKNDAKTLVPSSVKGPILCFVGPPGTGKTSLGKSVARALGRNFVRISLGGVRDEAEIRGHRKTYVGALPGKIIQSMCKAGTTNPVFLLDEIDKLSSDFRGDPASALLEVLDPEQNSTFVDHYLEVQYDLSKVMFMTTANSLHTIPYPLLDRMEIIEVPGYGENEKLTIAKQFLVPKELKENGLSSAKIKFRDDALKSIIRHWTMESGVRNLERETARCIRRIARGAVNMGYGKERPVSSFKKTVTPAVIEKLLGRKKYKRDVVFSEARIGVTYGLAWTETGGTILPVETIRYNGNGELLITGNLGDVMKESARIALSYLHSTCDKYNFSVKDLSKSNFHIHVPEGAIPKDGPSAGITLASSLLSTLCKTPPRPCIAMTGELTLTGRV

SEQ ID NO: 88869 - protein, 288 aa, Unknown
  Obtained from environmental sample
  DOMAIN (62)...(227): tRNA synthetase class II core domain (G, H, P, S and T)
  misc_feature (1)..(288): Xaa is any amino acid
SDQLPEFMEPGFADKTGLEAHLKFLEEAKKRDHRRLGQEMDLYHIEDHSPGMVFWHPHGAVLVNVLKDFVRKEITKRGYKEVITPEIVDKSLWIKSGHADKYDSNMFKTLAGEKDMAVKPMNCPCHIEIFNQGLKSWRDLPLRFAEFGKCHRNEPAGTMHGLMRVRGFVQDDAHIFCTEEQITQEVSSFCTLVKDLYKVFGFEKITVKFSTRPELRIGSDELWDKAENSLEEATKLAGLEYKLNPGEGAFYGPKLEFVLKDSLRRDWQCGTIQVDFNMPGRLGAEYVG

SEQ ID NO: 88870 - protein, 348 aa, Unknown
  Obtained from environmental sample
  DOMAIN (25)...(335): Glycosyl hydrolase family 53
  misc_feature (1)..(348): Xaa is any amino acid
MNKTHFALMLCLATSIVCAQNEPYVLGADISWMQQRENERVKYYRNGQEGDLLSILKEVGFNYIRLRIFVDPKATDASKVDNSGWNPYPYSTAGYCGLDSTIKVAKRVKAAGMRFLLDFHYSDTWADPGKQYKPVSWQSLNTVALLSDKVRSYTKESLQKFKDAGALPDMVQVGNEVVHGMIHPEGKNNGDAFARLVLAGINGVKDVDPNIKIMMHTINSENPLGWLTTLKSNLNKVEANAANKIDVIGLSYYPKWHGNVDSLKRVMTAISKNHNIKIAVAEYADFHREVNDAVYTLPENEGLGTFAWEPQEFSGDDSKPLFDYTNGARRSNARLELYPQMVIDYGIN

SEQ ID NO: 88871 - protein, 298 aa, Unknown
  Obtained from environmental sample
  DOMAIN (254)...(298): His Kinase A (phosphoacceptor) domain
  misc_feature (1)..(298): Xaa is any amino acid
MILHGDNAEKIREYYNDISNYLSLNKQSYMSFNGFLGYFETLPEGHVFMESFNWDRPTDFDPTERAWFLDAVAAKGGIAETLMYHDIIYGDAMLIYSMCLFDNLGKRLGVVGLRVQIDTVKKYIVNTIMANNEYGILLGKDMVILAHPDENLVGRNASEPDIHFSIFVNELEKGIEIYERPVTTFRGEHALANFRILPNGWVLGIISPKEPYYKSVINIAIILVILGTVLSSILIFVLIRVDAAREKSDLANIHKSSFLANMSHEIRTPMNAIIGMTDLLAYEQLNKRQMGFVHDIKL

SEQ ID NO: 88872 - protein, 162 aa, Unknown
  Obtained from environmental sample
  misc_feature (1)..(162): Xaa is any amino acid
MLRSQKILQRPEWSINRAYFKSMGYTDDDLARPMIGVANAWSTTLPGHFNLNQVSKAVQDGIRMAGGTPVEFGVIGACDGIAEGHEGMRYILPTRDVIAHSIELMTHAHQYDAIVLLGSCDKIVPGMLMAAARMDLPAILVNGGPMQGGPFIDNRKSDSTSV

SEQ ID NO: 88873 - protein, 1177 aa, Unknown
  Obtained from environmental sample
  DOMAIN (272)...(529): BadF/BadG/BcrA/BcrD ATPase family
  misc_feature (1)..(1177): Xaa is any amino acid
LIHAPFIQEVVANSIAVRNFYPQARVAVELGGQDAKIVFFYHDSVTNRLAVGDMRMNGSCAGGTGAFIDEIAALLRTPVEKFDGLAANGTQVYDISGRCGVFAKTDIQPLLNQGAIIEDIALSTFHAIAKQTIGGLAQGLEICPPVVFEGGPLTFNPTLIRVFAQRLGLKEADIILPQKAELFIAYGTALAINENFLEQEGGHDHHFSPEAALTSLAMYREIVLGNSGLQNIDYFSNQTEKEHFYARHKMQTINHDIASHGIQRGDTLRVYLGIDAGSTTTKFVLIDEDENVIDSFYNPNKGEPLKVIKQALLDMYEKYQAAGVNLEIIALGTTGYGELLFDKALGADYHTVETVAHAAAAQKYIPDVSFILDIGGQDMKAIGISNGIVTNITVNEACSSGCGSFLETFAETLHIPVNKIAETAFSARSPAKLGSRCTVFMNSTIITEQKNGKQADDIMAGLCRAIVENVFTKVVRIANPARLGNKIVVQGGTLRNDAVLRAFEQYLGKFVVRSPFPGEMGAIGIALLTKREISENGYSSPHGPGDRTRFIGFEELKTFDYKQEANLLCPFCANNCNRTLLRFSNGQTWVIGNRCERGEVVGDPNDPAVREQVKNITGLMNAAPDMIKVRNELLFKDYKYTQLLPSKDITIGLPRVLDFWRSMPFWKVFWSALGYKIKISRKSSRQLYEKGLQYIASDTVCFPAKLVHGHIQDLIESKVDRIFFPQINRLPADNPEKTGTFTCPVLKGYPLSIRCSDNPEEKHSIPLDSPVCHWFSDRDMRFQLCRYMLETFNIPKKTTLAAIKQAEKAMTEFYQLMLEKGKKVLEDVEKSGKIAVVIAGRYYQYDEQINHNLSHYFTSMGIPVLTLDSLPNLGKIPLAKSRIEITNDNHARLLGGAIAAAEHPSLEYVDIFSFGCGHDAVYSDEIIRVMDEISSKAPLILKMDESEIAGPLRIRVRSFIETVMIRRKREAHNAKPLGDPYPVKYTKKEPKKVLLIPNVSRAFCMILSGALANEGFLVEPLPMGGIEAIAMGKKYVHNDMCLPAQLVIGESILALKSGKYDPDKTMIGMAKVLCDCRLSNYMPLARKALDEAGFPQVPIITTDIRDSKNAHPGRRFTEITYMKGLWCMIQTDALEFLRRRIRPYELQKGETDKVVENAFLEIYEGLTKARHSRIERC

SEQ ID NO: 88874 - protein, 400 aa, Unknown
  Obtained from environmental sample
  misc_feature (1)..(400): Xaa is any amino acid
MIRRKIKAHNVKPLGDPYPVKFTKREPMRTLLVPNSSRAFCLVLSGALANEGVLVEPLPMGGLEAIAMGKKYVHNDMCLPAQLVIGEGILALKSGKYDPDKTMIGMAKVLCDCRLSNYMPLARKALDEAGFPQVPIFSTDIKDSKNAHPGKRFTEITYIKGIWGMVQTDALEFLRRRIRPYELQKGETDRVVENAFVEIYEGLAKRGIPGSNVAFKKAMNDLCAVRYDRSKLRDPVFIQGEYYLTFHPGSNFEIENYLEKNGMEVILPRMNTVYRHLFLQHSLAEMKEFNVRLPLYDNLFARIGNKIMDIAEKYVDKIASRHPLYEPEISLEEAAKYSDDIIHHSILSGESFLIAAHTLHHAEKGIRSFIILQPFGCLPNHICGRGVIKRIKELHPDIQI

SEQ ID NO: 88875 - protein, 56 aa, Unknown
  Obtained from environmental sample
  misc_feature (1)..(56): Xaa is any amino acid
MQEKGDFTGLLAVSEALKAYPFGDVWDAFCEQQNVPARDEWLPDVRLYDEKTRART

SEQ ID NO: 88876 - protein, 440 aa, Unknown
  Obtained from environmental sample
  misc_feature (1)..(440): Xaa is any amino acid
NNVIQGNTENKFEITDNNFDRVYLNWLEKVKPSLAVNWEEEKKNGLYDAHFYLADLLSIENIAIINKLLIILQNDYYLLTKVMKKSHALIAEDKYYFKDKQKAYYEFWSKYKRPPLPQFWDNILLRQDLLVPQDIRERKGSFFTPQIWVELSQKYLMDVFGDNWQDEYYVWDCCAGTGNLLVGINRKIENVFASTIDEADVKVIYDRIENGAKLLKKNVFKFDFLNDDFKKLPKALKEIIDDPEKRKKLIVYINPPYAEAGNRETIIGSGSNKSKVSASRMYDDFKGKVGNAILELSAQFMLRIYRDIPTSKLATFSSLKYINSSNFIKFRDYFHAEHKKGFVCRADTFDNVSGSFPISFFIWDLDSKRKITSVKSDVYEIDKDGKNCQKIGIKSFYSAQKGKLSIDWLRNYFDNDGERIAYLRLHRNDIQNKNAVFITS

SEQ ID NO: 88877 - protein, 249 aa, Unknown
  Obtained from environmental sample
  misc_feature (1)..(249): Xaa is any amino acid
MSDIYQVKEKMHKMRAKLYPSYLPGTEGKYIARTANEASVSIEDICASMKNRGGFDGSYEEAVKTMRHFFMEMMYQLADGFSANLDYFTVHPNIGGTFKNPTEAHNHKDHPIDFRFQALAKLRALTKDIDVELEGIAETSAYIDLFIDQENEFINTQYAPENMFAIHGHKIKVVGAIDAGVYFVPVDAPQDAVQAERIAENTPSRITGIAPSTGYPKNRIEIHTWYSGSGNTHLKASRVITSPFVLEEV

SEQ ID NO: 88878 - protein, 123 aa, Unknown
  Obtained from environmental sample
  misc_feature (1)..(123): Xaa is any amino acid
MAYQFIQANKCRYAVKEMAGLLGVSRTAYYQWARNGVSQRRETADDELLRLIREIVSKHCRRYGSPRVRRELRDVYGKRVSVKRVARLMREKGLNARRRRTFIKTTDSKHALEVCENILNREF

SEQ ID NO: 88879 - protein, 89 aa, Unknown
  Obtained from environmental sample
  DOMAIN (3)...(73): ACT domain
  misc_feature (1)..(89): Xaa is any amino acid
MNAIITVVGSDKVGIIARVSAFLAERNINILDISQTVLSGNFVMMMVVDLSSGTKTLEVIKNELAELGDSFNVSISMMHEKVFSAMHRV

SEQ ID NO: 88880 - protein, 279 aa, Unknown
  Obtained from environmental sample
  DOMAIN (1)...(268): Domain of unknown function DUF20
  misc_feature (1)..(279): Xaa is any amino acid
MASIFFRQIMDLGRYARDTLNQRPEYLHDLFEKISAFIREISAGQIKITADDINNQLKAIISNELLGNKQMVFLSGNIVRIIGTLAINTLVMVFSLFFFYADGPYLSRLLLRAIPIRTEYISALTRKFLDITRNLFFGYIIVALLQAVVAFIIFTIFEINGSLVLAVVTFLFVFIPVLGATVVYIPLAILKIASGNIAGGVIFFIVSAVFISGIDNVLRPIFLRDRIQLHPLIIFFAILGGLVVFGFNGFILGPVLVILFLTVLDLFLTEHKIGMHDQA

SEQ ID NO: 88881 - protein, 677 aa, Unknown
  Obtained from environmental sample
  DOMAIN (12)...(407): TolA protein
  misc_feature (1)..(677): Xaa is any amino acid
FDLSKGLLKAADEKNKHERRIFIIGLIGLFLILSLGGGVIYLLWERSVRGGHSNTAVLDGQSLLLLRELLSSGDYQQALDTLDRLLAAEPNNSELLRLREQLLREQQLAEEQQSSGAVLAAQQRTENDRQQQNTEAQLADQQRAETEKQQREANAAKQRAADAEAKRVAQQRAENEKLQREAEAAIRKAEEEALARAARELQERRQAVNDLVSQGRALLEKNDLAGAERAFAEARSRMPSDNKFEAQKLAEMAEAWYDVYARNPNSPAAPEALSKASALAREAIPKDPSLALPHSTLGKISRDQQDWDPAIAEFREATRLDPSNYIYFYELGRSYFSAQRYVDARGGFENTVRLNPRFEPGWYNLGGTLRILNRYDDALAAYRRAIAIKNDYAAAHRELGRILVLKKDYKGAIESFTNALKYNPGDLASLRELGAAQNEAGNYTAAEESFARALQAAPSDGQTNYNMSVVKLALKKNNEALSYARHAVESNPSSAVYTYTLGLALEATGNNDAAIAAYQKSASLDKKYLRPRINLGNLYLSHNNVNEGIRHLSEAYAIEPSNFEVNNNLGAVYAKMENWPKSVEHYERALSVDSKNPTVHLNLARAYTSAGELAKAQNSYQAVLRLNPDNWDALYELGKTYVSMGRPDEAKKLLRDLLQRNAAYGARADAERILAGL

SEQ ID NO: 88882 - protein, 446 aa, Unknown
  Obtained from environmental sample
  DOMAIN (3)...(358): AMP-binding enzyme
  misc_feature (1)..(446): Xaa is any amino acid
MGIDLPVLVCVSPNNDGGQPTAGVVGYRQFGADAADQALPPLDSISPNDPASIVFTSGTTGFAKGVMLSHKNIIANASAAVRILRPDYRDKFITVLPLHHTYPTTCSFMAPIITGIPTVITEKIVGKVVVDDIRDSGVTFLIAVPLLYDKVMTAIDAGYKKLPGFIRGPLNILRKIALAEAKKGRPEFGRKVFRFIRKKAGLHSVTIMVAGGGPLDPATADFFDSFGFNIVHGYGMSENSPLISVNTPRYKRNASVGLPVSYTEVKIINTTPDGIGEIAVKSPSVMLGYFENDEATKETINEDGYLLTGDLGYRDEDGFIYIKGRKKSLIVTSGGKNIYPEEIEIQFNNSRVIGEALVIGRRESAHGGEQIIAVTVPNYEMIKEDHPGREKDEIFIRNLIKKAVDEANRNLPSYKKINNFILRKEPFEKNAQQKIRRFMYKEYENP

SEQ ID NO: 88883 - protein, 281 aa, Unknown
  Obtained from environmental sample
  misc_feature (1)..(281): Xaa is any amino acid
VPSEFHLRGQHPKPLGQPGAPFTNITLDWICPLDLKDKKAVVGGREMEFTYGDCQEEMNRVNRFFIELMLEGDAEGRGFHYPIPTYNITSNFDWDSDNAKLLFEMTSRYGTPYFQNFINSDLNPSDVRSMCCRLQLDKRELRKRGGGLFGSDELTGSIGVVTINLPRIGYLAKDEEDFYRRLDRLMILARESLRIKRKIITRLLEGGLFPYTRRYLKNLDNHFNTIGLVGMNECLLNFLGEDVTIATQSGRNFALGVLGFMRKRLSDFQEETGELFNLEAT

SEQ ID NO: 88884 - protein, 320 aa, Unknown
  Obtained from environmental sample
  DOMAIN (74)...(320): eubacterial secY protein
  misc_feature (1)..(320): Xaa is any amino acid
MANPIIGMFRIKELRERILFTIGMLLVFRVGAVFPIPGINVRALSNYFLEQANSGNPIVDYLDFFAGGAFSNFSVFMLGIMPYISMSIIMQLLLIVFPSLKKISQEDGGRKKIQKWQRYGTVVVCLIQSYAVTQYAQAISRSVNNLLFIGMGAFTLIAMLTVTTGTMFLMWMGEQITKRGLGNGISLLIFAGIVARLPHAVYELIDMMRKGNLNPVFVVIVFVMFIAVVALVVLEQQGQRKIPVNYAKRVVGRKMYGAQNTYIPFKINPSGVIPVIFASSILMFPLQIAQTVGGNVPWLAKGGANVKPKRNALQYIVCAF

SEQ ID NO: 88885 - protein, 390 aa, Unknown
  Obtained from environmental sample
  DOMAIN (256)...(324): PET112 family, C terminal region
  misc_feature (1)..(390): Xaa is any amino acid
MEYEMVIGLEVHAQLLTKTKLFCGCTTPFGDPSNTHGCPVCAGLPGALPALNRSAVEMAVRTGLSLGCAINTKSIFARKHYFYPDLPKGYQISQLDIPICAAGTLPIVVDGRESSIRVNRVHMEEDAGKLVHDQDTDSLFDVNRCGSPLIEIVSEPDMRSPQEAYAYLMGLKQILEYLGVCDCNMEEGSLRCDANISLRPKGESKLGTKTEIKNMNSFRNLEKALEYEAKRQEEVLRSGGHVVQQTFLWNPNENRSVPMRTKEDADDYRYFPDPDLTPLVVEAAWVDKMRETLPELPSPRRRRFEDGYKITPYAAEVLTGSRPLADYFERCVSGCDDAKSAANWVMTDIMRMMNDAKIESPFDLKTKPERLGELIKLINNRRRLGKGRKK

SEQ ID NO: 88886 - protein, 322 aa, Unknown
  Obtained from environmental sample
  misc_feature (1)..(322): Xaa is any amino acid
MVGYISADKKTILIKRDEYGDDKAFVKTETISRTEPPEYSDDGSELSGGECREEGSPITTEVVFSETQHKDYFVNAHGDRCYLFYLVADGNKIEICGNVSDDIKKGDKVSVTYQVETCRQETEGVYYYDSNRLVSVNKIDGSATTFTDPRDKKTYKTVKMGEQVWMAENLNFEAKEGSMCYDNKPANCQKYGRLYDWETAMEACPNGWHLPNDAEWTTLTDYVGGASTAGTKLKATSGWNFNGNGTDNYGFAALPGGDGSGGNFYFVGSDGHWWSATEEKWSATDSSASYAYSRDMRHNVNRVNRVISSKSNFLYSVRCLKD

SEQ ID NO: 88887 - protein, 369 aa, Unknown
  Obtained from environmental sample
  DOMAIN (1)...(153): Anticodon-binding domain
  misc_feature (1)..(369): Xaa is any amino acid
SETQTLIEKTGGALDVYDLSRAVDPILRFIDLLNNWYIRRSRRRFWRPIASDGRGTDSDKLEAYGVLYEALKTLITVASPFMPFTTDAIWQNLRLQNDPESVHLTDYPAPNEKRRDSALEFRMACVMSAVSIGRSLRSQYNIKMRQPLGKAEVVTRNEDEKNALIGMADIIREELNVKEVVFSDKEEDLVEYEVKANFRVLGKELGKDMKSAAAKIEALKHAQIQSVIEGAPLSIDIPGEGGGTRAIVITADKLDIRRIEKANLRVLNEGTLTVGLDTEITRELSMEGDIRDLIRGIQNARKEMGLSVTDRIELCLHGTDSLKEAWDNYNETVAAETLAVKTQWAKTDGQIPIEAGDDVWQVKIVVREQ

SEQ ID NO: 88888 - protein, 146 aa, Unknown
  Obtained from environmental sample
  misc_feature (1)..(146): Xaa is any amino acid
MKNIIVKDERNYQVIAGNAISVLDALPPSIYEVYYQREAGFSLNEVEQPLNITSKLYGDVVPITDRVLSSFEKMEGNLGALFTGPKGVSKSLTVRNICNKAIKNGLPVILVKKYFSNISQFIRRSQYGLIPRSFAPAERTSIMKDE

SEQ ID NO: 88889 - protein, 156 aa, Unknown
  Obtained from environmental sample
  DOMAIN (18)...(123): Transposase IS200 like
  misc_feature (1)..(156): Xaa is any amino acid
MSKVIRKEHNVSVIMYHIVCPAKYRRAVINAEVDKKLREICEGIEARYEIKFLEIGAEKDHVHFLVQSVPTYSPEQIVRTIKSITARKIFEMCPEVKKLLWGGEFWTRGYYVRTVGEHGDEKVIQEYVKNQGRNPDDYQKIHEGKQLELFTYQNKA

SEQ ID NO: 88890 - protein, 147 aa, Unknown
  Obtained from environmental sample
  misc_feature (1)..(147): Xaa is any amino acid
MRIKTFITLAVFTGLAVSITACILTLDDIETLEENAKEANNYEKEVPETKAEGAEVNAPTLENATHNSITVKPVNAPATGQTVEYAIKTSDTPPLEEDWQEAATFSGLLAGKEYYIFARSASNDYYYAGKASGSLAVTTRQPVHRTR

SEQ ID NO: 88891 - protein, 83 aa, Unknown
  Obtained from environmental sample
  misc_feature (1)..(83): Xaa is any amino acid
TIKDIVRKDVPIYYRMLYTGVAVIEMSTAPADYRIDFSIETKPTGQREIIVSFLDDLDYPLVPVIKELKKYIETMHQNGALPD

SEQ ID NO: 88892 - protein, 72 aa, Unknown
  Obtained from environmental sample
  misc_feature (1)..(72): Xaa is any amino acid
MNLLAIDAATQKFSVALAVGGHTFVVEADVGMRHSELIMDSVDMLLKKVALKTEDLSGVVCMGGPGSFTGLR

SEQ ID NO: 88893 - protein, 449 aa, Unknown
  Obtained from environmental sample
  DOMAIN (90)...(324): Glycosyl hydrolase family 3 C terminal domain
  misc_feature (1)..(449): Xaa is any amino acid
AAPEESAALALNAGCDLNCGCTYPHLTTSFKKGLVTEEAINAALRRVLRTRFKLGMFDPPSRSKYGKLGRKVINCEKHRKLALKAAEKSIVLLKNDNNLLPLDSNAKKITVVGPGAANAHTLFGNYYGVSSRFVTILEGLGEKIKDKYGINLEYRQGCLMYNDIHSSNAEFGIANVPDLIIAVMGLDGAIEGEEGDAIASDSNGDRAYIELPPWQLKFLQKVRAAGKAAGKPMILVLTGGSPIAIPEDIADAVIFAWYPGELGGKAVADVIFGDTVPSGKLPITFPASTAQLPPYDDYSMKGRTYRYMREKPLYPFGFGLSYTGFRFDSLTLSAPSISAAATVKAKVTLSNTGKRDAENVVQIYVSKDERGADDPEFSLRAFRRVSVPAGKAITTEFALPAAAFETVNAEGDSVLLPGSYTVIAADSAPLPVAVEKGASVPVKAKITVG

SEQ ID NO: 88894 - protein, 177 aa, Unknown
  Obtained from environmental sample
  misc_feature (1)..(177): Xaa is any amino acid
FFDRICDYYVDLVDISLEYDLDGVYFGDDWGQQQGLIMGPEHWRHFIKPRMARLYERVKLKGIPVIQHSCGDNREILGDLIEIGLDCYQTFQPEIYDIREIKRLYGDKLSFWGGVSTQQILSRLNARGVQDEIVRVVKILSPNGGLIIAPTHALPYDIPPENILAMVDVFQNQDRYW

SEQ ID NO: 88895 - protein, 438 aa, Unknown
  Obtained from environmental sample
  DOMAIN (342)...(437): Anticodon binding domain
  misc_feature (1)..(438): Xaa is any amino acid
MTTLIEPKILKGFRDFLPQAEMVRRNLTERIEATFRSFGFVPIDTPALEYADILLGKGGGETEKQIYRFTDNGDRDVALRFDLTVPFARFTALHQQELNFPFKRYHIGKVWRGENTQRGRYREFTQCDFDIIGSDSPAADFEIILLIRSVLADLGFGVEIKLNHRGLFNRFLSHIGQKENSVEILRAVDKISKAGIDETAKTLAGIAGDAKGQKIIEFIGAGEGAADFEQTLNRITELSGGPSPESDRLSLLHRFMKDTGGAFTLDPAITRGLDYYTGVVFETFLTELPDIGSICSGGRYDNLAGLYTKNAISGVGSSIGLDRMIAALESLDKLPPAKGFAAVAVACVRQEDAGLYQALAARFRQAGIPCEVFTDEAAGDSKNLVKQFMLAEKKGHRWMIIPGEAPLRGPLTLRNLITRQNQENLSVEQAIIQITDIK

SEQ ID NO: 88896 - protein, 445 aa, Unknown
  Obtained from environmental sample
  DOMAIN (20)...(181): tRNA synthetase class II core domain (G, H, P, S and T)
  misc_feature (1)..(445): Xaa is any amino acid
MIEPKVLKGFRDFLPAAEMVRRNLTEKIEYSLRSFGFVPIDTPALEYADILLGKGGGETEKQIYRFTDNGGRDVALRFDLTVPFARFTALHQQEIAFPFKRYHIGKVWRGENTQRGRYREFTQCDFDIIGGDSPAADFEIILIIRNTLMNLGLSVDIKINHRGLFNRFLSHIGQLKNSVEILRAVDKISKVGMDETMKTLAAIAGEDNAQKIIEYTGAGTEKEAAVDFEQTLDRITRLSGGPSPESERLSLLRRFMRDLGDDISETFSLDPSITRGLDYYTGVVFETFLTELPEIGSICSGGRYDNLAGLYTKNAISGVGSSIGLDRMIAALESLNKLPPASGFAAAAIACVKREDSGLYQALAEQFRRAGIPCEVFTDEAAGDSKNLVKQFMLAEKKGHRWMIIPGEDPLHAHLTLRNLVTRQNKEGLSVDEIVKLIAIPPSPS

SEQ ID NO: 88897 - protein, 425 aa, Unknown
  Obtained from environmental sample
  DOMAIN (1)...(106): Seryl-tRNA synthetase N-terminal domain
  misc_feature (1)..(425): Xaa is any amino acid
MLDHKFIVENLDAVEKNIANRFMKADAREVARLYHRRTELTTCLQALQQKRNANAAAMKGKLEQEQRNALIEEGKKLKDEITLTESELGIAEKELDEEARKIPNMAHPEAPVGKEDKDNLEIKRVGEPVKFNFEPLDHVKLGQELDIIDFDSATKVSGTKFYYLKNEGVFLELGLVRYALDILQKKGFTPFITPDVARTEILEGIGFNPRGEESNVYALEDEDACLVGTAEITLGGYYSNTIIAKDKLPLRMAGLSHCFRREAGAAGQFSKGLYRVHQFTKLEMFVYCLPEESGKFHAELRSIEEEIFAGLNIPFRVVDTCTGDLGAPAYRKWDLEAWMPGRNGGEWGEVTSTSNCTDYQSRRLNIRYKDDDGKNKFVHLLNGTAIAISRAIIAILENFQIEDGSVRIPAALVPYVGFDIIRRRD

SEQ ID NO: 88898 - protein, 169 aa, Unknown
  Obtained from environmental sample
  misc_feature (1)..(169): Xaa is any amino acid
SDEITATAICAQVFEKIAREGRKFGLGLVLSSQRPSELLPTVLSQCNTFLLHRISNDRDQELINKLVPDNLRGLLRELPSLPSQRAILLGWASELPIMVHIKFLKEEHRPKSDDPDYWDVWTGKKKRKINWEEIAHDWQGAGQTKESCTKQTEKEPEIVVQKDDDDLPF

SEQ ID NO: 88899 - protein, 64 aa, Unknown
  Obtained from environmental sample
  misc_feature (1)..(64): Xaa is any amino acid
VIEERIATGRVNMVVETRGFVYCFEFKLDGTAEAALAQIDSKEYTIPWTDRGKKVFKVGVNFDF

SEQ ID NO: 88900 - protein, 460 aa, Unknown
  Obtained from environmental sample
  DOMAIN (15)...(84): HAMP domain
  misc_feature (1)..(460): Xaa is any amino acid
MNEANKTTYQADTVIIAIALGILVLSLLRDLFVSYLITSPIKKINHSIAEIQKGNIKYGIRLSHKDEIGQLSNHIGDMVDNIAEMNASIAILDNLDVMVFITNMEYKILSMNELCCKLLEVERTASLGKRCFEVICGATEPCPFCPLPDFYPVRETFPTSQWERPLMVLGDEPGTKQELWYACRSSIIKWTDGSLALFNAYTDETIMKRHMEKLCDVANAAEEASRIKSSFLANMSHEIRTPMNSIIGFSELALDDQSISVKTKDYLDKIKSASEGLLGIINDILDISKIEAGKVVLENIPFDLHEVFKICQNIITPKATAKGINLFCYSEPTLGKKLVGDPVRLRQVILNLLTNAVKFTNYGMVKVLASVVNQTEENATIHFEVKDSGIGMNDEQLAKVFEPFTQADNSTTRKYGGTGLGLTITKNFVELMGGDLKVESVIGIGSKFHFDVTFPTCDES

SEQ ID NO: 88901 - protein, 149 aa, Unknown
  Obtained from environmental sample
  DOMAIN (3)...(149): Putative transcriptional regulators (Ypuh-like)
  misc_feature (1)..(149): Xaa is any amino acid
LVGALEALLLATSEVLTLERLKELTGLGEGVLLQGLEALQERCRPPRGIRLLEAGGGWRMAIAAEYTDLAAKLVTTVRSGRLTPAQRDVLSLIAYRQPITVPEINEFRGVASSFSQVRSLLDRELIMPVGRRHVVGRPMMYATTTNFLL

SEQ ID NO: 88902 - protein, 201 aa, Unknown
  Obtained from environmental sample
  DOMAIN (1)...(201): Divergent polysaccharide deacetylase
  misc_feature (1)..(201): Xaa is any amino acid
GPFLRFPGPLTIAVLPGLPHSAETARRIRAAGKEVFLHQPMEAIGGQDPGPGAIYAGMNADEILAILNKNIAEVGPVAGINNHQGSRITMDQQAMETVLAFCRKQGICFLDSRTTAQTVVPAVARNLGIKIGERNIFIDNEQTRPSMNRFIEDGLTLAAQNGSAVMIGHTWSPELAPLLADLYQNIITQGYTLTTASALIR

SEQ ID NO: 88903 - protein, 299 aa, Unknown
  Obtained from environmental sample
  DOMAIN (1)...(142): Protein kinase domain
  misc_feature (1)..(299): Xaa is any amino acid
AGIVHRDIKPANVMITPTGAVKVMDFGIARAVADSASTMTQTQAVIGTAQYLSPEQARGETVDARSDLYSTGCLLFELLTGRPPFTGDSPVAVAYQHVGQQAPPPSQFASDVPPELDRIVAKALAKERESRYSSAAEFRTDLERFLAGQEPLAGTGAVAAGVVDATAAVTALQPPTDGNSTVAMPNALSQPNPTVAMPVGATAAMGATPATTGQQTVALGVGGQYLNPGNATQVLSPAALAGAGPGLGTGAIPATQAIPQPPGWTPVQQAPQVPPQPQITPQYTPPPPRRSKAWLGVLI

SEQ ID NO: 88904 - protein, 168 aa, Unknown
  Obtained from environmental sample
  DOMAIN (5)...(168): Glutamine amidotransferase class-I
  misc_feature (1)..(168): Xaa is any amino acid
MPRILVIDNYDSFVYTIVGYLRQLGAEVRVVRNDAVPEEIFASNALIADQDGPFDGVLVSPGPGTPAEAGASERVIRACARTRTPMLGVCLGHQALAEVYGARVSHAPELRHGKTSVLRHDGEGVFAGVPTPFQAARYHSLAVEPDSVPPELQVTAVTDTKSGIVMGL

SEQ ID NO: 88905 - protein, 67 aa, Unknown
  Obtained from environmental sample
  misc_feature (1)..(67): Xaa is any amino acid
SYGTPVAKREEVIAFGDEENDIPMFESAGFSVAPSNAKDAVKAKAGIVVGSNADDGVAIFLEEFFKL

SEQ ID NO: 88906 - protein, 83 aa, Unknown
  Obtained from environmental sample
  misc_feature (1)..(83): Xaa is any amino acid
MQAIDLHNKLHSVQNGTVLCQYSMETCEKLVALINEINDLKKERDAAILAHSYVAPEIILGVADYNGDSYQLSKNAIETPAQT

SEQ ID NO: 88907 - protein, 506 aa, Unknown
  Obtained from environmental sample
  DOMAIN (142)...(418): Penicillin binding protein transpeptidase domain
  misc_feature (1)..(506): Xaa is any amino acid
MMDAGYISRTDYEGYVKTPLNVEERADVSVAPYYMEEIRKYLENKYGENSLYSDGISVYSTIDPEIQKIVENAAYEQRIKVDRRLRLRTISRLGIPKKYDMTSDSILVHFDSIYADFTKNYLEKDTAKRIYPDSLRYRQGQIAVILIENETGAIRAMVGGKDFNESKWNRAVQTLRQPGSSFKPFVYAVAMDNGASPCDSVNDAPITIPDPLDTAKYWRPGNYSKEFKGMMTYRRALALSQNLPAIQVGMKYGLNSVVNYARKFGVKKAPLQAVPSLALGSVGATLMEMTSAYTVFPNGGTRIEPYYIEAIVGKNGEVIETNYKVEHEVLKKPAAYIMVSMLQSVNTGGTAAKVWASGFHHPSGGKTGTTNDYTDAWYIGFTKQYTMGVWIGTDDFLPMGPGHTGTEDALPVWLNSMPEIHKNLPELQFPVPQGVISRKICNYTGKIAGSYCNQFTGCLYTAASPEIEECDGKHFEQPKESNATMFSNTSTPAAPSTKSAKARQVF

SEQ ID NO: 88908 - protein, 104 aa, Unknown
  Obtained from environmental sample
  misc_feature (1)..(104): Xaa is any amino acid
MAEFDTNYKRTNGQYFTQNNPFENPAFMEWSKTCDSRNKIILEPFAGANNLIKMLKNMKLCRGFVSYDTEPKNKNVLYKDTLIDFPKGYNVCITNPPYLAENSA

SEQ ID NO: 88909 - protein, 195 aa, Unknown
  Obtained from environmental sample
  DOMAIN (5)...(195): Ham1 family
  misc_feature (1)..(195): Xaa is any amino acid
MPQAVVIATGNAGKVSEFCAILKDSAFSFLASKDIGFLKEIEENADTFKGNAEIKARAVFEYTSSKDEYKDHWVIADDSGLEVESLEGRPGVFSARYAGENATAADRYTKLLKEMEGKTNRNARFVCCLCLIVPESEPEFFEGECKGKILTEPQGTSGFGYDPVFIPDGYNQSFGCMSEEEKNILSHRGRAIKNM

SEQ ID NO: 88910 - protein, 492 aa, Unknown
  Obtained from environmental sample
  DOMAIN (2)...(356): RNA polymerase beta subunit
  misc_feature (1)..(492): Xaa is any amino acid
MSLLVHEVDGESKKFKEKFSNEVYIGEIPLMTERGTFVINGAERVIVSQLHRSPGITFDEVVHPNGKKLLTARIIPQRGSWVEILLDVDDVLTVNIDRRKKMPATVLLRAFGYSSNEEILALFYDTVRVKVEAGNEQLLGSVCAKTVPNEETGEILVDAAETLTADKIKKLVENGVRNIEILKGSMLSDENKIIMETLKKDETKCEEDALFLIYATMRLGDPPNVETARNLVQRAFFDDKRYDLGSVGRYRINTRLGVVPPEGVTTLTPEDIVASLKYMIGLNSGVGFIDDIDHLGNRRVRSVGELLAAQFAVGLTRMVRTAKERLSLGGTETVTPQDVINARTVSTVVQAFFGSSQLSQFLDQTNPLSELTHKRRVSALGPGGLTRERAGFEVRDVHHTHYGRLCPIETPEGPNIGLIASLSTFARVNEFGFIETPYQKIENGVATGKIEYLTADQEDNYIIAQANTPTDKSGKITEKMLFARYRGDFPVV

SEQ ID NO: 88911 - protein, 272 aa, Unknown
  Obtained from environmental sample
  DOMAIN (1)...(121): Diaminopimelate epimerase
  misc_feature (1)..(272): Xaa is any amino acid
MHGCGNDYIYINCFDVEINLSQSQVVQLSNRHTGIGGDGVVLILRSKVADAKMRMFNLDGSEGNMCGNAIRCVAKYLYDNKIVQKKEMKIETKSGIKELYLFIKNEQVYSVKVNMGRAELAPEKIPVKLEGESIISKPITVGGKEYSITCVSMGNPHAVNFVENVASLDLPKIGPMFENDALFPEKVNTEFVELAGRNNLKMRVWERGSGETQACGTGACAVAVAAVLNGHCDKDADIKVQLPGGELIIRYTDEAIFMTGNCEKVFEGVVEV

SEQ ID NO: 88912 - protein, 366 aa, Unknown
  Obtained from environmental sample
  DOMAIN (314)...(340): The GLUG motif
  misc_feature (1)..(366): Xaa is any amino acid
MKPMNKIAISLTLLALLIGCYKANKIPATEPAQVIAEQQQEIAVQQAEIAVQKEEPVKEPYIISTKEHLENFSRLVNEGNDFRNQVVKLEANIMLNDTANWKNWDKKPPAESWVPIGTKEIEFRGTFNGNGYVISGIYINSINNYQGFFGYLDSCTGIKNLGIVASYIKGGRSIGGLAGNNGDILRKENSVESYGCNISNNYFRGTVIGEESVGGLIGQNYGIVTNSYSSGTVKGKGYIGGLVGFNDGTINSSYSSNMVTGVYDVGGLAGRNWGIIVSSHSSGTVIGAVDVGGLVGYFNDEAIINSYSTASVKGEGSVGGLVGMILDGIVSNSYSSGNVKGIYRTGGLVGYIGGSGSVINSYSNGS

SEQ ID NO: 88913 - protein, 302 aa, Unknown
  Obtained from environmental sample
  DOMAIN (13)...(168): DEAD/DEAH box helicase
  misc_feature (1)..(302): Xaa is any amino acid
MRKFEVISPFKPAGDQGEAIAALADGIKAGDKYQVLQGVTGSGKTFTMAKIIEAVQMPTLIVSHNKTLAAQLFREFRGFFPNNAVEYFVSYYDYYQPEAYVASRDLYIEKDASINDEIERLRLSATRSLMEREDVIIVATVSCIYGLATPEVYKKMTATFSRGDTIDVDALIRRFVELQYERNDAILERGRFRRRGDTLEIYPAYLEEAYRVDLDWDKVERIRRIDPISGATIEELDRALIYPAKQFVMPADMVQNAMGAIKEELANRYEFFIAEGKMLEAERLKTGWNTTSKCSPKWATVR

SEQ ID NO: 88914 - protein, 282 aa, Unknown
  Obtained from environmental sample
  DOMAIN (139)...(220): Fibronectin type III domain
  misc_feature (1)..(282): Xaa is any amino acid
ITETIISGLTNGTTYYVWVKAKNIVGTSGFSQPANAKPTAYTVLPKVPTLPTVTPGSRSLRVSWPAAEGALSYEVWVSVTNNPANAQKHGVDISGTTVTLTNLVNDTTYYLWVKAKNNIGTSEFSPQASGTPSAFASAPSAPQAAPTIIAGYTQLTVSWEAVEGTNVYEVWTGTSTNPTIAAKRGDDTEGLSMVITGLTNGTEYYVWIKAKNTVGVSSFSPMATGTPSAFTITPQAPATPSVSIGSGQITVTWAAVEGAAAYEVWMGTANNSASASKNSADI

SEQ ID NO: 88915 - protein, 265 aa, Unknown
  Obtained from environmental sample
  DOMAIN (84)...(154): Sigma-70 region 2
  misc_feature (1)..(265): Xaa is any amino acid
LIDKITKHHEKVREGERRLRELNDRAANPVFASKKEKYKKEINAITDELNRFFDRYETDSETFHADYQKLKQAESASRAAKAELIEANLRLVVSIAKRYTNRGLQFLDLIQEGNIGLMKAVDKFEYSRGFKFSTYATWWIRQAITRAIADQARTIRIPVHMIETINKLIRTQREQVQRLGREPTSEEIAKAMDMPVAKVRKVMKIAQEPISLETPIGEEEDSHLGDFIEDRMIISPIEQVERQRLRETVDNVLKTLSEREEKVLR

SEQ ID NO: 88916 - protein, 131 aa, Unknown
  Obtained from environmental sample
  misc_feature (1)..(131): Xaa is any amino acid
VKTLFLFTIPPVAGAIIGFVTNVIAIKMLFRPLKEIRFFGIRLPFTPGILPKQRNRLAQSIGAMVERELLTPEILRLRLARDDVRARIKNALSFFTENFLSKTPKELLDGNESVLTQRITGALKLFIHLNA

SEQ ID NO: 88917 - protein, 411 aa, Unknown
  Obtained from environmental sample
  DOMAIN (1)...(109): PAS fold
  misc_feature (1)..(411): Xaa is any amino acid
DTRSDILQDLDLRFIRCNKTFENYFNVREADIIGKGNIDGLGLTAKTAEKYKERDLKVINEGRMVVFEEYIPSADGSIQLFETSTVPMTQNGQTVGVLAISHNITERKEMEEQALSASRAKSAFLANMSHEIRTPINAVIGMTTIGKSAANAERKDYCFTKIEEASSHLLGVINDILDMSKIEANKFELSPVEFNFEKMIQSAVNVVSFRVDEKKQNLTVRIDKEIPQNLFADDQRLVQVITNLLGNSVKFTPEGGSISLDARFSGEKDGLCTIEITVKDTGIGISSEQQGHLFTSFQQAEISTTRRYGGTGLGLAICKSIVEMMGGTIRVESEQDKGATFIFTVQAKKSAHVNNAINDLSDSDVKEQSELAGLFTGRRILLAEDVEINREIVLSLLETTQLEIDCAENWR

SEQ ID NO: 88918 - protein, 387 aa, Unknown
  Obtained from environmental sample
  misc_feature (1)..(387): Xaa is any amino acid
ISILFSIFSFNIPTEEPATFYEKLPFYKERTKRLLILRAKGVEERVAKLVKAEEISATLERKRETLDGEEIDDDGQINGVSPTIILKPIKTDNDYLNRLTGRVAEDYQLYLKLREDYINLPTFYFDMADWFHKHGDKKTALRILTSIADLELENASLYRLLGYRLKEYGEYALEKFVCQKVVQWRPMEPQSYRDYALALADNGEKQAALDSLYGLLTRLYSQATFNSSYGIQEVVITEINHLIAKNTNLDKSKIDTGLIINMPVDIRVVINWNMNNTDIDLHVKDPSGEECYFKNKETKTGGRISADITGGYGPEQFLLKKAIKGKYQIYVNYYGDRQFTTAGPSTIMAEIFTKYADKTEQRKVVSLQMSKAEKKEDKKVEVAEFEF

SEQ ID NO: 88919 - protein, 691 aa, Unknown
  Obtained from environmental sample
  misc_feature (1)..(691): Xaa is any amino acid
LPDGRTVTYYALDINGKMREAVPVEKAKATEVFEEIEQRQVDPGLLEKVEGNNFRTRIYPIPAGGIRTISIGYEEELQLENNLLHYRLPMAYPDTLEKFAVKATVWKSSLKPLVPESEEELRFDAAGENYVAFFARENYKPSRALIFALPAPADIPSVMMQPAQGSYYFLASVAPKMETRKKQWDGNLAIIWDVSLSGSQRNLQREIEMLDIIFSEKKNANIHLYFLNNTLKKITKGNWKELKSILEMAVYDGGTDFSKINLKDIEGNEILFFSDGISTLSDADFLKNTNSNRPVHSIVSSAKSDYSAMRLIAGKTKGKFININALSNEELKNELLNETLQFLGIEGGNAVREAYPSIATPVHGNFSVAGISETNETELTLLFGFGNKIEKKIKVKLEAKNASNQGNVYRIWAQKKIAELDLNYEKNRAELTELGKQFSIVTRNTSLIVLETVEDYIRYNIEPPAELQDEYLRRLKEREGRVRNDNDKSNMLSTALSAAENLKKWWNIDFKPIKPKYPQPDNVEKRLSVVSSSSSATSTTSTTNTARATNKVKSKRGDVDLFTAAGGKDIACTAGFNDELTIIARRDAHTLVKGPCQGWVNNSEIERVLQGPGDRGMKIEAVDVVGWMDNPSAVFVLDQDAYAFEGINLNPGYPSYPHERSIGKASQTTKSSQPTITIKPIKKDNEYLKKL

SEQ ID NO: 88920 - protein, 261 aa, Unknown
  Obtained from environmental sample
  DOMAIN (9)...(79): XdhC and CoxI family
  misc_feature (1)..(261): Xaa is any amino acid
MLDVISFAAEKAAEGKKVALVTVTETTGSSPASVGQMIAVLADGSTAGTVGGGASEYQIIQKALEAIKNGERIFKFSFDHSEFGMICGGSMAGFGNVLGGGPGLCVFGGGHIAQCLARLASQSGFYVTVVEDRPEFAPDFETARYVLCKPQEYEKNDPASNSDYAVVCTRGHKTDGEALRYCLTKKFEYLGMIGSEKKVTALFDELREEGVEQKELDRVYAPIGLDIADAAPAEIAVAILAEILLVKNKGRLRHKKGSGTL

SEQ ID NO: 88921 - protein, 300 aa, Unknown
  Obtained from environmental sample
  DOMAIN (56)...(299): Amidohydrolase family
  misc_feature (1)..(300): Xaa is any amino acid
MILIGNGKIVTRDKACPFIENGAVLVDGKTIKETGEFSALRAKYPDAEFIDAKGKLVMPGFINTHMHYYSTFARGMALGGKPATTFGEVLTGLWWRLDKQLTLDDVYYSCIGPMIDEVRSGVTSVIDHHASPFAVEGSLFKIAEAAKLFGLRSNLCYEVSDRDGEKIAIAGIKENADFAKYCKGQDDDMIGSLFGMHAQMTISEKTLALCVEAAEGAGVGFHVHAAEGIEDVVDAVSKYGMRVIERLYKSGILSKKSIAVHCIHITPEEMDMLKESGVAVVHNPQSNMGNALEFRPCLIC

SEQ ID NO: 88922 - protein, 187 aa, Unknown
  Obtained from environmental sample
  misc_feature (1)..(187): Xaa is any amino acid
FVLSRNSNPLRGKPEVEIRDPNRTIRIDQLKEGVWYWTVEAQTPEGVNITAQNPRQLRVLPIPLLPAPSNRLPAEGHIIGIEELKKITVNFGCSAVPGANAYIFTLYQETDKGRKQITQTGPENRTSWTADIKTLGRGNFIWQVEAVNVGQNNVIEQRGSPAENHFVIDIPRPGPVQIIEEPEDTDD

SEQ ID NO: 88923 - protein, 237 aa, Unknown
  Obtained from environmental sample
  DOMAIN (4)...(119): Response regulator receiver domain
  misc_feature (1)..(237): Xaa is any amino acid
MDKNRVLIFEDSDIFADVLLEFLNAEGYETQRAKNGLEGIKLVYGFLPELIITDVEMPLFKGCESVRFLKSRPPTGSIPIVMLANPGETKDKFWGEQAGADAYIEKTPENFEELSGQIRRLLGENRPVDYERIKKEAEKINDNSLVEMVNNLLDNKLFQATLGSLLAELSSKVSSLEETVKGVFALLQNACRSEMCSIMIKDADDALVVYNANNAGYAEAVAEDFKAITIADLTHAF

SEQ ID NO: 88924 - protein, 428 aa, Unknown
  Obtained from environmental sample
  DOMAIN (219)...(402): ABC transporter
  misc_feature (1)..(428): Xaa is any amino acid
MFAGSLIMMIYNSWMLALVAVASTIVGFVLMTLIMKKSQKHFKAQQQGLGDINGYIEEIYSGHNVVRAYNGGKKAKVAFEKINATLYESGWKSQFMSGLMMPIMNFIGNFGYVAVCVVGAALTMNGTITFGVIVAFMIYIRFFTQPLSQMAQSMQQLQRTAAAGERVFEFFDEEELADESNKRDKLERIKGNVEFKNVRFGYEKDKIIIHDFSATVNAGQKIAIVGPTGAGKTTMVNLLMRFYELDGGEICIDGVPTSQITRENVHDQFCMVLQDTWLFEGTIKENIIYSKQGVADEEVEAACKAVSIHHFIQTLPQGYDTVLNDKANLSAGQKQLVTIARAMIQNSPLLILDEATSSVDTRTERLVQEAMDKLTHGRTSFVIAHRLSTIKNADKILVMRDGDIVESGSHKELLEKARVLRRAVLQPV

SEQ ID NO: 88925 - protein, 385 aa, Unknown
  Obtained from environmental sample
  misc_feature (1)..(385): Xaa is any amino acid
IVVEDRTGNVNNTTYIDTPFTINRKTPQLSMTKPTATAYGVKGNGETVFTLSNGNVADGDFKELVFTIANETQGDTAYTETLSLTNNPVRFGQVTGAYSWNWTWSLDGLTYNTLAEGRNTLTVVAKDVKGNENANKAATTYVFTKDSNPPVITVTSMNQKSVTASQWTSPSADKNSLLNGTGSIENGKASIQGQMVDAVSRIGYTTNGQPPFSFQYRIYDENKLTAKPTTWTTVNFTSTSGTPPVTVNIDPQTTASWKIDLYGANSSPYYTPGGPDYDIPEGLYWLDVRVKDRTGITGDDMGDGTGTWGHLDNVVFIVDRAAPTIKIDKLGTETYNATTHRNKIFKDAFTMEGTANDYNFDHVEIEIDSTPVTKYTLKPTSAQQN

SEQ ID NO: 88926 - protein, 445 aa, Unknown
  Obtained from environmental sample
  DOMAIN (42)...(346): Bacterial extracellular solute-binding protein
  misc_feature (1)..(445): Xaa is any amino acid
ISAAGAKLRPVRENFFTAFSHEIRSFLASFFVDYNNLGNVYRKGADVVNVWMLAGRDQSTILKGMIDDTFTPQTKIKVNVKLVAPDAVMPAVIAGIGPDAALTVPQVDPVNYAVRHAAVDISKLPGYEELTREFSPSVLVPFGYAGGIYGLPETQYFHVMFYRKDIFTELNIDVPETWDELISILPIIQKNNMNVGIPSVATTVQANIDFSNFLAHLYQRDGRLYNENGSRTLLSEETSIEAFDVYTKFFTHYKTPAVYDFLNRFRTGEMPLAFADYTNFNTLEVFAPELRGLWGFARMPGLRRKDGSVNRSVPTGTLASMIFSNAKKPELAWEFLKWWVSADTQLRFGRELESVMGAAARYPTANYDAFTRLSWGSEQMAVLKEQRAWTVGTPEVPGGYYVSRHITNAVRRILNEGEDTRETLLDYSITIDDELIKKRKEFGLE

SEQ ID NO: 88927 - protein, 203 aa, Unknown
  Obtained from environmental sample
  DOMAIN (129)...(156): NHL repeat
  misc_feature (1)..(203): Xaa is any amino acid
MNNAMSSYSFHGIFCVPVRKILFILFFYSSFLIPNSSLFASPTNYTYNYDFWEEQVASPDAYYVSAYVLGTGLGIGNFRDPQGLFVKDNRVYICDSGNNRIVLLAYENGEHRLVSVTKSVIIDGAESPFNYPMDIFESRDGFLYIADTNNHRVLKLDRDWNYISSVLKPDDESIDENAEFLPLKLVVDFANRLFVQARNHQQG

SEQ ID NO: 88928 - protein, 203 aa, Unknown
  Obtained from environmental sample
  DOMAIN (28)...(202): Binding-protein-dependent transport system inner membrane component
  misc_feature (1)..(203): Xaa is any amino acid
MSLLNTPFWVVFMASFSPRVWKEVLPATVDTLYMTFIAALITFVFGLILGIIMTITNKDGLCPIQPFNTGMGWLINCMRSLPQIIMIILMIPVARFVFGKSYGINSCIIALSASCIPMYARIVQSSLLEIEKGKIEAAKSMGSSNFQIIVWVLLPETLPSLIRGFTVAVIAIISMTALAGNFGAGGLGDIAVRFGFQRFQHEI

SEQ ID NO: 88929 - protein, 184 aa, Unknown
  Obtained from environmental sample
  DOMAIN (1)...(176): 4Fe-4S iron sulfur cluster binding proteins, NifH/frxC family
  misc_feature (1)..(184): Xaa is any amino acid
TGYYYSHRLLEQLGAYTEELDFVFYDVLGDVVCGGFAMPIREGKAKEIYIVASGEMMALYAANNIAKGIAKFAQKGGVRLGGIICNSRNVDRENELLEAFSKELGTQLVYFVPRNNVVQRAEINRKTVIEYAPEDKQAQEYRNLAKAIEGNTLFTIPKPMTQERLEEILMEYGLMDAIKNDYRI

SEQ ID NO: 88930 - protein, 145 aa, Unknown
  Obtained from environmental sample
  misc_feature (1)..(145): Xaa is any amino acid
MNATFDELTRSHPCFSTGAKPNKGRVHLPVSPGCNINCNFCDRALNDIDTRPGVTSSIISPPEALDVIRKALALCPDITVAGVAGPGDALATPWALETFRRVKEEFPGIIKCMSTNGLLLPEFADEIIEIGIDSLTVTVNAIDPE

SEQ ID NO: 88931 - protein, 164 aa, Unknown
  Obtained from environmental sample
  misc_feature (1)..(164): Xaa is any amino acid
GETDAYYEEIDNLATFLLEFRYGLPNHAHILHDAGYVAAFSKFLLHEVGIVPKEQFITDNTPDKFKEQITSDIASTSAKRNIPVIFEPDAGLAQEAIRNVKHSGRGLIIGSGWDKELAREKDYDFLSAAAPTPYRLVLTTNYAGFSGGLRVIEDIYHNVLATYR

SEQ ID NO: 88932 - protein, 277 aa, Unknown
  Obtained from environmental sample
  DOMAIN (1)...(213): Bacterial DNA polymerase III alpha subunit
  misc_feature (1)..(277): Xaa is any amino acid
VIIAPGEVVNWAPIFKGPFLPSDHQIMTQFDKNHIEKIGLVKMDFLGLRNLTLVQDAQRLIKKNHGIDIDLCNLSDDDQKALDLFGNGETTGIFQFEADGIKDYLRKLNPGGMEDLMAMTALYRPKNMDHIDMFIDRKHGREKIEYLHPCLEKILGVTYGVIVYREQVMRIAQVMGKFTMGQADILYNAIRKRQTAEIEVAGGKFIEGAVSQGIDKTVAKEVYDLLVKFAGYTFLRAQAVVYTHFSYQAAYLKAHYPSEYITAYIGAYHEDKDNILR

SEQ ID NO: 88933 - protein, 625 aa, Unknown
  Obtained from environmental sample
  DOMAIN (1)...(175): PHP domain
  misc_feature (1)..(625): Xaa is any amino acid
MPAVAITDHGGLFGAVAFFLECKEAGIKPILGFEAYVAPYSLKDMMSSSYNHLVLLAKNNAGWKNLMRLSSIGYLEGFSNRPRIDMEVLRRYSDGIIATSACVAGVIPQAILRGDMDRARKLTEEHIDIFGKENFYFELQDDGTPEVRAAGEGLIKLGREMGVPFIVTNDTHYLNADDALSHEILLCIKTNTTMDDPKRMRFGNGQIYFKSPEEMAKLFPEVPEAMTNTLEIAERCDVDIEVDPQLPTVEVPDGFKEPADYLSHLARNGLRERYAEVTPELENRLEYELGVINKMKFAGYFLIVQDFVRKAKETGVMVGCRGSAAGSLVVYAIGITDVDPIKFDLIFERFLNPERISMPDADIDIADRDRYKLIDYVVEKYKREAVCQIINFSTMKAKMVVKDVARVNGFSVGEMNKLSALITENSLAESFGLVDKEGKPRKDIPPIQMIIDKNDLERYQTRPTSLTSVVMGDSAYKNVFRHAAVLEGLARQPGMHAGGVIIAPGEVVNWAPLFKQSNSDQIMTQFDMKYVEKIGLVKMDFLGLRTLTVLQDAQRLVKKYHGIEIDLWKLPDGDKKALGLFGSGETTGIFQFESNGMRDYLRKLKPSGIEDLIAMVALYRPGAYG

SEQ ID NO: 88934 - protein, 487 aa, Unknown
  Obtained from environmental sample
  DOMAIN (84)...(242): DEAD/DEAH box helicase
  misc_feature (1)..(487): Xaa is any amino acid
MLEKIIKALFGSQQERDLKAMQPIVQAVNAKEEWAASLPAEEFPKMTALFRERYHNGESLDSILPEAFALAREAAKRNLGERPFDVQILGGLVLHQGKIVEMKTGEGKTLMSVAPAYLNAIPGDGIHIVTVNDYLASRDTEWMKPIFSYLGITVGTILSNMDNAQRKENYARDITYGTNNEFGFDYLRDNMHRSMEERVQRGHNFCIVDEIDSILIDEARTPLIISGAAEDDTFKFAEVDKLIGGLREVEKKENGDYPDETQGETVNGDYKLNEKNKNVSFSNQGLAKIEEILKKRGLIQGAIVDEENFEYIHYFTQSLKAHKLFHIDVDYVVQDGEVQIVDEFTGRILHGRRYSDGLHQAIEAKEKIKIAQRNRTLATITFQNYFRLYKKISGMTGTADTEAVEFNKIYNLDVVVIPTNLPVARIDENDVVYLNESDKDKALCDEIAEAHKKGQPMLVGTVSIEKSEHVSAPFYRRGVRHEVLNAK

SEQ ID NO: 88935 - protein, 246 aa, Unknown
  Obtained from environmental sample
  DOMAIN (134)...(242): Rhodanese-like domain
  misc_feature (1)..(246): Xaa is any amino acid
LVLLDCRPFEDYDFCHLEGAIHVDIESALTSATDEGHDPSKGGRAPLPKVEAWEKRLRQWGIRPDSFVVAYDDASGAEGAARAWWMLTASGIQAAVLDGGWGAAVKARLAINEELPEIEPSTFNFTKWLLPTVGIEAVERLRHAPDWALLDARAPERWRGEVEPLDPIAGHIPGSRNVFYKENLENALFKEPEELRKMYLEILGPIQPTHTIAYCGSALMACHTLLALHQAGLEGANLFVGSFSEW

SEQ ID NO: 88936 - protein, 105 aa, Unknown
  Obtained from environmental sample
  misc_feature (1)..(105): Xaa is any amino acid
NDPDLILKALDSGAYVEFDTIGKIKYLPDERRIEFIKTCCDRGYVKQLLLSMDITRRSHLKANGGIGYAYLLDSFLPRLAQAGVSESDIAYMLEHNPDRIFSEAV

SEQ ID NO: 88937 - protein, 174 aa, Unknown
  Obtained from environmental sample
  misc_feature (1)..(174): Xaa is any amino acid
MQTFPLPAISVKEATERQFALVDAITRHFPGADFLSAGDRGLVPGLGRPRTTASVEAVLADFFGQEDAILVRGAGTGSIRNALYAAFKGGDRVFVHKAPVYPTTAVTFNSMNLEAEEADFNDIPAAVRAYKDSQAAGALVQLARQKPDDSYDYTVLIPALKEASAGKPVITDTT

SEQ ID NO: 88938 - protein, 182 aa, Unknown
  Obtained from environmental sample
  misc_feature (1)..(182): Xaa is any amino acid
MGGMKRSMRQRWLNTSVFWKNKKIMRFQKKSLDIYHRRKKDAQGNRYLIPKIEVNIWWTNLACGAEKVIELYHGHATSEQFHSELKNDMDIERLPSGKLAVNKILLAVAMNAYNALRLLGQSSVEQKSPVKHRRKRLGKVIRDLICVAGKLVKHGRELIFKINEKDPVLPVFLRLNAALDCS

SEQ ID NO: 88939 - protein, 405 aa, Unknown
  Obtained from environmental sample
  DOMAIN (328)...(383): BFD-like [2Fe-2S] binding domain
  misc_feature (1)..(405): Xaa is any amino acid
LFDQLRRELDFPFKRCGIIVAALHHEEMKVVEHLYRQGVENGVIGIELCSRERILELEPKLSHDAAGGLYAPGGGIVEPYRFVFALAESAYKNGVHFFTDYEVVKAQYRDTHWTIGSADGRSVKARYAVNAAGLYADDVSRAFGAEDFTIHARKGEYFLMDKMTQARPQRVVFPVPTAVSKGMLVIPTVEGTVLVGPTADAMEGKTDFSTTMEKLEQILDSGKRMIPSLSRNDVIASFAGIRPCLEEDFYIDVSKKAPAFVQVAGIQSPGLTASPAIGEYVKNLLKEAGLELAEKPGWDPFVEDRPRSRELSPYRLDELIAKDPAWGNLVCRCENVSEAEIVQAVRLGHHTLDGVKYFTRAQMGRCQGGFCTYKIVKIIMRETGLSWNEITKHGGASRLLESELQ

SEQ ID NO: 88940 - protein, 76 aa, Unknown
  Obtained from environmental sample
  misc_feature (1)..(76): Xaa is any amino acid
MKELQYDAVVIGAGAAGMAAALELDKQGFSTALVDREDHLGGILMQCIHNGFGLHEFNEELTGARICGSVYRTARF

SEQ ID NO: 88941 - protein, 271 aa, Unknown
  Obtained from environmental sample
  misc_feature (1)..(271): Xaa is any amino acid
MEDFQVEMNGALKIEPQATFMFGLYGMAYTGITGGFFAKLAGEANYSSNINGNLSFSCGLEFSTDAKLKVLGYEIGELSITFLELEWPIWKRSGAIVYNKATWDAAIDSIKEGGNNNNYTINVTGNFSLPGDTAYTFGNVTGLKVTITGDKTITLTGQGSLLNLNSNQTVVIRDTDFVGNNNNNRALIYANGTNTILTMEGNSSVSNNNNSGGIGGGVSFAGTNAIFTMKDNASVRGNTAVAGGGVCVGGTLNMSGNTSITEHIATSNEAI

SEQ ID NO: 88942 - protein, 67 aa, Unknown
  Obtained from environmental sample
  misc_feature (1)..(67): Xaa is any amino acid
MPEMMKDKERSALVGKIGVTDTELRPSGTVLIDNEIYDAKTDGEFIEAGRGVRVTRVRGKKIFVIRV

SEQ ID NO: 88943 - protein, 97 aa, Unknown
  Obtained from environmental sample
  misc_feature (1)..(97): Xaa is any amino acid
MKITLDAFEQSIEDNAGKFIPLSDTEKNEVETIINAANKTKNINIRISAYDIEKVKQLSSEEGIPYQTLISSVIHKYITGKLVDEKAVLKSLELLRQ

SEQ ID NO: 88944 - protein, 488 aa, Unknown
  Obtained from environmental sample
  misc_feature (1)..(488): Xaa is any amino acid
TPTPASAVPQIRAGYSELTEAAVRALLGGSGKADAAAVGDKINTLREAVARMPVTAAPSDQGRDTVTRDGGTSGNRPESNAASANTQSAASRLSASTNETAVNNTAKAPETFTRINAQLAVHRASSVSSGNINPNAGGNSAKTADAFPAVNRGFAPQQPQQSQSSQQTQQPSVQTGGINTTGINAVDNQNVRGDAGINRSIPVDSIRGMNISASNINTNNANPTDNQNIRGDVGINNRQSIIDNSRGANNSGGVGINTNNSAKPIDNSADMVINTNSVNAKSINTSGINTNGVNPPDNQNIRGDLGVGINNRQGAVDNTRAVNNSGGGGINTNSSTRPVDNSVGVGINARGINTSGINFTDNPNIRGDIGMGVNARNINTQSINTSAINPTDNQNIRGDLGVGINNRQGTVDNTRSVNINTAGATSSVDVPAIKENCLSVVDALQSSAAPILREIAQRGETSAGSAASLIELVRDTVSSLDEALRPLV

SEQ ID NO: 88945 - protein, 310 aa, Unknown
  Obtained from environmental sample
  misc_feature (1)..(310): Xaa is any amino acid
VNTNINSNVTPGVNINANIGANSNINTSANADYNVGPGVNSNINAAVNANSNTGTDINADNTNTNINTNANINTDSSAKENRTDGFLQIARRIWANTEKLRAGFREAFSTLDLQNRASPLDKPTDGSNAGVVRRSADSLRTEMLLDVSRALRDVFSSVDELNEIVSQLSNGSKTLPDAEAALLRAVRALEHQARQSGADVMERLKDVLRELNRLQAEAARTQEQGAATARSSPAEAIRSAALTAARSLENLQLLSTQTRAAETEQHLLAIPAKIGGEWTEVQIKFVKERKGEKGEAKDGHVSIYLNVAPS

SEQ ID NO: 88946 - protein, 277 aa, Unknown
  Obtained from environmental sample
  DOMAIN (17)...(277): Phosphoenolpyruvate carboxykinase
  misc_feature (1)..(277): Xaa is any amino acid
VKTHRDAPPTNHRKLIAWVNEIAQLCRPDAVHWCDGSEEEKNALNDLLVKNGTFIPLNPRKRPGCFLSRSNPADVARLEHRTFICTAKKRDAGPTNNWMAPQRMRKKLHGFFKDCMKGRVMYIIPYSMGPVGSPIAQIGIEITDSPYVVQSMRITTRIGDKVLKVLGNDGFFVPCVHSVGVPLAPGEKDTAWPCMPKDVHIVHFPETREIWSFGSGYGGNALLGKKCYALRIASAMARDQGWLAEHMLIVGLESPEGETTYIAGAFPSACGKTNLAM

SEQ ID NO: 88947 - protein, 329 aa, Unknown
  Obtained from environmental sample
  DOMAIN (26)...(329): CorA-like Mg2+ transporter protein
  misc_feature (1)..(329): Xaa is any amino acid
GLIIYQSYAEMRDLSSVDELPSCNKDSTILWINVNGLKDTGSIKKLEKIYNIHPLTIEDALDTRQQPKVETFQKYRFISLKSIRHEKKIHLIKQDIKKRFSRRSRKKLMEQLEDMKEFIIDHISIIIMKNVLITIQEIAGDSFGDIRKRILENIGQIRRMGTDYLAYSLIDTVVDEYFITLAHLEDDIEDIEDRAVKTDNDAFISEIQETKKFLFHIKRAMLPLRENLMIISRQDMLLTNEELKPFLQDLRENLSNAIESVETYREWLTNIMDVNLSVLSYQLNKVMKILAVISAIFIPLTFIAGIYGMNFEFMPELAQPWGYPIVLGF

SEQ ID NO: 88948 - protein, 524 aa, Unknown
  Obtained from environmental sample
  DOMAIN (240)...(414): Radical SAM superfamily
  misc_feature (1)..(524): Xaa is any amino acid
MKALCVLYGGRLEPEAFEKALPTQAGNESAFSLAVAAARAFPGVERTVLLGMQDSGYPDLPSDVEIVTRPSWTRTGLFEEISKLSAGFDFTYFAWADCPLLDPALAGAMAERHLRYRAEYSYADGWPYGLAPEILGPGIAGILAKLSENCDGPVERDALFFTIQKDINAFDIETEISPIDLRPYRLSLTADSKRNLLLLTRFMGDLRQPGSNYAISASDIEKIILEKPFLLRTLPAFFNIQVLGACPQACSICPWPSHGGSVPVTERKDLMPKDAFASLLDKIEEFAGDAVIDLSLWGELSLHPEHFELIEMVLARPALSLVIETSGIGWKADELKALAALQAAPRKNHMAPLSWIVSLDAFDSERYKELRGPGFSEAQDCAKTLLSLFPNDAYVQAVRLKGAEDDIEKFYRFWKGESSKQVIIQKYDDFAGALSKMQAADLSPVKRRPCWHIQRDMNILLDGRVPSCRENLAALKGNAEVWGNAFSDDLSLVWEKGAALYNGHCKAEYPEICALCDEYYTYNF

SEQ ID NO: 88949 - protein, 484 aa, Unknown
  Obtained from environmental sample
  DOMAIN (158)...(223): His Kinase A (phosphoacceptor) domain
  misc_feature (1)..(484): Xaa is any amino acid
MANERQKVIVVDDNLENLTALKNTMKDLYDVYPIPSAAKMFGLLKHIHPDLILLDVEMPEMNGYEAIKKLKDDPQYYDIPVIFLTSMSDAQSEIEGLSKGAVDYIHKPFVAPLLLQRIKTYLDIMEQQREIKHLLDLKTKEVNLREIAEMEAENASRAKGDFLSHMSHEIRSPLNAVIGMINIANEEKEIDIIKMYLEKAGNAAKHVLGVINDILDMSKIEANKLELSDSEFDLGKMMTNIVDVTSIRAQEKHIQVVVNMNPNIPTFVISDELRLAQVITNLMTNAIKFTPENGKVQLNAEKLEEKDDEVTLRIEVADSGIGISPEQQSKLFSAYNQADRTIAKQFGGTGLGLAISKRIIELMQGKIWIESELGKGAKFIFTLKMKKGTQGASNDITANAPASGIKATDLHLQSYTILVAEDMDFNREVLSKFLEKTGVTIDFAENGKEAVEKFKANYEKYSLIFMDVNMPEMDGDEATKIIRA

SEQ ID NO: 88950 - protein, 438 aa, Unknown
  Obtained from environmental sample
  DOMAIN (284)...(359): Hpt domain
  misc_feature (1)..(438): Xaa is any amino acid
MDVAVSDTGMGIHKDDIKNLFLDYYQVAVNANRHIEGTGLGLSITKRLVEMMDGIIGVESEYGKGSKFSFRVRQGLVDDKVLGADVSDKLRNFCYSDEKKIVGKKLVRVNLSYARVLVVDDMDTNLDVAAGILGNYKMQVDCLSNGPAAIERIRSGTPVYKAIFMDHMMPGMDGIETADRIRALGTEYAKKIPIIALTANAIHGTDKMFYEHDFQAFITKPIDVMEMDAVLRKWVRDDKHEEVPVTEESSEADKKIETMLIEIPGVDTKKGLSLYAGSRKIYLPLLRSYTANTPGILDKLRTVSAETLPDYVITVHGLKGTSAGIGAEAVREAALNLETMSRAGDLQGVLAKNDKLIADAEIIVANVKAWLQRYDANSEQKPRLKAPDRELLAQLRQSCESYDMDGIDKVMSELEKADYEEDAELIPWLREKIETSEF

SEQ ID NO: 88951 - protein, 77 aa, Unknown
  Obtained from environmental sample
  misc_feature (1)..(77): Xaa is any amino acid
MANRRNTYNGKKHDVIYGPVANDTIYRTLIAYENGVLSAEDTIARLKVRQLFDQITFTSEHSLSFLKYSDFIEVPND

SEQ ID NO: 88952 - protein, 79 aa, Unknown
  Obtained from environmental sample
  misc_feature (1)..(79): Xaa is any amino acid
MIDTQFKATLEMLIPLVIKEIMKSRNITEREAFELLYSSFLYSKLEIESTKLWHLSQLTLANLLNEEIETGNIIFPEEA

SEQ ID NO: 88953 - protein, 398 aa, Unknown
  Obtained from environmental sample
  DOMAIN (29)...(375): N-acylglucosamine 2-epimerase (GlcNAc 2-epimerase)
  misc_feature (1)..(398): Xaa is any amino acid
MLSKQEAIREVKENILPFWQGMVDEENGGFYGEADFYGKPNKAAAKGCILNSRILWTFSAAYRVFGDEAYKACAQRSLDFLSSAFLDTTHGGLYWLVDHTGKAMDTRKQFYNIAFGIYALSEHYRATGDKSSLELAMSLFDAMERYGLDLSAGGYIEACNREWQSIDDFRLSGKDLNCPKSMNTNLHVLEAYTNLVCACGGERVRNALEALLRITLDKIINRDWHFELFFDMNWNSLAKDISYGHDIEGSWLLYEAALAIGDENIISKVKQTALAITEVTYNAAIDRNNGGLLSGCDAAGNHHAKKEWWPQAEAVVGFYNAYELSGERKYFDAAESVWGYIQNHFVDSAHGEWFNELSIDNSPDINLPKAGFWKCPYHNARGCLEVGRRVGGEITNER

SEQ ID NO: 88954 - protein, 86 aa, Unknown
  Obtained from environmental sample
  misc_feature (1)..(86): Xaa is any amino acid
MSGAGSFELSGRADNAEIKFSGAGELKASSLQIRDASVSFSGAGAIRINCSEKLSIEARGAGLVEYRGSPSLSLDTSGPVRIKKVD

SEQ ID NO: 88955 - protein, 394 aa, Unknown
  Obtained from environmental sample
  DOMAIN (29)...(382): N-acylglucosamine 2-epimerase (GlcNAc 2-epimerase)
  misc_feature (1)..(394): Xaa is any amino acid
MLNKQEVLREVRENILPFWQSMADEENGGFYGEADFYGKTDKTASKGCILNSRILWTFSAAYRILGDDGYKTYAQRARDFLSSAFLDKTHGGLYWLANHAGKAKDTRKQFYNIAFGIYALSEHYRAAGDQSSLDLATALFDATERYGLDPSADGYIEACDREWRGIDDFRLSGKDLNCPKSMNTNLHVLEAYTNLVCAGGGERVIKALEALLHVTLDKIVNRDWHFDLFFDMNWNSLSKDISYGHDIEGSWLLYEAALATGDENLISKVKKAALAIAEVIYNVAIDHKNGGLISGCDEQGHIHNKKEWWPQAEAVIGFYNAYELSGEQKYFDAADSIWGYIQDHFVDRAHGEWHNELNSGNTPDINLPKAGFWKCPYHNARACLEVGRRAGDRR

SEQ ID NO: 88956 - protein, 72 aa, Unknown
  Obtained from environmental sample
  misc_feature (1)..(72): Xaa is any amino acid
MLNRQEALREVRENILPFWQGMADEENGGFYGEADFYGNIDKTASKGCILNSRILWTFSGAYHILGDDDYKA

SEQ ID NO: 88957 - protein, 573 aa, Unknown
  Obtained from environmental sample
  DOMAIN (480)...(551): Bacterial flagellin C-terminus
  misc_feature (1)..(573): Xaa is any amino acid
MRISHNVAAMNTHRQMGISEFDGSRSMEKLSSGYRINRAGDDAAGLAISEKMRAQVRGLNMASKNSSDTISMIQTAEGALGETHSILQRIRELAVQSANDTNTDSDRTELQNEVRLLIAEVDRIGNTTEFNTKKLLEGSAKGVSDEIIGTSRINNNSRLALDPGKITLLGDAVAADKSWAFDGAYMLVRTGKTEGPTLNLADFMMVGPDGMQYKFADVGSATEAAGNLKAGTIIANGTFKAAAAAVVTSGINITMGDGGNNASGNLLTGTILAGGSVLAKNSAITIGASTDTKIEVGGKEMSIVRGATGNDLKVGGELLADGSTMTLEDGTNIKNTAGVLSVVSGSLKLGQNQTYTTLAADIVAKDSTLTAGSTIAKDSVLKAGTVITGASTIAPGSITFTGTNIQFSANTGTALAAQYEKADVGDSVTFIFSEYTAASSKLNDSVMAQIGANSGQTAFVSMGDMRAVALNVHNIDISSKWGAATAIETVNNALQRVSHQRALLGAMQNRLEHTIKNLDASTENLQAAESRIRDVDMAKEIMEYTKDSILMQSAQAMLAQANQIPESVLQLLR

SEQ ID NO: 88958 - protein, 89 aa, Unknown
  Obtained from environmental sample
  misc_feature (1)..(89): Xaa is any amino acid
MAELCRFCGMIIQIYFRDTLKHYKPHIHVIFAEYEASVGIDGTVLAGELPKKQFAYLRVWMDLHEDELYEAWAHAVSREPVGKIEPLDI

SEQ ID NO: 88959 - protein, 93 aa, Unknown
  Obtained from environmental sample
  misc_feature (1)..(93): Xaa is any amino acid
MYIADGIVYGDDRTPFKKVSGVRALDDYKLYLRFSTGEERIFDVKPQLKYQVYKPLADKTLFNSVYLCYGVPTWQNGEIDFAPDTLYEEGVPC

SEQ ID NO: 88960 - protein, 297 aa, Unknown
  Obtained from environmental sample
  DOMAIN (1)...(182): Peptidase M16 inactive domain
  misc_feature (1)..(297): Xaa is any amino acid
GLKDFHRSRYSPANCKVFLAGNIPTEKQLSFLSDQFFSKIDGGKECAPVNKTERWKEPKKFSVPCPADGEAKATVFLSWLCSDVTDVNESIALAALTEILLGHDGSPLTRTLIESGYGEDITPVSGLEGEIRELLFVAGLKGVSGDIQEMGQKIEKLIMDELNRLVTEGIPPEETEAALLSMEFSQREIRRSGGPFSLVWMRRSLRSWLHGCKPWESLLLLPSMKKIKENLAADKRYFEKIIKKYFLDNPHRALVILEPKADFLHKQDEDLSQKLAGIEKNMSGEERKKIIKKAKEL

SEQ ID NO: 88961 - protein, 198 aa, Unknown
  Obtained from environmental sample
  misc_feature (1)..(198): Xaa is any amino acid
DLRKVLHGIFLKEYFQKEELARIIEVTNDNPDNPWFKNPRAKDMKTARQVSGGNPTKDKVFCLSIDEVCRYFGDSTESLKNKNFVQIGYEKYEALVPDAYGRLDSFDHRRIFDKNNLNRGAIRHERPRKNQNYGLVHPITGFTDKNPYLHESWWLRTPGNSNDHAIYVGGGSSNGHIFMEGASINESNCVRPALWIQV

SEQ ID NO: 88962 - protein, 540 aa, Unknown
  Obtained from environmental sample
  misc_feature (1)..(540): Xaa is any amino acid
INIENGSSPAIIGTINADTLTISAADKIQSKYTWNWSLSKTQFETLDDGDHVITIIAYDSTAPDFGKTTARPSTPPKTITFTKDTNPPEISLTNVNEVKINKTLWGQSVTHTGRVDALNSISKFTEATPIIRGTIDDYKFVSPIGDLQLMDGGKLKYYFEYEIYSADKLIAKLNADDVLDVLKDKSFFEDGTKKSQNWAISLDETNYPDGMYWLDIKVADRIGNTATIQNIAFTVDRHDPEIKITGKPADGQTGNLTEPDSTKLTANSTHNNAWSSAFILEGEAKDRNLRGLRIKVDGDDEVIIDLDSTHASALGTADQYTAPSADPDDKGNYVWKWNLAETVTGVKDNGSGNFVPATLPVFGTYGTGLGEGQHTITITAYDYARDSKPETYTFVKDTKAPDVEFTIKSTNNLTSDTTILKDNYPELRGTFKDDNSRLGFGKVSLPKINGTGPDDKASQYYFEYRIGSLSGALADSSWHTATNDAAENWEKSPLETDDLLFSNWTIPLTKYNSSGAVNPTYVDTFWPGLDRIPDGPWYLD

SEQ ID NO: 88963 - protein, 411 aa, Unknown
  Obtained from environmental sample
  misc_feature (1)..(411): Xaa is any amino acid
VKNLRPLVIFIFCTLAAAQLQAQMSFRLKSAPTDLNVYFNDELIRPVSTSGTIREYRIPAAGTLRFSASGYRSIEWNSARLPLTRGQADIKLENEKGVLSYLSEYKTGKQPKSAYFAPNGQRLFVPLLDDKGIDVFRVEGQALLYEKRLEPGTRPGFVEIMFDERRRELWVSSMFENKVYIFNLDTLDLLSSHSTGGTLPKVITQSPDGALTLVSNWVSMDISVFDSDSKKLLRRIPTGGIPRGMAFSPDGSLVYAAIYDTATVAVIDMTANKVIKRWRYNEGAGAARHIIYRDDKLYVSDMLWGSVNIMNATTGAVIKSARLGPNINTITMSSDGRYIFASSRGRNNPVDYTIPGPDFGAVFMLNAQDLTIIDKVWGRNQPTGLAVSPDGKLLVFTDFLDMNLELYRIER

SEQ ID NO: 88964 - protein, 329 aa, Unknown
  Obtained from environmental sample
  DOMAIN (10)...(329): UvrD/REP helicase
  misc_feature (1)..(329): Xaa is any amino acid
MEPNKEKINLNDEQQAAAYCDENAVVAAGAGSGKTMVLASRFAWLVTERKCRVREILTLTFTKKAAAQMYRRIHLMLAEKAADSGIKGKLAREALEEFAQARIQTLDSYSAAIVRQAANRYGISPDFSIDEERCLRLAHDEAMSFFISKRGHPAIQRLYPNKSPVSIANDIFASALFKYTHIDKRPNPMKDFAKQYDTICDEWREQSALIINILQKLTEANAENENYLPGLTPVISKFSTGGESRFSEATPASAGSAEGTGRIIFPNARQLSEYFNQIEEIPHNKIIEWTDSHPLQTTLTNIMEFLLSLISMNLVKGKKQNNPVKELIK

SEQ ID NO: 88965 - protein, 462 aa, Unknown
  Obtained from environmental sample
  misc_feature (1)..(462): Xaa is any amino acid
YSRIFGAPDEPKVRLTDNSGRGQSASEIKIEWDPTDETEAYYAVYRYSSVDSSLTRLTDKTEDTKWTDKAALKPGIYYYYKVQAIVDDIKSGKALKSPFSSQDNLTESYILSPPDNVVAEKKLDGTVTLKWEPAIGSEGERSSFTYNIYADRNMNGDFTTKVSFDISHSTDMEGFISKDGLSVESGAFFKVSTNLSGAESIKSAVVSPAPAAAIMQNATQRSYFSGAIANSSGVYPVIITWKKPENEEPAYYNVQRSSRSGAGYSVINEAPLAANGPFGELYSYDAATGVYTFTDKNETARAGRKFYYRVISLNELKQGNFPSTEAIGWGALTHEQFIIEYNKTMAAALKKLTYMNKPGSTEKLGTETKNGVISGTVYYNAAMSGLGARIIIKLDNYADFYIDNEPDKGAYFILSGNSNTSASMDSSGTMDGNVTSAGMYPGKVYYDRIQIKGGGAGGGTYG

SEQ ID NO: 88966 - protein, 212 aa, Unknown
  Obtained from environmental sample
  misc_feature (1)..(212): Xaa is any amino acid
METCIVACETLRQELELVMRNRGCTFPVYWIDSGKHAWPDKLRISIQDTLDQLKCGCRVLLLFGFCGNALVGIRAQTHTLIIPRVADCIPLFIGSREKRDSYGTDTYFFTEGYINSGGSIASDSSRAIQRYGEQRSLSILKKMLCHYRQFAVIDTGAYCIENTLDRVEQFAKKVDIPVTVIPGNLVLIDTLLSCNWPDGLFLTVPPGGSVSL

SEQ ID NO: 88967 - protein, 227 aa, Unknown
  Obtained from environmental sample
  misc_feature (1)..(227): Xaa is any amino acid
NGEMALFHNGRIICAATAAGPAFEGGNILCGTGSVPGAISRVKFRDGVFVTETIGNKEPLGICGSGVVDMVSQGLNSGYIQPSGRFSSKVINNEIPLAKTTDGRDIVFCQKDVREVQLGKSAIRSGLDALLNHAGLGYNDIQTLYIAGGFGFNLDMESAARIGLIPPALLPKVSLAGNSALGGAVKYLLGSDGEETLDNIVKQSEEFSLPEDRYFNDHFISNVNFEK

SEQ ID NO: 88968 - protein, 679 aa, Unknown
  Obtained from environmental sample
  DOMAIN (362)...(633): Methyl-accepting chemotaxis protein (MCP) signaling domain
  misc_feature (1)..(679): Xaa is any amino acid
MATSPLIQRHFLNPSDRDLRRIAFDEIYGYRRAFKSNSVFWSSNADKEFYFSEDNHYTIDTENPDNYWYKMTLYETEKYNFNINFNAELQQTLLFINAPVFDDQHKPIGLVGTGIDLTEFVNNIYQNYKGGAALYLFNAQGEITGSKDVDQIKNKTTLDKALGDTGGIILERAKSDKSQYFNVSEGVATVIQVPSLEWHLTAVLPITIADTLKSGMTLLFLLMMAAIAGIIIISYLFIAGLLKPMKNMVKTLDEIADNADLTKRLQFKHMDEIGVLAHDFNSMMEKIRTFVGTIKYKINALTNTGFELSSNMAKTSKSVDQISVDFDGMKSGMGKQEESAAVADKAVKDIEASIESLNSLIEDQSKSINTSSSAIEVMTANIHSVRNTLIENGKNVSELAAASENGKTGLQTVAEMIREIARDSEGLLEINAAIDNIASQTNLLSMNAAIEAAHAGEIGKGFAVVADEIRKLAESSGKQSKTTAATLKKIKASIDSITKSSNDILARFGAIDTSVKTVSQHEQNILNAMEEQETGGKKILESISRLRDITHSVKKGSDDMAESGNTLVKETDEFIKISQEAVEGMNEILKGINQINISVSHVNEMSIENNRNFESLKQETEKFNDTVDNEKQKILVVDDDSIHLEMVETALSNEYEVSTAKSGKEALGLFYQGLVPNLI

SEQ ID NO: 88969 - protein, 163 aa, Unknown
  Obtained from environmental sample
  DOMAIN (102)...(151): Sigma-70, region 4
  misc_feature (1)..(163): Xaa is any amino acid
INTRVSRIEDAEDILQEVFYQFTRVNNLINPIENISAWLYRTAQNRIIDHYKKKKDEPLPVSYDEENDEYIFDEISDIIYGEEATPEIEMLRSLVLEEIQNTLTDLPKEQRDVFELTELLDYSVKEVAEKTNAPVNTVLSRKHYAVKFLRKRLQELYDDVICK

SEQ ID NO: 88970 - protein, 357 aa, Unknown
  Obtained from environmental sample
  DOMAIN (191)...(299): GSPII_E N-terminal domain
  misc_feature (1)..(357): Xaa is any amino acid
DGSKTWKRAFKIALLGYSRKDFTYITRLINLIDLGKPIKLISGDLSKMHNVQCELVIAILDNVSNLDGYNNDVALVKQGSSNPPVICAARESDRQILDCYRSGVNADLIIFMPIHLRRFTAVIHSLAIDTGKVEAAPSKKNPVSLWSSFSFVPSASKVGDLFVKCELITKEDLDKALAHHKKTGMHICDALISLGIITEVQKLTCLADQLKTTVAVPRQYAAIDLNVAALIPEQLARRYNCIALEKYDNELVVAATDVLDLRMLNTLRDTTDMRITAVFGKKEEITASINRCYRDIAAHSDASRLAESIEDHVEFIKNRDEESGNEGTTTANTELGIIKLVNLLITNAIRDRASDIH

SEQ ID NO: 88971 - protein, 283 aa, Unknown
  Obtained from environmental sample
  misc_feature (1)..(283): Xaa is any amino acid
ARQYLAFTHADSPGIKHLRQLRQAGMNTIHLLPTFDIASIPEEPNEQKKPGDLAQYAPDSASQQAEIEKIRDQDAWNWGYDPLHWNVPEGSYAVEADGGKRTYEYRAMVGALHDLGYEVVADQVFNHTMANGQGKHSLLDKIVPGYYYRLCMRTGNVFDSTCCPNIATEHKMAEKLMIDSLVLWAKEYKIDGFRFDLMGHHTRANMLAARRALDTLTLAKDGVDGKSIYLYGEGWNFGEVKNDALFVQARQGNLGGTGIGTFSDRLRDAVLGGTPTEDAAIFA

SEQ ID NO: 88972 - protein, 261 aa, Unknown
  Obtained from environmental sample
  misc_feature (1)..(261): Xaa is any amino acid
MRELIWTDDRIEALSANLAKCNEFSDGGKAIIEELITRRTFAGEEMFYPLAFTSNTSRIEPKVRGAEAQRFNILDYLGNEGTLVLVDRERLDNAQESISREYHSLYMRSRREAEGREFPLPERLLFNFKELIEKRQTDKARKIISLLSIKSEAGPGIHRINIPCEPSRSFFGNINYLKDEFAALHASGWHIAVAAESEVQAERIESILVPHKSLSIIASPLSAGFSLPEIKLMVIQENEIFGRRKRPPRSPQTVHSSPIDT

SEQ ID NO: 88973 - protein, 106 aa, Unknown
  Obtained from environmental sample
  DOMAIN (1)...(102): Uncharacterised protein family (UPF0081)
  misc_feature (1)..(106): Xaa is any amino acid
RKSRPNYIDEWIRIISEENPAAIVFGLPLSIDDEETAMSGEVREFATAIGQRVNLPIHFIDESFTSKKASELMMHRKKKARRDKSLSDRIAACLILQEYIETSKSF

SEQ ID NO: 88974 - protein, 287 aa, Unknown
  Obtained from environmental sample
  DOMAIN (17)...(287): Asparagine synthase
  misc_feature (1)..(287): Xaa is any amino acid
DWTPAKPAISLPEALVQTEEILREAVNLRLTADVPLGAHLSGGVDSSLVTALMAERGPVKTFSIGFTQKDFNELGYANLVAKHLRTDHTEFTVTPDAIRIMPELIDSYDEPNADPSQIPMYYLCKLTKDKVTVALNGDGGDESFAGYERYLGMLYQSYFRKIPKALRLALYTAIRHLPENSAHRSFLRRLKWLCKVSLSSEAESYLQAELSFDEALKQQIYTGQMPRGRGAENFVETFTTAPADNLLDRLLYTDIKLYLNHDLLTKADRSAMHHALEGRSPLLDVRL

SEQ ID NO: 88975 - protein, 286 aa, Unknown
  Obtained from environmental sample
  DOMAIN (34)...(199): Integrase core domain
  misc_feature (1)..(286): Xaa is any amino acid
VRGSVENLFVRAGYTGVRRRRNLRGGGIIQNKVKPKKANEVWTVDFKGWWYTKNKERVNPLTVRDEYSKYILAIDVVEKGDTASVKHVFQRIFKKFGMPQYIRSDNGPPFANVLNFWGLTKLSVWWMTLGIQLDRDYPGHPEQNGGHERMHRDMKTELQGQIDGSLNEHQKVFDKWRKEFNEVRPHEALKMKVPADIYTKSKKRFCDENVELKYGRGFKIRMVNDRGFLNLNQRRIFVGNPFSGYHVGVKEFTDKPTEVYFGNYFLGTINQDTWLIEPSCTIMQVK

SEQ ID NO: 88976 - protein, 354 aa, Unknown
  Obtained from environmental sample
  DOMAIN (147)...(330): Phage integrase family
  misc_feature (1)..(354): Xaa is any amino acid
MRLYREGNLFPVKQYIPTFEEYAHNWWDWDACEYLKNQKGRKDITKAYADNCKAMVRNQILPFFGKTALDKISSEDINKWLLGFKDRTFADDNGKEIKKSYKNTYANTVFGTFWLMLNEAVNRKIIKANPAAPVKKLKNDRKPIEIITPAEVRLLFPQDWKKIWDNDRISYLGNKLAACTGMRAGEILGLRGEYVYDEYIHVCAQYDEYGYRPTKTKEKRNIPIAPVVLDEIRQLALENNNGYVFSLDGGATPVTRKLLYNKFHRALNKIGVSQKEVKRRGLSMHSWRHFFNTTLQMANVALSKVQSVTGHKSDRMTEWYTHFDAKEFAEVRGVQESLLLPEKPASKKQAKRTA

SEQ ID NO: 88977 - protein, 315 aa, Unknown
  Obtained from environmental sample
  DOMAIN (197)...(313): GTPase of unknown function
  misc_feature (1)..(315): Xaa is any amino acid
MAQQLHETREKQKRALLVSLSDDDTGELLGLVKTLELEIAGHEIVKIRERQPKFGMGSGKAEEIAGKAKELEADCLVFDWDTSPSQQRNWEDLSGIPVIDRQELIINIFAMRAVTREADLQVQLAELHYRLPRLTHKYIDLSRQRGGRYGTKGAGETKLETDRREIQKRIHKLEKEIENVAKQRQVQRRQRERQGATVCAIVGYTNAGKSSLFNALSGSAVLVEDKLFATLDATTRRFESAPGMEALLSDTVGFIRRLPHNLIKAFRSTLEETAHANLLIHVLDAADPNIESYFETTVSVLQELGAGEIPVITVL

SEQ ID NO: 88978 - protein, 344 aa, Unknown
  Obtained from environmental sample
  DOMAIN (53)...(344): Phosphoglucose isomerase
  misc_feature (1)..(344): Xaa is any amino acid
MNYNDFDKTAAYKRLAERASAGKEFNFKEILTAERVKECEVPLAEGLVYNWAAKAVDEKTLDALQALADEQELIAKYRALLEGETMNTGEGRKVLHQLLRSPDGKAATGKTVNHEGKDLGEFYLNELKRFSTFAEKVRSGEIGPAHGKRFSAFAQIGIGGSDLGPRALYLALENWAYGEGRKALRAEFISNVDPDDASKITASLPLEETLFVLVSKSGITQETLTNELFVKGKLKKAGLDPAKHMVAVTSETSPLAGNPSYLDSFYFDDFIGGRYSSSSAVGGVILSLAFGSDVFGDLLAGAAAVDRAALTNDIRKNATLLDALIGVWERNFLGYPYTAILPYS

SEQ ID NO: 88979 - protein, 347 aa, Unknown
  Obtained from environmental sample
  DOMAIN (153)...(317): Conserved hypothetical protein 95
  misc_feature (1)..(347): Xaa is any amino acid
INAAIAQCPFTFTSARAALGPPRFWLSVQFLVWGMDCRREMIIEALREVVTNINAADTKSGAAVTKDSSAVNDTADTPNSTAITYPAAFIPSGDLCGIYEKSAAHVRELEGLPLREGVLQGTFPEGGIVIFEGDLPFIVDLPQGQKTGFFLDQRDNHLLTGKYAAMLQKETGAELRILDACSYTGGFGLHALRAAGRLTMLDVSQAALETARKNAALHGVADRVTTVEANVFDELRNLARRKEQFDMVILDPPAFAKSRGSLEEALRGYKEINLRAIKLVRPGGVFITCSCSQAVDEILFKQMIASAAADAQRRLVQIDFSFQAQDHPVLVGYDESLYLKCGFYRVL

SEQ ID NO: 88980 - protein, 486 aa, Unknown
  Obtained from environmental sample
  DOMAIN (153)...(369): Nicotinate phosphoribosyltransferase (NAPRTase) family
  misc_feature (1)..(486): Xaa is any amino acid
MLQNTNLSSALFTDFYSLTMAQGYWKKGMKHRAVFEMFFRSNPFSGGFSVFAGLETLLEKIQAFSFSPDDIAYLRNLGSFDEAFLEYLAGFRFTGTIWAMDEGTVVFPNEPLIRVCGGLIECQLIEGMLLNTVNFQSLIATKTARVVLASGKASVAEFGLRRAQGPDGAMSASRAAFIGGASRTSNVLAGKEYDIPVFGTMAHSWVMAWPTEAEAFLAYAELYPDNSVFLIDTYDTLKSGTVSAIAAGKALAEKGKNFGVRLDSGDIHYLSVEVRKMLDAAGLQNATISVSNDLDEYVIKTLTDANAPVDTWGVGTQMVTGGKEAAFTGVYKLAASDDGKGKFTARIKFSDNPAKTTNPGVKQVWRIKDKDGMCVADVLALEDPEEPDLLVNGKTYSFWHPQADYRRFSHTLDREAEGLLKERFIDGKLTGESPSLPEIQNRVRRELESLDGSYKRFLNPHIYKVSVTERLRALKLELIKNYLGDL

SEQ ID NO: 88981 - protein, 279 aa, Unknown
  Obtained from environmental sample
  DOMAIN (20)...(230): Thymidylate synthase complementing protein
  misc_feature (1)..(279): Xaa is any amino acid
MGHCVVVEAENILDREFPVLDKGFVRLVDYLGGDERVVQSARVSYGEGTKSYREDAALIDYLLRNSHTSPFEQVVLTFHVKLPIFVARQWVRHRTARLNEISGRYSILKDDFYIPKAEDVALQSTDNKQGRSAEALDPALAEKVRSAFAEAQKSAYAAYSSFVNEGLARELARINMPLSLYTEWYWQIDLHNLFNFLKLRLDAHAQKEIRRYAEVLFEIAKNVAPRCCDSFKKHILDGVRFSGEEMAELQRRLEGKNGSELTGKNLERFEEKLKSGRQL

SEQ ID NO: 88982 - protein, 188 aa, Unknown
  Obtained from environmental sample
  misc_feature (1)..(188): Xaa is any amino acid
AEKQSPISPYDSLKTIRITKLGLWCLGLASEKPPKPVHEYQAIADRELFLVTVQGDSLERTVYLNKIGVKLGEDRWRISPASFISGCESKKQIEDRIARFKELIDPAPAPHWLELFDRAVIRAGLFGHYRNDVMVYNLPEDRKVSEELLRDTQLKGIAFRAEGGMLIVPSRNQKRFLALLSEHGIASF

SEQ ID NO: 88983 - protein, 281 aa, Unknown
  Obtained from environmental sample
  misc_feature (1)..(281): Xaa is any amino acid
ANEFAKWNGVDLVAAYYHPDLGLLIANPKVAEELANFGMLRKRELLVLYAGKGASPADASCQKAAELAVKFFEGKRAKATPDLLQGEFTVKALKKSIEEEAEEEAPVKAAKAPKKAAGRGRKAAGAKAGARATKAVALQASAEPDAAAPKESARVAPPVVTAAAPAISKGPMKMTPMYSVVVANELFHNGNVEAWKRIVASYSAKYPELQVYIYYEGERILDINSLFKWGKVKHGSSIQFAVSGNDIKDVAKLQRYLIQGASKQFEAFLHGPVNNVLKLFG

SEQ ID NO: 88984 - protein, 146 aa, Unknown
  Obtained from environmental sample
  misc_feature (1)..(146): Xaa is any amino acid
SAAQIAVRERHSFRVNGALRLLKKRSLVVLISDFYSINWEHEMDNLCRKHDVIALKISDPNELPFNGLITLEDPETGVRIEAPAGLDSFKESWAGWLEERSIQWESKCKKSGAAVLKLSTETDAPSALIKFFGSRSLNRYINRKKK

SEQ ID NO: 88985 - protein, 330 aa, Unknown
  Obtained from environmental sample
  DOMAIN (3)...(317): Branched-chain amino acid transport system / permease component
  misc_feature (1)..(330): Xaa is any amino acid
GIGMPLTLLASLAMGVIIGAYQGAWVAFAKMPAFIVTLSGMMLFRGLTYIITKVNPINPIDDGYKVLSFNTLDEVMHLGKIPVPYLARAGQTINGTSEVYQQTKLIFVEGPYFPMAIVFAVLVLAAFFLVEFTGRKKKIANGFEVTPFPLFVTQLVLISLLTLGLADRFARYMGLPIVVLVLGITVLAFHFLLNNTVLGRYIYAVGGNPRSASLSGINSEMVTFIVFCFMGGLTGLAAVVFTGYMNSALPQAGNLFELDAIAACYIGGVSAGGGIGSVIGVIVGGFVMSSINNGMVLMNLGTHYQYVVRALILLFAVFFDVYTRKKAGLS

SEQ ID NO: 88986 - protein, 268 aa, Unknown
  Obtained from environmental sample
  misc_feature (1)..(268): Xaa is any amino acid
MKTDKVLKIERHGYDFIPAEYLPQGADEYWQRNAQQAELFSKKTDSWRKLKPAEIEILVQNRNTCAKWDDFLVTDPFDPSLIRDSSFFGLVRIGVLQNVLLKHHDFCIPAGIRNSTIVSCDIGDDTAIQNCAFISNYIIGNNCILSRIDELQTTNHAKFGNGALKDGEDEEVRVWIDVMNEAGGRSILPFDKMITADAYLWAAYRDDTALTTKLAEITQKQYGSLRGSYGVIGSKAVIKSCLIIKDTAVGESAYIKGAKQLKNITIHS

SEQ ID NO: 88987 - protein, 375 aa, Unknown
  Obtained from environmental sample
  misc_feature (1)..(375): Xaa is any amino acid
MQTTNHAKFGNGIIKDGESEDVRVWIDVMNEAGGRSILPFDSMIAADAYLWAAYRDDTVMTDKLADITQKQYGSLRGAYGVVGSGATIKSCSVIKDTAIGSCAYIKGANKLKNLTIHSSSEEPTQIGEGVELVNGIVGYACNIFYGAKAVRFVIGRNSSLKYGARLIHSVLGDNSTVSCCEMLNNLIFPVHEQHHNNSFLIASLIQGMSNMAAAATIGSNHNSRANDGEIRAKRGFWPGLAVSLKHSCVFASFVIIAKGEYPSELNIPFPFALVNNNVHKNRLEVMPAYFWLHNLYALERNSWKSKTRDKRKVKNQRIETDYLAPDTAEEIIHALSILNGWLGEAGYSAEDMTGVDGIHVRMILCRHLEHSKRGQ

SEQ ID NO: 88988 - protein, 303 aa, Unknown
  Obtained from environmental sample
  misc_feature (1)..(303): Xaa is any amino acid
VECEASLDKHWSIHTWFCTADDKETIIWANFHGEDPRNGNVEINVRPFVFWPEKNLINNITVKGFTLKQAATNWAPPTALQTGLIGPHWAKGWIIEDNIISDSKCSGISLGKEISTGQNEWYRLKFKQGTQREREVIFRAAKGNWNKETIGSHIVRNNIIFDCEQAGVVGHLGAVFSLIENNHIYRINYKRQFQGAEIGGIKLHAAIDTTIRENVIHDCYRGLWLDWQAQGTHVCRNIFWNNTQEDLFIEVTHGPYLIDHNLFLSPFNYREMSQGGAFVHNLFAGKLCTLPEMSRFTPYHFPH

SEQ ID NO: 88989 - protein, 331 aa, Unknown
  Obtained from environmental sample
  DOMAIN (1)...(330): Glycosyl hydrolase family 10
  misc_feature (1)..(331): Xaa is any amino acid
MFGNIFNPSDVSSSAVINTALIRHYNVLTAENNMKPDQLSTGKGSYNFIPADRMVNAAIASGFKVVGHTLLWHSQIPRWQQNIDSTTALEDMKQYITDVVSHFKGRIYSWDVLNEAFPDGGYSANWKTSMRTNNPWFKSIGSDFVYEGFLAARLADPNAILYYNDFNTDQAAKALMIYDMVKEVNERYKAAYPGEKRLLIEGIGMQEHHNTNVSANAIKNTLNLFKQLGVKISVSELDVLIVTYQEFAPYGSGPNKQNSITGDTRINGLKKQAELYGQFFEVYLEFSDIIERVTFWGVTDDKSWRSAALPLLFDADGNAKEAYYSVIGSLK

SEQ ID NO: 88990 - protein, 365 aa, Unknown
  Obtained from environmental sample
  misc_feature (1)..(365): Xaa is any amino acid
FPGYCDIWLTEMENDLSGAKSGGIDKVILSAQDFTGCKGAEGSHAYKLNGFYYLFLIAFESGRRVELCYRASSLEGLWEGKKILDKGLGVRIDGVAQGGIVETPYGDWYGFFFQDRDAVGRVPVLVPMRWDNELWPVFGDSNGNIPVELEIKQAQDYGQNLYVSDEFNSDKLQLAWQWNHNPDNANWSLSKRPGYLRLKTGRTSRTIYHARNTLTQRTFEPACEGIAALEPVNMKDGDKAGIVLLQAVSGFVGIEQENGKKYIIMYTGDNENNKGMNAAETRHARLEFTGNRIYLKVSCRFRTDACTEERAEFSYSRDGINWQRIGTDVNMRWTMTHFTGARFGLFYYAAKTPGGYVDFDYFHVN

SEQ ID NO: 88991 - protein, 77 aa, Unknown
  Obtained from environmental sample
  misc_feature (1)..(77): Xaa is any amino acid
MPPNTPNEIIEPDDKIIKPVSELLKMNFFIPSYQRGYRWTKRQVTDLLDDICKFKPQKKDEWYCLQPLVVKKKIMNG

SEQ ID NO: 88992 - protein, 798 aa, Unknown
  Obtained from environmental sample
  DOMAIN (145)...(364): Bacterial extracellular solute-binding proteins, family 3
  misc_feature (1)..(798): Xaa is any amino acid
MEIIRSRRLRCCFLEGTTTINEVTSRLQGGYIITLVDSFGDAYDALKKGEVDAFFDESPTEAVFDVYDDIIAEDFLPVIYSPVSLSTKNPDFQPVISIVQKALHNGCIDQLIGLYKQGENEYHRHKLFMRLTEEEKKYIRNHPVVSIAAEYDNYPISFYNKYENKWQGIAHDVLRELESLTGLNFDIANDKNTEWPELLSSLESGEIPMITELLFSEDRIGLFLWPKSVIMTDNYALISKSDYPNVSINDILRIKVGLIKNTAYASLFNTWFSDHKNNVLYDNTDAAFDALESGEVDIVMANLSQLLMLTNYYERTGYKANFVFDFTSESTFGFNRNETVLCSIVDKALRLVDTRGISGQWMRKTYDYSAKLARSQRPWLISAAALFFCILVLLFILFQKNRRAGKELETLVQKRTNELVIQSAVLNAAFEATPDLIFCKDLDFRFTRCNKTFENYFNVREADIIGKRNVEALGLSAGATEQFSDLDRRVISEGRMFMVDEYMSSADGTRQLFETSKIPMIQNGRIIGLLAIAHNITERKAMEEQALSASRAKSAFLANMSHEIRTPLNAIVGMTTIGKSAADIGRKDYCFTKIENASSHLLGVINDILDMSKIEANKFELAPAEFNFEKMIQSAVNVVNFRIDEKKQKCTVHIDKEIPKNFIADDQRLTQVITNLLGNAVKFTPEHGSIELDARFLGEKNDLCTIEITVSDTGIGISPEQQKNLFNSFQQAEISTARRFGGTGLGLAISKSIVEMMGGTIRVKSEEGKGSAFTFTVLAKKNASADDVIKRFSGSGAG

SEQ ID NO: 88993 - protein, 391 aa, Unknown
  Obtained from environmental sample
  misc_feature (1)..(391): Xaa is any amino acid
MIESTETFIQEDGEIGGYSALFCEWLSQLFGIPFKPVMYEWGDLLASINANKIDFTGELTTTEERRKIYFMTDAIVERTVKTFRLADSMPITEIIRSRPLRCYFLEDSTTINDVTSRLDSEYKTITVNNYKAAYHALKTGEADAFFEENTSEAAFDMYDDIIAEDFLPVIYSPVSLTTKNQKLQPVISIVQKAMHNSSLGYLAGLYRQGETEHRRHKLFMRLTEEEKAYIREHPVISFAAEYDNYPVSFYNKYEKQWQGIAHDILKELEALTFLSFNITNEKNTEWSDLLLSLESGEASMISELLYSEDRDGAFLLPKSVIMTDHYTLISKSDYPDININDILRINVGLIKNTAYASLFQNCFPDHENTTIYENTYAAFKALESGENHMVM

SEQ ID NO: 88994 - protein, 537 aa, Unknown
  Obtained from environmental sample
  DOMAIN (74)...(229): Type III restriction enzyme, res subunit
  misc_feature (1)..(537): Xaa is any amino acid
VNQKSAIIRFKDGFVKMDPQEFSRLLKKSKEAKPDFNDFLKAHFSGDSVLAFDARETINNIFREQNFSIPAALTAKLRPYQKRGYNWICSLLYSGFGCILADDMGLGKTVQSIASILRLKEERLLKNGCLVVAPAALLSNWENELGRFAPSLKISRYHGSRRVLDRKRDVFLTTYQTAVRDAEKLKAEAFSLLVIDEAHLMKNADTRISRTVKQLRSQYRLALSGTPVENRLEDLRSLFDFILPGYLGDAAQFKEQYRVPIEVMRNRKQAETLRKITSPFLLRRLKTDKKIIKDLPDKIAANEYAVLEKEQAALYENVVTESIKKSKEMDPKERPSLVLSMLTSLKQICDHPRVFDKESPAVSALSGKSQLLLALLQEILANREKTLVFSQYVETLNCLEIIIKKELGEAPLVYHGGLSQNTRAGIIDRFQNDPAARILLVSLKAGGLGLNLTAASRVIHYDLWYNPAVENQATDSAFRIGQKRTVFVHRFITRNSFEEKIDAMITSKQELADMTVASGESWIARMSHNELKALFDR

SEQ ID NO: 88995 - protein, 77 aa, Unknown
  Obtained from environmental sample
  misc_feature (1)..(77): Xaa is any amino acid
MTAGIFINIAAHASEERGGKNETPWWRTLKKDGQLNEKFPDGIDGQKMRLEAEGHTIIQKGKRYLVENYEKKVCQLI

SEQ ID NO: 88996 - protein, 96 aa, Unknown
  Obtained from environmental sample
  misc_feature (1)..(96): Xaa is any amino acid
MADSALNTGNTRDALGFLKDSFPAVAVITIVLAIILPLPTVILDALMAINLIFSLMILLIVIYTQKPTDFNLFPTLLLVSTVFSLALNVSSTRLIL

SEQ ID NO: 88997 - protein, 89 aa, Unknown
  Obtained from environmental sample
  DOMAIN (4)...(79): Bacterial export proteins, family 3
  misc_feature (1)..(89): Xaa is any amino acid
MTIGDVVTVLREGILETVILAAPILLSALAIGLVVAILQAATSIQEQTLTFVPKLFVILGALALLGGFMFTSLGQYTTQLFMRIPEMAR

SEQ ID NO: 88998 - protein, 327 aa, Unknown
  Obtained from environmental sample
  DOMAIN (64)...(224): Radical SAM superfamily
  misc_feature (1)..(327): Xaa is any amino acid
MNYFQKSERLYDRAVSDGGAGISESDMREVAEWPLDQAMLLFAAADQARRRFFGGNVDPCTLMSVKSGGCGEDCAFCSQSARNQADVAVHGLCPTEEIVSRCKEAWSKGLPFCVVSSGKRLDKSEFQALCGALSECGDGGEKHASLGILGDNDFTALRNAGVVCYNHNLETSRDYFGKIVTTHGYDDRADTVRRAKAAGLRVCCGGIFGVGESWEDRIALCLELRGLGVDTVPINFLNAIEGTRVKPPKETPFEFLKIVSLFRLAMPKATIKVCGGREKNLGVLQPLIFQAGANGYITGGYLTTGGAGVDADDGMIEAMGLSRIPRL

SEQ ID NO: 88999 - protein, 476 aa, Unknown
  Obtained from environmental sample
  DOMAIN (256)...(324): PET112 family, C terminal region
  misc_feature (1)..(476): Xaa is any amino acid
MEYEMVIGLEVHAQLLTKTKLFCGCTTPFGAQPNAHGCPVCLGLPGALPALNRAAVEMAVRMGLSLGCRINTKSIFARKHYFYPDLPKGYQISQLDIPICESGTLPIVVDGRESAIRINRVHMEEDAGKLVHDQDVDSLFDVNRCGSPLIEIVSEPDMRSPQEAYAYLMGLKQILEYLEVCDCNMEEGSLRCDANISLRPKGESKLGTKTEIKNMNSFRNLEKALDYEARRQEEVLRSGGRVVQQTFLWNPNENRSVPMRTKEDADDYRYFPDPDLTPLVVEADWVDKMRETLPELPSPRRRRFEGGYKITAYAAEVLTGSRPLADYFERCVSSCDDAKSAANWVMTDIMRMMNDAKIESPFELKTKPERLGELIKLINNGGVSAKAAKKVLDLMESEDKEPGAVIREQGLEQVSDTSALEAVVKSVVDAHPAEVQRYKDGDKKLSGFFMGQVMKASKGAANPKEAVAILDRLILG

SEQ ID NO: 89000 - protein, 95 aa, Unknown
  Obtained from environmental sample
  DOMAIN (19)...(90): Glu-tRNAGln amidotransferase C subunit
  misc_feature (1)..(95): Xaa is any amino acid
MQIDDKLLAYLEDLSCLTLSDSEKTRLTHDLQEILDYMARLGEIDTNSVIERSHPFDNVNIFRDDETRPSFDRALILQNAPVRNDQMFIAPKTVE

SEQ ID NO: 89001 - protein, 395 aa, Unknown
  Obtained from environmental sample
  DOMAIN (28)...(395): Amidase
  misc_feature (1)..(395): Xaa is any amino acid
MFESGAILQSTALELSALIKAKKLSVVEAVSAYIESIEKNDGNYNAFLTVSKEKALARAKEIQSRIDSCESLSPLAGVPIAIKDNISTEGIKTTCASKMLGNYTPVFNAAVIEKLENAGMVVIGKLNMDEYAMGGSSETGAFGAVHNPWDLSRVAGGSSGGAAAAVAAGEIPLALGSDTGGSIRQPCAFCGTTGIKPTYGSVSRYGLLAYASSLDQIGPIGQNIDDCAALLSIISGPDTQDSTCVIEKPFEFGDRKTSSGLQGVKIGLPRNYFSGGIDEEVKNAVLAVAKEFEASGAIIEEFEMPLMDYVIPAYYIIACAEASSNLSRYDGLKYGYRSANAKSLSEVYRLSRSEGFGLEVKRRIMLGSFVLSSGYYDAYYKKALQVRSLIKDATR

SEQ ID NO: 89002 - protein, 293 aa, Unknown
  Obtained from environmental sample
  misc_feature (1)..(293): Xaa is any amino acid
GRGSSTLRALVWNETAQGRGFIDTDISEQSAHLFSAGVKDFAVADFPYPMIWIVTKAGELISCTINIRAGILAYARHPTEGKVEAVGVAPQAIGDVIFLVVKRGEKRCIEHIILEDLVNSNFSESHYVDAGEKRSYSSPTKTITGLQRFAGKTIRVFADGAVEPPVKVNEEGIAEIQTAVTTLHIGLPYQAAFTPNNRQVPANGTSMGKKRRIEKITLKLYKSIGGHAGTNENKLTELITKRFGEYQLGTAPEPFTGEIDVTVSGNIDTEGELIILHKDPCPFTLLALAERVA

SEQ ID NO: 89003 - protein, 88 aa, Unknown
  Obtained from environmental sample
  misc_feature (1)..(88): Xaa is any amino acid
LYNVFLGENSPLIAGRIDSQAHEMGARRMENFIPMMTGGLRKRPGTWYDGTTKGNKEARLIDWLLSDGTVLILELTAGAIRLWRDNRE

SEQ ID NO: 89004 - protein, 337 aa, Unknown
  Obtained from environmental sample
  DOMAIN (26)...(289): Respiratory-chain NADH dehydrogenase 51 Kd subunit
  misc_feature (1)..(337): Xaa is any amino acid
MSKIEKLLSENALSDPISVAEYVKTGGFEALKKASAIKPEDIIAEVKKAKLLGRGGAAYPAGSKWEHLLHIPETPKYIVCNADEGEPGTFKDKLILDKFPLKLLEGIIIAGFTFKAKAGYIYARGEYRRIQKQLIEAIKNTKEAGFLGKNILGAGFDFDIHVISGAGAYVCGENSALLNSTEGKVGRPRIKPPHLAEVGLFLMPTLVNNVESLASIPAIIEMGGDEYLKIGHPDSGGTKLICLSGHVKNRGVFEIPLGKLTLREIIYDPELGGGIPQGKKLKFFHLGGQSGPIGGPDLLDTVYSYTDLRKAGSWRRLRRYRCHGRDCFDPGIPAMRQ

SEQ ID NO: 89005 - protein, 294 aa, Unknown
  Obtained from environmental sample
  DOMAIN (90)...(117): 4Fe-4S binding domain
  misc_feature (1)..(294): Xaa is any amino acid
AACANDVWEGVSVVTNNSRIANIRKTIIELLLANHPQECLSCPANTNCKLQSLVQMYGIRETVLRRGAVNSGAVNYEAMKRQLPGEGGALLRDMDKCVKCGRCVEACQTIQTVRAINSSRRSVNYTITTAYNQNLEDSPCVLCGQCAAVCPVGAISENDQSAEAWTAINDSERRTAVQFGKTLCAELDIALGLPGGTVSEGKAVTALKRLGFDKVYDAQFAIDLAAEELSLELKNRVNKGGNSLQGKQNLPIISACSQSAVKFIGNFYPDLSPRLSPCRNPREIFCSLVKEEKT

SEQ ID NO: 89006 - protein, 963 aa, Unknown
  Obtained from environmental sample
  DOMAIN (15)...(177): Alpha-2-macroglobulin family N-terminal region
  misc_feature (1)..(963): Xaa is any amino acid
FYVSGAGWVRWDSDDVDAIALNTDRKSYAPGETAKIMIRSPLEKGKYLLTLEREGIISQKIIELNGSALTIDIPIEESYVPVIYAAISSYTVRSGPPNNTYYEPDLDKPRGIFGVTPIYIDNESRHYQIEIDTGRNAYRAAEEAQVKIKVLLNGKPAANTEVSFLAVDRGVLDLIDYHVPDPLASFYDPQHFPLGVRGADSRSLLIDPVTYNISDLQGGDSDNEEKGRDGADRFNGDMKERKDWRPTAVFEPYLVTGPDGTVTVKFKLPDSLTSYRCTAVAVGVNNFGIKERDLRVSAPLTAIAALPRKLRWRDTGTVSLILTNLENTAVEAGVTLASSAESGAETIIEVDGADSKTVKILPGASQEVSFKVAAVGVGVARLSFTLRSPQVNERILKTLIVDRPSLLETVTTIGNLDRDNPFVEEGMILPSLVPEGTGNVSVSLSASRLATLKEAVRYLLDYPYGCIEQRTARLLPIIAFGEYLDAFDLASPLRDFSPWNPQKLVEKELAELAKFQLADGSFPYWPGGSWGNLFVSMRMAHIAVFAKAKNMNIPDSLDTRKLLSYIGTESSRDSLIDPFLKGYSLWVRTMYKERIGSEISAFLKRGDELGISGWAFAGLAALEMGQKDLAASARDRVRRFIRPGTRSLDLTDTYERQGNFWGSDTDRYALALMLFNSLNSQGDDMTTRLATSLIERQRRGVWNNTASSFWPALAFGMLGDSESAEWKAANGAPFTAPPLAVTTSLGGESLFNAEFKTYGGVPVSHNWHFTEKPVLDLPRDALLPLRIERTGPGRLYYTASLRYGIPLELAGARDEGLGVFVETLDSEGNPVKNGRLQAGKTYTRRVIVSSSRDRTFVALRSPIPSGAEIVDAVFVTSSTVPPSQRDESEDEDDWRYYKPAPVRFLMDDEARFHWDFFNAGREQIEFRFRAVMPGIYPTPPATAECMYEEEIFGRAAGELIRIE

SEQ ID NO: 89007 - protein, 251 aa, Unknown
  Obtained from environmental sample
  misc_feature (1)..(251): Xaa is any amino acid
MASINASDRRLSSDNLKIIALSAMTLFHAADMLFPWWKRYLPDASAALLLLFSTGLGMTAMPLICFLAAEGACYTKNWKKYLLKISLWAVPAHIAYTLAAAKPLNPFAAPFIMHTSVLWTISCGIGSFFALMHRTQFGIELMLLLLALGLYGDWGICAAVAILCMALTRNDFKKQMLAMSLCFGIGLIYTFLQQGLALALVQACFLFSIPVLKRYNGKLYNSKPLPRFAFYWYYPAHLFILAGIRQIINNS

SEQ ID NO: 89008 - protein, 401 aa, Unknown
  Obtained from environmental sample
  misc_feature (1)..(401): Xaa is any amino acid
FKQGSWNKEIPAAKPHAKEKKHKEEKLEELDAASDQGYGNEYKTIQEMSDKQKVERINENKTRLDELLAKKDVKQEVVTEALVDTTKSAALINHSALENAIYHADDVAKKLTQDLVDSTYEMVKSSAQLISEDIFKNELMNTMVEKSNGTVIQHMTRVYLNGIAFLSYYNKLVSGSSAIQRLRINFVNDYRKYYHTLLPHIDIDDINLERVFYGGMRAITPDDYMKWAVGFLIHDIGKAPAVEYHEGESSYDRNIVIDHVKKGYNYTTTKTNYPKEASLIIGYHHEYYGDPDGYGFFRAYFAKYKKDNPNAKQDYCIGYELEPVMDFEVLAYFPAKVLEIIDVFDSLTDPHRAYRHPMSHKEAIKFMRDEFINKHHKLDLVLFDLFEMFIKEKEKEEEEEK

SEQ ID NO: 89009 - protein, 367 aa, Unknown
  Obtained from environmental sample
  DOMAIN (23)...(365): DNA gyrase/topoisomerase IV, subunit A
  misc_feature (1)..(367): Xaa is any amino acid
VAFIKNIFDRNFLEYASYVIKDRAIPDLEDGLKPVQRRILHTLFEMKDDKLYKVASVVGECMKYHPHGEASIGPALVVLASKDYFIDTQGNFGNIYTGDEAAAPRYIECKASSLAKDIFYNPKLTPYADSYDGRNKEPVLFPAKIPVVLVMGVEGIAVGMSTKILPHNAIEVLEAEKACLGGKKFELYPDFPTGGLVDVSDYRDGNGKVLVRAKLDSSDPKRIVIRELPYGSTTESIIASIEAAAKAGRIKIQGINDFTTENVEIEIKLARGVYAQETVDALYAFTECEQSISVNFLVIKNGLPAVMTITEVIKYHAKQLVKILTKELELEKQELLDKLHLRTLERIFIEERIYKSIEKMRTADSVR

SEQ ID NO: 89010 - protein, 353 aa, Unknown
  Obtained from environmental sample
  misc_feature (1)..(353): Xaa is any amino acid
LLFFDEIQSCQPALAKIRYFYEKYAELHLVTAGSLLEFALEEISSFGVGRIRSLFMYPFGFDEFLTALNEEALSEAVKTASPEKPLTEPIHQQLLGRLKIFFICGGMPEAVSQYARKRDLLSGELVLNDLITVLKTDFAKYRKRTPLILLNEVFESVMCQTEGKFVYERAAPGTQSAAVRQALELLIMAGLVHPVTHTAANGIPLGAEANRKYRRMIPCDTGLFLHTLGLRSEILPSADFSAVNRGSLAEIFIGLELLKAASCFTPQELFCWQRSANPGSSKGNAQVDFLVQRGSSIIPIEVKSGTQGSMQSLRLFMTEKHIERGVRTSLENFGRYEDIDVYPLYAIGNVVRG

SEQ ID NO: 89011 - protein, 413 aa, Unknown
  Obtained from environmental sample
  DOMAIN (144)...(233): Pyridine nucleotide-disulphide oxidoreductase
  misc_feature (1)..(413): Xaa is any amino acid
MKYVIIGNSAAGIGAVEGIRLMDKDGEITIITNERHHTYSRPLISYLLLGKVTREEIKYRNDSFYKDYNCKLLADTTVTAIEAAEKNVVLLDGKKIPYDKLLVATGSSPFVPVFEGLDTVVNKHTFMSLDDADRLDAALAEDKRVLIIGAGLIGLKCAEGILKHVKHITVVDLAPRVLSSILDDQGAKLVQNHLESKGIEFKLAANVKKFTFNQAYLEGGEIIDFDILVLAVGVRPNTALLDGIAKIERGIVINEKSETTAPDIYAAGDCTQSLDVSSGQSKIMALLPNAYMQGECAGINMTGDNASDCARFDKAIPMNAIGFFGLHIITAGNYTGDVYTDNKDGNFKRLFYSENKLNGYILIGNVEKAGIYTSLIRERIPLDTIDFALVCEKPGLMVFTKEDRKVKLGGASS

SEQ ID NO: 89012 - protein, 329 aa, Unknown
  Obtained from environmental sample
  DOMAIN (119)...(329): Binding-protein-dependent transport system inner membrane component
  misc_feature (1)..(329): Xaa is any amino acid
MYKWYALKRILRGVVMYALLILLFSVLFNSVNEQTQRTQINEQVKMESMSLRNVRPEQLLAWRENREAQLISLYRLDRPFGERIIFRTINILTFNFGKSTHIKSAKGEQDVLTIILEALPKTMLLFTTATIFELAIGITLGLLKARKPGGKLDRSTSFITMVVYGMPAWWLGMMLILLFVYIFKLFPSGGVVSTPTPLGFAGLLDRIWHMVLPVTTLVIISFWSLSFIIRNIVLGVLQEDYIMSARARGIGEKSILFGHTLRTSAPPIVTMTLLSLLASFSGAIIFEGIFSWPGLGNLYWIAVQQNDIPVLMGDLAMSTGLYLAGLIFL

SEQ ID NO: 89013 - protein, 182 aa, Unknown
  Obtained from environmental sample
  misc_feature (1)..(182): Xaa is any amino acid
DVPASIKDFISAADAVKRYNAAIDFINKYSHALISNGPFIVSEVNTTANSVTLEANRNYYYKSDYWPNYFKQEITRIENVRAPANPSRSSDAIFDISVSSFVYPEADTAPLTNKGKVELRLQLPNGSEKVYNASFTRAGQFTGTIPASDMASLAAGQSYTVVIMSSIADEAPSVAVSDLVLF

SEQ ID NO: 89014 - protein, 92 aa, Unknown
  Obtained from environmental sample
  DOMAIN (4)...(77): AsnC family
  misc_feature (1)..(92): Xaa is any amino acid
MLTAFVSLKVRRDSISEIASQLAAIDGVSEVYSIAGRFDLTAIIRVRDCDDLAEIVTNKMLKFEGILDSETQIAFRVHSKHDLESMFSLGEN

SEQ ID NO: 89015 - protein, 265 aa, Unknown
  Obtained from environmental sample
  DOMAIN (55)...(232): Radical SAM superfamily
  misc_feature (1)..(265): Xaa is any amino acid
MTHYKNCRLCPRNCGINRLAGEVGFCGETAELRIGAAVIHKGEEPPLVGTGGSGTIFISGCNLKCAFCQNYQISQGENAKEATTAASLGRAVSPREFAEICAALCEKGAENINIVTGSHAVPGLIEGFIEMRKAGVELPILWNSSGYDSVEALELLKDYIDIYLPDLKTLDSEVSKKFFNAPDYPDTAAAAILKMIELTEKKSPNSAREKIIIRHLVLPGFLESTRSVLRWFADNVKNSGNAFRDDAIHAYSWNKTGKCRKIIVG

SEQ ID NO: 89016 - protein, 498 aa, Unknown
  Obtained from environmental sample
  DOMAIN (129)...(156): NHL repeat
  misc_feature (1)..(498): Xaa is any amino acid
MNNAMSSYSFHGIFCAPVRKILFILFFYSSFLIPNSSLFASPTNYTYNYDFWEEQVASPDAYYVSAYVLGTGLGIGNFRDPQGLFVRDNRVYICDSGNNRIVLLAHENGEHRLVSVTNSVTINGAESPFNYPMDIFESRDGFLYIADTNNHRILKLDRDWNYISSILKPDDESIDKDAEFLPLKLVVDFANRLFVQARNINKGLMEFDSRGLFAGYMGANKVQVNIIDYVWKLIATQAQKERMTLFVPTEYSNLCLDRDGFIYVTNASGQTYPIRRLNAMGQDILIRNGYEDPVGDLAYGNAGGVTGPSKFIDVAAMDNDSYACFDFVRGRIFVYDFQGNLLYAFGGLGNREGRFLKPVALAQMGHSLYALDSGAAALTRFDLTGYGEKINRALDEYQAGRYESSAKVWEEVLKMNGNYDLAYIGIGRAALRQGEYQKAMKYYKLKHFREGYGKAFQLYRKQFMEENLWKILLVLAVILLAPPLIKTAIKISREVREA

SEQ ID NO: 89017 - protein, 203 aa, Unknown
  Obtained from environmental sample
  misc_feature (1)..(203): Xaa is any amino acid
LSVESGTDMEKKLLYVHPIHANRTLKTLNFPLAICEAVLQHHEMEDGSGFPQQLKGNAIGLYGKILVVAGFYEAFSTENIDGTKCSHSGIVQILKNGGCFDVSVIRALVNSISIYPVGIYVLLSNGKRGQVSDIDQENPRFPLVKIYGKQSSNETVKTSDELFIVRPLTSEEFETYVKEIENSVKINKDRNLKSLFNRRFYQS

SEQ ID NO: 89018 - protein, 289 aa, Unknown
  Obtained from environmental sample
  DOMAIN (159)...(192): Tetratricopeptide repeat
  misc_feature (1)..(289): Xaa is any amino acid
RQLRPTAEETGYGEVNLTDGGGQRQVPEVSVNARHADEYRDGPLVDRVELSSAVNAVSATLSATLSATKSAPVTLKTQDTAITLNTAPNDADAYNKSGDEYFYKRDYDRAIEEYTKAIQIDPNNAYAYNNRGVAYRNKGDNDRAIADYTQAIRIDSNYAAAYNNRGYVYNKNGEYDRAIADYTQAIWIIPNYAVAYNNRGGAYFDKKEYDRAIADYTKAIQIDPNYASAYHNRGFVYHYNKGDYDRAIADYTQAIRSNPSHADAYYNRGIAYPSVLSETGFKMIEPYGF

SEQ ID NO: 89019 - protein, 178 aa, Unknown
  Obtained from environmental sample
  DOMAIN (16)...(160): Integrase core domain
  misc_feature (1)..(178): Xaa is any amino acid
ENTDTGAERAQPVLPLIRNVPERQSKDYVRHGTTTLFAALNILTGKVIGECNATHSSQDYIRFLKKVDKACSPKKVLHIVTDNLSAHKTKAVYDYVESNPKRFVLHFIPTYSSWLNLVERWFAEITNKSIRRGSFESVDELITAIKKYIKSWNKSGRTFTWTKKPDVILAKIHKAQSF

SEQ ID NO: 89020 - protein, 279 aa, Unknown
  Obtained from environmental sample
  DOMAIN (76)...(144): PET112 family, C terminal region
  misc_feature (1)..(279): Xaa is any amino acid
MRLQHGGGQPALRRHISLRPKGESKLGTKTEIKNMNSFRNLEKALEYEARRQEEVLRSGGRVVQQTFLWNPSENRSVPMRTKEDADDYRYFPDPDLMPLVVEAAWVDGVRETLPELPVPRRRRFEGDYKVSPYAAEVLTGSRPLADYFERCVSGCNDAKSASNWVMTDIMRMMNEAKTENPFDLKTKPERLGELIKLINGGGVSAKAAKRVLDLMESEDKEPDAVVREQGLEQVSDASAIEAVVKGVIDAHPEEVQRYKGGDKKLTGFFMGQVMKASKG

SEQ ID NO: 89021 - protein, 436 aa, Unknown
  Obtained from environmental sample
  misc_feature (1)..(436): Xaa is any amino acid
RYGNLSNDSSVTTLTNISEIRGTFIDEYSNVKAAWYDIYRSGVTATTANTAITLTDPLTSASWIITLPDTMIDGAYNLVIRVRDDLDNERTAAVKPFRLDRKTPLIVMNPALEEFYNGKTVTTITLKGQVTDGDLRTGTNSMSYRLNSETATPVYFAPSDAGSAATNGVYNWGSDNSLTITLSSLPEGLNTIYIYATDRVTDTNPAGTRTTMTPFTFTYDKTAPTITLSSIKNQPITNSQWNSGNPDDTLFGSITTLSDSANLVIRGVFTDNATAVGLKEAGENGRYYFQYRIYQSNSLSNPTAIGLKEIYMGTQPLTTQNWSIDLSTLTATPQVSSFTAEGVYWLDIEVVDAAGNKNDTEVKNVAYTIDTKPPKIAISTGEKLDPVRAAFELKGTIDEANLRNVVITVDNEGSTITLATFTPGELTDGTTPGKYD

SEQ ID NO: 89022 - protein, 374 aa, Unknown
  Obtained from environmental sample
  DOMAIN (44)...(232): MAC/Perforin domain
  misc_feature (1)..(374): Xaa is any amino acid
DINEYMRSITAKVSKSVNADLMKVVSFSAEVGANFGTERTTKAEYAFTTSTSRIVTAAYNIGNKNGLDSFFTQDFANDLGTMSADQLIKKYGTHVMLGAMLGARADYHLSVVKKEQNNITNLGAYAKSKAEATYKGVTAGPGSSVEVDTKYAQYFDTQTTVTNTKVVGGKVQYGQFINDMQNYDKWIESIDGNAVWVDYYPDSLVPISDLVTDKSRSDAIMRAIINRCKGKEVIVAPFSPLSTEYSRLLTGETKFNKSDNGKREWSINSIFNKDELKSLGYTQLHILLTCTIEQRGLNSGSLRVQIVSSNGKLLEGDTRERNPDFRTPEPFKMDIWRPIDDYNSLTVKLTVPNGNPFLTDYIVKDLKITITATN

SEQ ID NO: 89023 - protein, 250 aa, Unknown
  Obtained from environmental sample
  DOMAIN (2)...(249): Hsp70 protein
  misc_feature (1)..(250): Xaa is any amino acid
MSALDIDGKKYSPQEISAFVLQKMKQTAEDYLGEAVTEAVITVPAYFNDAQRQATKDAGKIAGLEVKRIINEPTAASLAFGFNKDSKKDKVIAVYDLGGGTFDVSILELGDGVFEVKSTNGDTHLGGDDFDRRIMEWLIAEFKKDTGIDIGQDRMALQRLREAAENAKIQLSSMQTTEINLPFITADQGGAKHLQKSLTRAKFEQMVEDLLERSKEPCKKRLRTRVLPRNRLTRLFLSAVPPVFPRFNRL

SEQ ID NO: 89024 - protein, 100 aa, Unknown
  Obtained from environmental sample
  misc_feature (1)..(100): Xaa is any amino acid
DKVNAADKAKTEEAIAALRKALQSGDIPSIKEKTEALKQVSYKIAEEIYKQQAASGQGGAQGAGPDMGGFNPNMGAGGSSSGGENTKSAEDADYEVVDDK

SEQ ID NO: 89025 - protein, 94 aa, Unknown
  Obtained from environmental sample
  DOMAIN (4)...(92): Protein of unknown function (DUF497)
  misc_feature (1)..(94): Xaa is any amino acid
MSELIFEWDEDKNKLNKKIHGITFEDAKFVFNDPFKIILPDLYHSEKEERWLAIGMVNRVLFVVFTEKDNNVIRLISARIGTKAEEKLYNEQNS

SEQ ID NO: 89026 - protein, 315 aa, Unknown
  Obtained from environmental sample
  misc_feature (1)..(315): Xaa is any amino acid
MNYKYVLYSIGKLLQILALVLTAPALIAFFETGGSFWTRITHTNLTGFLIAIAVSLAAGTIMAAAFRKDKGRIDVRGGFAIVTFSWLATTFIGAIPFFTFLSAHSGAAPFAVWTDAMFETMSGLTTMGATVIADVESLPRSILFWRILTHWIGGMGIVTLALALFPAFGVVAYQMFRGETTGPSKERLRPRLAQTAVILWGVYAFFTLLETVLLMAGDMPFFDAVCHSFSTMATGGFSTRNASVASFDSAYIEWVIIAFMILGGTNFFIHYRIIFYNDWETLKNNREFRLFAAILVAASALCVIFILTQGLHSSE

SEQ ID NO: 89027 - protein, 217 aa, Unknown
  Obtained from environmental sample
  DOMAIN (2)...(154): Calcineurin-like phosphoesterase
  misc_feature (1)..(217): Xaa is any amino acid
GLLINKVKDINPDLIVLSGDIIDDVVPMFGTQLFLSGISDIAPIFYVTGNHEYMSRNILKIREELASFGVIILSDEYKTIKINDNIIVIAGIEDPYKKKYETPLYNQNESMERAFRELDKIQLYKILLAHRPEKIEIYKKYSFDLVLSGHAHGGQVIIPHIINGLYAPHQGFFPKYAGGIYDHGRTTHIISRGLSITPLLPRIFNPPELVVITIESK

SEQ ID NO: 89028 - protein, 414 aa, Unknown
  Obtained from environmental sample
  DOMAIN (241)...(414): Peptidase M16C associated
  misc_feature (1)..(414): Xaa is any amino acid
VFLAGNIPTEKQLSFLNEQFFSKIDGGKECAPVNKTERWKEPKEFTVPCPAEGEAKSTIFLSWLCSDVTEIEEGFALGVLTEILLGHDGSPLTRKLIESGYGEDITPVSGLETEIREALFVVGLKGVSGDAQQMGQKVEKLIMDELKRLAAEGIPPEEIEAAVLSVEFGQREIRRSSGPFSLVWMRRALRTWLHGGKPWDGLLLTPALETLKQRLAENNRYFESLIQKYLLDNPHRALVMLEPQKDFLPQQEARLAEELAKTEQGLSDTEKKRITEKSAALEKIQSEGDSPEALATIPHLSRSDLSPEPEMIPRSLEDLQGIPALFHDLYTNGITYIDLAFPLDILPPEDYSWLPFFARAAISVGLPGMDYGEVSSLLARTVGGFNAVLHTGSAAPVADSPVIQTPRRGARRGV

SEQ ID NO: 89029 - protein, 276 aa, Unknown
  Obtained from environmental sample
  DOMAIN (7)...(181): short chain dehydrogenase
  misc_feature (1)..(276): Xaa is any amino acid
MKNIKDKLILITGGASGIGQLMAFAFAEKHAKVIVWDINANAMKAMEDEARGKNILIRGMVCDVSDRNAIYSQAQKLTEEFGPVDVLVNNAGIVSKKGENVVGPAFLGIPDENIVKIMNINALSLFWTAKAFLPSMIERNSGHIVTVSSSAGIIGVKGLSDYCAGKFAAFGFDESLRMELRRMKSKIKTTVVCPFFINTGMFEGVKTRFPLLLPILKKEYVVKRIVKAVLKDKKRLIMPRFVYTVFLLRILPVSIMDAIANFLGISHAMDDFKGRA

SEQ ID NO: 89030 - protein, 117 aa, Unknown
  Obtained from environmental sample
  DOMAIN (11)...(117): Pterin binding enzyme
  misc_feature (1)..(117): Xaa is any amino acid
MHLKPYIVMGIVNVTEDSFYDGGRYINKGAAVEHALRLVEEGADIIDIGGCSSRPGAKFLPAAEEAGRVAPVISELIKRGVSVPISIDTVWSSVAEAAVGAGACWVNDISAGRIDPD

SEQ ID NO: 89031 - protein, 391 aa, Unknown
  Obtained from environmental sample
  DOMAIN (251)...(385): ATPase family associated with various cellular activities (AAA)
  misc_feature (1)..(391): Xaa is any amino acid
GLAFDDNGKGGGIGGGGGQKPPLRRPDGGNADKRAPAGGRSVLVWLLIIAAVFFGLRSMETFGSQREVRLTYTQFLELLGSAGGGAGVVEAVVMQRSDGRAVLRGRVGNPAALAVAASASRGAAGSGAPSSHFVVNLPFLDSEMLRVWDAAGFPYTFEQEKIWGNVLVQIAIIVAVSIFFYFLFIRNMQSAQRGMFSFGKSRAKLHNIDRPQVTFNDAAGVEEAKAELAEIIDFLKDPKKFKKLGGKIPKGVLLLGPPGTGKTLLARCVAGEAGVPFLSMSGSDFVEMFVGVGASRVRDLFENAKKNSPCIVFIDEIDAVGRQRGAGLGGGHDEREQTLNQMLVEMDGFEPNSGVILIAATNRPDVLDPALLRPGRFDRQVVVDVPDVRGR

SEQ ID NO: 89032 - protein, 333 aa, Unknown
  Obtained from environmental sample
  DOMAIN (106)...(332): Glycosyl hydrolase family 3 N terminal domain
  misc_feature (1)..(333): Xaa is any amino acid
MIRFERSNIALKRLLCVICVIIVSPLFSLSFNDPGSPEELAAAIERAMTDEQALAQVFMLGWVGEEPSPLIMDWIRIRNIGGIKIFGWNTADTQRLAKTVGELQKASLAGAFNIPLLIATDQEGGWIRHVKGSTSETPGNMAIGASGYPRDAYLSGLYIGKELALLGINMNFAPAVDLFTNHDSQLIGPRAFGSDPVRAGILGAAFVKGQIDSGVIPTAKHYPGHGDTDLDSHGTLPKIEITFEALWNRELVPYRMLAQVGLPAVMSGHLAFPLTEAKGAPASLSPWFLKDVLRDKIGFNGVVITDDLMMVGATSWMGTLSRTAKQAIMQVTI

SEQ ID NO: 89033 - protein, 152 aa, Unknown
  Obtained from environmental sample
  misc_feature (1)..(152): Xaa is any amino acid
MDEEFYKFTVNRFLKYVRFWTTSERHNTDTPSTPGQWDLAKALVEELKSVGAKDVTLTDHCYVIARLPASTGKENCPTVGFLAHLDTAADVSGKNVKAFLVENYNGKPIDLSFGQNLDPALDPMLAAHKGKAIIHTDGSTLLGADDKAGIAI

SEQ ID NO: 89034 - protein, 413 aa, Unknown
  Obtained from environmental sample
  DOMAIN (135)...(410): Peptidase family M20/M25/M40
  misc_feature (1)..(413): Xaa is any amino acid
MLMNDEFYKLTVKRFLKYVRFWTTSDRHVAETPSTPGQWDLAKALVEELKGMGIKDVMLTDHCYVIARLPASKGKENCPTVGFLAHLDTAADVSGKDVKACLVENYDGKPIDLGGGQSLDPALDPALAEHKGKALIHTDGSTLLGADDKAGIAIIVAAAEYLLNHAEILHGPLELIFSPDEETGKGLPEFPASDVHAKVCYTLDGGPLGELEWECFNAWAAQIKFSGISMHLGQARGVMVNAALMASVYAAMLPRNESPEATDGYYGYYCPLSIRGDVENAELEVFIRDFDKKEGERKIAALDTFARAVEAQFPGGKIEVSSKVQYLNMKEKIGSHPEVIEKLRQAFLNTHVEIKEKPIRGGTDGSRLTEMGIPTPNIFTGGRNYHSRLEWLSVPEMIASCRLVVELIRLWGG

SEQ ID NO: 89035 - protein, 117 aa, Unknown
  Obtained from environmental sample
  DOMAIN (6)...(92): Ribosomal L25p family
  misc_feature (1)..(117): Xaa is any amino acid
MEKIALAGKIRNESGKNSSRRIRAAGRIPAVVYGGPKHLSLSIDRHAFESKFKHISVNILIDLDIEGEGTHEVLIREYQRDKVRGTLIHLDFYEVMKGHKLRTRVPLHFEGTPVGVR

SEQ ID NO: 89036 - protein, 442 aa, Unknown
  Obtained from environmental sample
  DOMAIN (312)...(428): Carbohydrate binding module (family 6)
  misc_feature (1)..(442): Xaa is any amino acid
TWAIDETGKKAATTINASGSLTVAADETLTSLTVRAASTMDNTKSGTAAVTVTENIFNGGETLTSTSAEQVTRKVNGYDYELWNQNKQGTTSMTIPASGSSANGGIFKCSWNDIENVLFRAGRKYNKTQTHSQIGTFSIDYEATVSITGDVGYLSVYGWVSGGSPDDLIEYYIVERRGSYNPGSAGTNKGTVTIDGGTYTIYETTRTNQPSIEGTKTFKQYWSVRTSKRTSGTISVTEHFKAWEKQGMTLGKLYEVALTAEGYQSNGSAKITSHTLTIGGSGSSSDSSNSGSGNGGGSGNGSSTTTGATKIEAENMTKSGKYTGNCSSPFTGVVLYANDDKVSFSQSFANNSHNFKLRGASSNSKEAQVELRIGGTSYGTFKFSGTSPAEKTITAAHNKGGSTATVELVCVNDNDTWDVLIDWIEISASGNSSGSSGNGSGS

SEQ ID NO: 89037 - protein, 368 aa, Unknown
  Obtained from environmental sample
  misc_feature (1)..(368): Xaa is any amino acid
MKLIKKLLGITAIIAAVGFITLPLTGCPAESDDGGKETTIIPDNGKTGDGDGKTHITVATIEITAPSKNAIPATTIERESERFTAGTVTWSPNDNPFKGETIYTATVTLTAKSGYTFTGLTSADAKINGSAADLTNNTGETVTLSHEFPATLKKAVTKIDILTEPSKLTYTHGDTSDLTGLKVKLTFDDNSTDVVIASNFSDKNITTTPSNGISLERSTYNNKPITISSGNEEEETTGVLNISAKSITDLTFKPISEETYTGKEIKPEVNVTHTVQTGTTRELKEGTDYTLSYSNNINVGTNTAKVTITGKDDYTGSKDLYFTIIPDPDLCEHDWVWEATTPATYLADGIETGTCSKCNEIITRPIPQ

SEQ ID NO: 89038 - protein, 261 aa, Unknown
  Obtained from environmental sample
  misc_feature (1)..(261): Xaa is any amino acid
NIPLREGIITKLYSPEDDNNIKIGERVFYTRRNARYIDTMRNLIESINNDYKKYFLAPLLSEASVHSNTSGVFKGFYKNKETGIGQFGGSNSDALIRIKGEITLPFPIFSNFSCDSIVYNGDSNEIIKNAQEVDLAYLDPPYNQHPYGSNYFMLNLILENEYPENMSNVSGIPGNWNRSAYNKKQFALNSLTELVSNIKAKYVLISFSSEGFITLDEMKNVLQKIGKLEILETRYNTFRGSRNLRNRDIHIKEYLYLVEKK

SEQ ID NO: 89039 - protein, 237 aa, Unknown
  Obtained from environmental sample
  misc_feature (1)..(237): Xaa is any amino acid
LAKLLQKEIIKYYEDGKAYPSIKAKESIDFLKKYENGLNTPGFLEIWFNSDNKAEKYFDFNGAKLPDINNDIVQMNELLGIFRDTFLFSCFLDDNYNKALVEQFDRIMPEGPYGYIDVDFDVTIKRNDVVIDAGAWIGDFSAYAASKDATVYAFEPVNKTYDTLVKTASLNKNKIIPVKKALGKENGEMEITIPNKDSGSSSFYLLKGGSKETIEVITLDDFIENEMIKKVDFIKAD

SEQ ID NO: 89040 - protein, 352 aa, Unknown
  Obtained from environmental sample
  DOMAIN (147)...(350): Binding-protein-dependent transport system inner membrane component
  misc_feature (1)..(352): Xaa is any amino acid
MIFRKKIDDALNEFSQNVKPVSLYRDAWNRLKKNKMAMIGIVVVSIYFIISLLVPLLPFYNYAQQEMSHINMPPSFKPAGEVMIRTREAYLAKLMAKEKRTEYTAVEKEQLQTMRREAETNPVNKKVYIFGTDVLGRDLLTRVIYGGRISIGIGIVGTLTAMLFGTFYGAIAGFIGGKIDNVMMRIVDVIYSLPYLMLVIVLMALFGGKSIFILYLAIAMISWLDLARVVRGQVLSLKNSEFIEAARSAGAGTWRIIWKHLLPNIVGLIIVYSSLALPTFIINEAFLSFLGLGVSAPMTSWGVLIDDGTKVMALYPWLLVIPALTMSFFIFCMNFLGDGLRDAFDPQAKNRL

SEQ ID NO: 89041 - protein, 267 aa, Unknown
  Obtained from environmental sample
  DOMAIN (3)...(260): Indole-3-glycerol phosphate synthase
  misc_feature (1)..(267): Xaa is any amino acid
MTILDEIAAKTHLRVERAKENAPLDLMREKALGTCQARAGDAMPFEKALTAPDLSFICEVKRASPSKGIIAESFPYLEIAKEYETAGAAAISVLTEPEYFLGSDRYLQEIAAEINIPVLRKDFVIDPYQIYEAKLLGAQAVLLIVALLDAKALEAFIKIASEVGLSALVEIHSEAEVEQALEAGAKIIGINNRDLKTFKVDTGITTRLKKRIPAGIITVAESGIKSADDAKAMKEVGVDAVLIGESLMRSADKKQFLEELKAAAGGR

SEQ ID NO: 89042 - protein, 94 aa, Unknown
  Obtained from environmental sample
  misc_feature (1)..(94): Xaa is any amino acid
SYEIEPEQYGFKRCDKSALIGGTPEENAQITRNILSGEKGPRRDAVLLNSAAAIHIARPEISIEEGIKLSAETIDSGKAKAQLEQFIKLSKEKA

SEQ ID NO: 89043 - protein, 313 aa, Unknown
  Obtained from environmental sample
  DOMAIN (1)...(304): EPSP synthase (3-phosphoshikimate 1-carboxyvinyltransferase)
  misc_feature (1)..(313): Xaa is any amino acid
MEGRLPARPLTGLYEEMTSNGCKLSEQGHSSLVLGGKLKSGNYYLPGNISSQFVSGLLFALPVLEGYSTISVTGKLESRPYVDMTLDALRLFRITVHEEEKPRLTFCVTGNHTYRSPKTVQTEGDWSNAAFWLCAGAIGTSGITCTGLNKDSRQGDRAIAEILKKFGARVSVDGGAVTVFPNDLKGIEIDAKDTPDLVPVLAAVASTAQGETVIRGAERLRLKESDRLKTIAASLSGLGADIKETDDGLVIHGKKKLAGGVTQSFGDHRIAMAAAVLSGACTNPVTIQNAEAVKKSYPAFFNDFHITLGGIAK

SEQ ID NO: 89044 - protein, 183 aa, Unknown
  Obtained from environmental sample
  DOMAIN (99)...(142): SWIM zinc finger
  misc_feature (1)..(183): Xaa is any amino acid
LKSRYGITPWGKWFIDVLDSYEMGERLDRGRSYANTDKVSSLDFKDGRATAMVEGHYQPFYHVEIGFPPLKKAEQVYRMIEEDPPLLARIAAGELPESFLQKLKDKGIDLIPRKWGDMDRVCTCPDWGDPCKHMAALYYVIAREIDADPHVLFRLRGMDLAARFGKATVRQIAPPFTITFAQK

SEQ ID NO: 89045 - protein, 127 aa, Unknown
  Obtained from environmental sample
  misc_feature (1)..(127): Xaa is any amino acid
MSKNLERSMIQQRAVRILNEYQINKLPIDPKLIAKKANIQVEPNTDCEKGVSGMLLRKGENYYIIYATYLGNLGFENFSIAHELGHYFLDGHPETIFQNTNIHKSVADFVSDEALERQADIFAASLL

SEQ ID NO: 89046 - protein, 412 aa, Unknown
  Obtained from environmental sample
  DOMAIN (69)...(206): Sigma-54 interaction domain
  misc_feature (1)..(412): Xaa is any amino acid
MNERVCSFCGKSTDMARRLIAGPNKVFICDECVEVCRKILTDEDHELTSQFTGDIPTPVEIKLYLDQFVIGQEAAKKALSVAVYNHYKRIANPNRSNNNDVEIEKSNVLLIGPTGTGKTLLARILARKLKVPFAIVDATTLTEAGYVGEDVENILLKLIQNAGGNIAVAERGIVYIDEIDKIARKGENVSITRDVSGEGVQQALLKIIEGTIASVPPQGGRKHPNQELIRIDTTNILFICGGAFVGLDKMIARRVVQHPLGFGTEGDKSEKSIKELYDALHPDDLIHYGMIPEFIGRLPITVSLDELKREDLRRIITEPNNAIVKQYQASLAYDDVKLEFTEEAIDAIADTAIKQKTGARGLRAIVEKMMIDIMFEIPSLKGNKQVIITEDVVKNLQSPIIHQLQKAPNGFI

SEQ ID NO: 89047 - protein, 195 aa, Unknown
  Obtained from environmental sample
  DOMAIN (2)...(193): haloacid dehalogenase-like hydrolase
  misc_feature (1)..(195): Xaa is any amino acid
MINNIFLDAGGVILDETEFEEISSKIITNIITNYNVNYLIENYWNNVDEAVYRFVPKVYDYILFKNINNLNDFNKSKIQFKNELKQTNIKFKLMGGINDFLKIFSKQYKIGILGQYGKDFRQYLKEINLLKYFTFIEIQDDYKITKPDPRYFEAILKKCKCKPEESIMVGDRIDKDIIPAKMDRMKTIKVKIGIH

SEQ ID NO: 89048 - protein, 410 aa, Unknown
  Obtained from environmental sample
  misc_feature (1)..(410): Xaa is any amino acid
VEERKLQRLFRKPEVCGLIKRCNDFGAGGVSVAVGELASGLDINLDSVPKKYSGLDGTELAISESQERMAVVVANEDAPAFIKEAAAENLEATVIAAVTASAQDDAARLRMKWQGKTIVDLSREFLNSAGAPRSAKVSLNGDTHRWGADNGSPGRDTHRWDSPGVLLDKLERQLAGLGSGSRRGLQERFDGSIGAGSVLFPWGGSKQGTPECGMAALLPSLGKQSRTASLMTFGYDPDLMSIDPYSGAKGSIREALAKFACLGGDPFTARLSLQEYFRRPETPETWGMPAAALLGALEAQLRLGVPAIGGKDSMSGNYRDDSRGIDLAVPPTLVAFAAGTVAAGKVRSGALSGKGGNAVLLLSQSPQPATDNQDEWELFKTNMKTLEALAAQGALIAAYPVGPGGVAASL

SEQ ID NO: 89049 - protein, 248 aa, Unknown
  Obtained from environmental sample
  misc_feature (1)..(248): Xaa is any amino acid
MISRAARLILLTAFLAAAHGALRVASLEDLRSIGQVEERPLSADYELVCDIDASESRVRPFDPIGGGGRPFTGRFFGRGGRLYVIRNLYIRSPSEGHVGLFGVVGYGAEVSNVGVVADTVSGSFAVGTLAGSSNGRIVNCYGAGVVVAGRRESNVGGLVGLNGGGIYGSYSTAKVYGAENVGGLVGLLRISASGEILQCFALGAVRGDSNVGGLVGQVFGGRVAESFSAGRVFGAGAVGGLIGRDFAV

SEQ ID NO: 89050 - protein, 262 aa, Unknown
  Obtained from environmental sample
  DOMAIN (28)...(126): Flagellar hook-associated protein 2 C-terminus
  misc_feature (1)..(262): Xaa is any amino acid
MSSIATFSATGLGQGTSVSGGISFAGLGSGTDFQSMVEQLKKIEEIPKNRLELWKADWQRRVDAFDQLIDAIGTLSKKFSKMDTMSTFMTKLVGSTNSSAVSAVASSEAPLGAYKINVTQLAANAMLTTKDPVVASRNEVIAPGRDYTFSYTYGTGASAVTRDFTIPQGTSMQSFLNIINNDTRNPGVAASLIKSGDGYVFQLMGKDTGANKALVLNGVDLPKFEPTPTGDSDDPYVNWYSRDAQDAKFYLEGRQNQELSSA

SEQ ID NO: 89051 - protein, 176 aa, Unknown
  Obtained from environmental sample
  misc_feature (1)..(176): Xaa is any amino acid
MFKRLFNIAGPCVPGDHYMIDPLRGIGSELMNLIDTKQYFVIHAARQSGKTTLLKQLARDLNAAGEYRALYCSLEAIQGFGEPEKGIPAIVNKVASYIKRQEWPGEFVKSADCRDISDMLNLALVDYCRSLDKPLVIFFDEADCLSGGTLITFLRQLREGYVNRPDVPFVHSVALV

SEQ ID NO: 89052 - protein, 281 aa, Unknown
  Obtained from environmental sample
  DOMAIN (19)...(47): The GLUG motif
  misc_feature (1)..(281): Xaa is any amino acid
MNQSSSTVEYCYNTGNVTGSTAVGGIAGANQTGSTLQNCVSLGARVTGTGSTNRVIGIANGNMNDNKARTDMKIGASGAEATVSGAATNSNGASVTVGTAMSTFFSGWDTTTIWNTGGNLSVGVNLPTLKTNTQSPAPTLPATYTVQGTADNPFLVTNETELRKVGSGTDGWTLTAHYKQTANISVSTGNFTKIGSSTSKFTGSYDGDGKTITNLTLNITGTSHIGLFAYIGAGGTVKNMTVSGTISLSNGVNATNIGSIAGQNDGTIDKCYSSVQISGSS

SEQ ID NO: 89053 - protein, 219 aa, Unknown
  Obtained from environmental sample
  DOMAIN (37)...(65): The GLUG motif
  misc_feature (1)..(219): Xaa is any amino acid
TGRYQIGGIAGRNEGGATGVTGGGKIDNCYNTAPIAGSNQVGGIVGTNTGSQADIKNSYNTGSITGQVTTSQEIGGIVGNQNSRLVEYCYNTGDVFGSTSVGGIAGSVSNGCIVRYSVSLGLKVTSTNNPIGRVVGGANGTLNNNKAREDMRTGASGSEVLQTGTATDRNGADVAVGTYQTYVFSDFDTTIWTITTGSLSSSALPTLKTNTQSPAPTLP

SEQ ID NO: 89054 - protein, 373 aa, Unknown
  Obtained from environmental sample
  DOMAIN (205)...(252): Regulator of chromosome condensation (RCC1)
  misc_feature (1)..(373): Xaa is any amino acid
TQDGNKTAKCVVTVASVAVTGVSLNKPATNLEVGNQELLMATIQPSNVTNQTITWSSSNSAVAYVSRTGLVTGVSVGTADISVTTQDGNKTAKCTVTVVPVAINVTGLDLNKTTMFLVAGGRQQLTPTIQPSNATNQNIAWSSSSSGIASVSAGGLVTAVAVGAAEITATAQDGGKTAKCTVTVVPNNLATVAAGEWHSAVIRNDGSLWTWGYNSSGQLGDGTKTNKKSPVRVGAAKDWVAVAAGYNHTLAIKGDGSLWAWGGNGNGRLGLGDTNTRNTPTRVGTDANWAAVSAGGNHTLALKTDGSLWAWGGNHYGQLGIGASDSYAHSTPVQAGTAKVPPAAAVTDVGLPTKYTIAVGVRIPLTAAVWPTN

SEQ ID NO: 89055 - protein, 456 aa, Unknown
  Obtained from environmental sample
  DOMAIN (8)...(453): Protein of unknown function (DUF1703)
  misc_feature (1)..(456): Xaa is any amino acid
MAGTYANKKPLPVDKSFFDRVIEGGSYYVDKTLFIKDLIDRDAEVILCTRPRRFGKTLNQTMLKCFFEDTTRIGGKDTRALFHGLKIEEAGERYMEYQGKYPVIFMSFKDTKFNNFDEACKKLIECIAQEFERHAYVSEKILSDYDRDLFKKLSNRLGSVGDYSTSLKFLSACLENYHGKKAIILIDEYDVPLENSWSCSNRFYDEMVDFIRPLLSSALKDNPHLQLAVMTGCLRISKEGMFTGLNHLEVISVLSKYYSEYFGFTQDEIDAMLRYYGFSDKRQVVEDWYNGYFFGNTNVYNPWSSIHVVKDWLVDINENPKPYWVNTSGNVMIREMIDKMNRQARDGLETLMAGGTISAITREDVTYDDAYKDADNLWNFLLFTGYLKKRMVERASVDHMGRVILELEIPNNEVLIIFETKIKEWFNDTVKRKTLAYFSTAVLSGEAETFQKECPS

SEQ ID NO: 89056 - protein, 287 aa, Unknown
  Obtained from environmental sample
  misc_feature (1)..(287): Xaa is any amino acid
KKVLEILDAEMKNDKSLNYECFMQNGSKSAPLRGIIDFIVVTRDIDGGTVESRIGFKNCEQGREKFQGTSLDWVWFDEEPYEDIYDECLLRTLDRGGSIWGTLTPLKGKTWIYERIYKNGKLFDVAVQDENNMVGGQGGCGGKHPTISLHLWSWTDNPYLSADEIALMEKQFSADVLESRKFGRFVDGDENLVFKEFSGECVTTRLHFEKGVYNGAKHLESDSQEKGIAIQPIGADDFVVLWFDTNGDEIYVTDELRVSGGGVERVIAGILQTRFDGKVFLHTESIC

SEQ ID NO: 89057 - protein, 269 aa, Unknown
  Obtained from environmental sample
  misc_feature (1)..(269): Xaa is any amino acid
GHEFFEASSIRKRGDTYYFVYSSVAGNELCYATSKNPLKDFVYGGVIVSNIDLHIDTYKPAGKPMNFWNNNHGSIVEIKGSWYVFYHRHTNGKEFSRQACLEPVKIEKDGVIHQVEISSCGPNGKPLDGRGEYPAYIACNLFCMDFKGLSVEQYWSRRDILLPFITQDGRDGDEENGFVTNINDNYGIGFKYFDCKGIKKIKIKTRGYNDGVFHVKTKWDGESLACIKIEYSNIWVEYSSDINLPDGIHALYFIYKGNGYASMASFTLE

SEQ ID NO: 89058 - protein, 283 aa, Unknown
  Obtained from environmental sample
  DOMAIN (12)...(48): Sigma-70 factor, region 1.2
  misc_feature (1)..(283): Xaa is any amino acid
MNKTWNRKAENDDLLQIYFDQIKVYPLLERDEEIELAQLSGEGDKKALEKLVKSNLRLVVKIARSYAAPDIQFMDLIQEGNMGLMHAAEKFDYKKNVRFCTYAGWWVRQFIIRYLANKHRMVRLPHRKEEMLRKVQRTYHSLSQTLMHQPKTEEIAGELGVPVKDIDFILNMSYGILPLEMDNSKDDYATTMEVHEDYTYCPERNLFRQYYRDSARRFLDKLKDRERKVLSYRYQLDDDKQYTFKEIGAKMDLSPEMVRQIELKALAKIRRHADELEYYQEAI

SEQ ID NO: 89059 - protein, 78 aa, Unknown
  Obtained from environmental sample
  DOMAIN (2)...(76): Polypeptide deformylase
  misc_feature (1)..(78): Xaa is any amino acid
MEIITLGNELLRQKAVKIDKIDKETVNIANQMLEILKRDKGVGLAGPQIGFMKRIFVIHVEGDEERGIYQSFYDRNIS

SEQ ID NO: 89060 - protein, 269 aa, Unknown
  Obtained from environmental sample
  DOMAIN (135)...(253): PilZ domain
  misc_feature (1)..(269): Xaa is any amino acid
MYYERFKDIDVTFTKDMIHVTGLLTQQIHLKCGNDFWPCVIYTASFSGAKVVANVKTGLLAKLQTTNNFVSLRLCFKPEGETNTITFFVTARVMASAPYGNSQDVNMFTIQFSNRPPDDFIEIMGRILDANVNSKKRKDDRVPLTPDNLRKLNMTSTETVVFIENVPRRCILRDLSFSGSKVIMLGVPKFLLDKEGSLRLEFNDPRISYTIKGKFIRAEAVEGKKEMVALGINFDEATVPMGFKIRLNDMLTSVRADFHSAEDGNAPKS

SEQ ID NO: 89061 - protein, 347 aa, Unknown
  Obtained from environmental sample
  DOMAIN (55)...(346): Enolase, C-terminal TIM barrel domain
  misc_feature (1)..(347): Xaa is any amino acid
MEQVDIDRTMIELDGTENKSKLGANAMLGVSMATARAAANYLDIPLYRYLGTFHASLLPVPMANIINGGKHSDNKIDFQEFMVMPVGAESLREAVRWTAEVFHNLQKILHNAGHNTAVGDEGGFAPNISNDDALEYIMKAIEKAGYKPGEQMAIAMDCASSELYGEGGKKGYKFWKSDPDKLYTADQMIEKYTAWINKYPIISIEDPLDQDDWDGYVKMTKALGSKVQIVGDDFFVTNTKRLEKGIKMGACNSILIKVNQIGSLTETYEAVEMAKKAGYTAIVSHRSGETEDSFIADLVVALETGQIKTGSMSRTDRICKYNQLMRIEDELQGISQYAGRKAFYSIG

SEQ ID NO: 89062 - protein, 90 aa, Unknown
  Obtained from environmental sample
  misc_feature (1)..(90): Xaa is any amino acid
MSLACIHTHTIFCDGKDDIETFCRVAYEKGLDSLGFSAHAPIFRKTGLHTDWHLKNERVEEYLDSVRSAKKRWEGKLPVYLGMEADFFSG

SEQ ID NO: 89063 - protein, 187 aa, Unknown
  Obtained from environmental sample
  misc_feature (1)..(187): Xaa is any amino acid
LPHIFDNIRHDNLATALKNTLNGAKRADFCIGYFNLRGWNLLIDSVEQLSGSQLDEKYEDDNIYRARVIIGMQKTPQDELEEYFSLHQTQIDLAAVNNIKKKKAAEFRKQLTIGLPTNKDEATLKKLSCQLREGKVKVKLHLAFNLHAKLYLAHREDYNVPIIGYLGSSNLTFSGLSKQGELNVDVT

SEQ ID NO: 89064 - protein, 192 aa, Unknown
  Obtained from environmental sample
  DOMAIN (13)...(192): Chorismate synthase
  misc_feature (1)..(192): Xaa is any amino acid
MLHASPNTFGRNIRVLTFGESHGAAVGVVIDGARPGLPFDLDAIQFELDRRRPGVVDTASPRREGDRVQLLSGVFEGLTTGHPIALVVFNEGQRPGDYDALKDVFRPGHADFTHERKYGLRDHRGGGRASGRETLARVAAGAWAKQQLAPLGVAVKSFNREIAGIVCKTLDWEFVPKNPLGVCDPLTFPAQL

SEQ ID NO: 89065 - protein, 441 aa, Unknown
  Obtained from environmental sample
  DOMAIN (29)...(237): ABC transporter
  misc_feature (1)..(441): Xaa is any amino acid
MAFVQFSRISLCFGDREILKDVSLRLASGSKSCLTGANGSGKSTLMKIISGILKADSGERAVQKDSRISYLPQSGIIHHGKTLRDEVETAYGFVHALLEKMEKTGELLEKAKSDGSTTQALIEEHHNLQEQIEETGFYMREGEIAAVLSGLGFSDKDINRDTGEFSGGWQMRIALAKILLKKPDILLLDEPTNYLDIEARTWLEKWLENFCGGYLLVSHDRYFLDVCVNEVYELFQGNLKRYAGNYTAYEKVRKTELASLVKRYEEQQEEIIKTEALIRRFRYKASKAAFAQELIKRLEKMDRVEIPESLKKINITFPPPPHSGNIALTLEGIGKSYGEHRVLSGIDLCLEAGERLVVAGPNGAGKSTLLRIIAGQDKDFEGGVKYGSGIHAGYFSQTEAEEPTALASNLKDAENTQVLDFMEAGSPTALVPKLRDMLGAF

SEQ ID NO: 89066 - protein, 1054 aa, Unknown
  Obtained from environmental sample
  DOMAIN (477)...(544): Transglutaminase-like superfamily
  misc_feature (1)..(1054): Xaa is any amino acid
MNGIPEGKVAENRRAYFAALVLRTLALLVFIYQIRLLATDMEDTPFFIVSLAGALAVAFFLNKKIQKKRGGHFVRLFQAVIVIALVPWAIRLLVAMPRWFTHGVSGTAIILDSLLLNLDRNYFSSLLPFYWVAFTTYFSIRSRQFLRADIIAADTFFLVLFSIVSPFSIEAYRWPVLMIGLFALAFFFQILALIFSAPPEFKLRNKEETIAALAIFILVFIGGALFVRPFQEKAVDKGGGLLEPKLFRFDFSQVIRLESEISVNDDLVLIVKKDPYDSHILLRRYTLSAYNPRQGFFRLGDVDEAAHPQNLPSRRTSLPNEEIRNYRESEQEYYIVNFDSSAFIGMNMPVEIIPFETWDASSFNSAYAVVSHTSEANPYELINAVRGSDWSGSLGLKPEEYALYTEYGGDETIAAFAREIISSSTSRFPRRGGENSPSYWEQVQMINDRLKFGEYRYSLKPGIAADGDQLKHFLFNSKKGYCSYYAFAFTLMLRSLGIPCRVAAGFFVDSSTEAFGYYPVRADMAHAWAEVWFPGYGWIEYDPTTENLAEGEEFRFSSGTPPELFERLMKEILDNRSRLRAREGEEPESEKGDWASLGRDALNLLSRKGPIIAVALLLLLFLSIRFGFFWLYLIRKDPRKKALCLWAHVKRRMALAGFRKPNASGVAEWARTGDNVFGGLYMLYLDTAAARFAPGFTFDDSKKMEARYRHFNDEYKKTVMLLRRLLACLLPPLALALGQTKRRPPSGAKITSAVLIVIFIFLFRMDTMAQTDPDSLPLDRSSDFIFNSATAAQRAENWERAIELFNEGAKFYPDDFRFPWSLGNLYYYRRLYHLAWDEYRRAEKIIPWDTDLLLKLANTAGYLNKNETSAFYYERLLAFDPDDREAVSSLAWMYFKLHRLQEGETLLLDAMDYLGEDMDFAMTLGTIYSGMLRYAEAKDAYQRAIRSAEIVGDRLFAALSYYNLSILETRFYQFALAFDCTNASLETMDRASGRLARGELYLARLELSRALADYQEAYQTDSSPLSKLNLAEAFQVGGRLSEAAAYASDCLKAG

SEQ ID NO: 89067 - protein, 311 aa, Unknown
  Obtained from environmental sample
  DOMAIN (6)...(311): Glycosyl hydrolase family 57
  misc_feature (1)..(311): Xaa is any amino acid
MTGNKYLIVHGHFYQPPRENPWLDIIEEQESAAPYHDWNERIYDECYRPNAYSRLLDPNGMIVDIHNNYRNLSYNIGPTLFTWMERYHPDTVRKIIASDKESVARFNGHGNAVAQVFNHIIMPLSSRRDQLTQIRWAKYFFKKRYGRDPEGMWLGEAAINMETVLCLIEEKISYVILSPNQAESYRHINGGDWTYTNQAPIDTRRPYRVFPRTRDGAKLEGHLDVFFFDEGLSKAVSFDNLLQDSRILGNSINDRYDRNNGANQLVTIATDGETFGHHKPYGDMCLAYFFTSVAQELGITPVNFGYYLSIN

SEQ ID NO: 89068 - protein, 317 aa, Unknown
  Obtained from environmental sample
  DOMAIN (216)...(317): Histidine kinase-, DNA gyrase B-, and HSP90-like ATPase
  misc_feature (1)..(317): Xaa is any amino acid
MRIIWSIVVSFCVLVVISQFTGWVYSVDAGNIYQWGPYYLTTYFAHFLINSVGIVIIAQNWHKLGTRKVAYFIYATLPLTAFSINLMVPGLMIAHCASAMTILIAYVSIHLQNERAMIEQELALTNARISVMLSQIKPHFLYNALAVISRLCDKDPAQAKKATIEFSSYLRGNMDSLEETKPISFEKELKHIEGFINLEKAMYGDALKVIYDIETKDFFLPALTVQSIVENAIKHGIGKREGGGTVKICTSETDSGFLITVSDDGVGFEYEKTANNGRLCIGINNVRQRLSGQCGGSLEIKSGNGTGTTVTISIPKS

SEQ ID NO: 89069 - protein, 207 aa, Unknown
  Obtained from environmental sample
  misc_feature (1)..(207): Xaa is any amino acid
MEKNDSFDFELNEAEGYWSVTGYYGRGEEVVFPASHEGKPVKIIGDGFSPNNKRIKRVNIPEGFISVGVQAFQNCTGLTEIKLPESLTSIGESAFEYCAGLTEVKLPQGLTFIGEAVFKDCTGLINIELPESLNFIGEGAFCDCTGLLEIRLPGSLTSIGELTFHNCAGLKKIKLPESLTTIGELAFYDCTGLTEISFPDALASIGK

SEQ ID NO: 89070 - protein, 253 aa, Unknown
  Obtained from environmental sample
  DOMAIN (52)...(188): Flagellar hook-length control protein
  misc_feature (1)..(253): Xaa is any amino acid
CFPGAERENAAPAETRGRRGRERLNIEVRDLRTAEGQGGTSAVTENTVSLKTALESNFRPLTNTEIEIPVDLHRGSVDGKAGDSSITARTFEDALAAELRGNLSTDIVRDAAVIIRNGGEGTIRLSLRPASLGDVKIRLEMTENKITGHIILKSSEALRAFERELPVLEKAFKDSGFSETNLEMFLASDDSANGGAFGRREEWQERDFLVRALAVSSYEAESEQSAISRLDEGVHDGMTLSTSPGRIPVNLLV

SEQ ID NO: 89071 - protein, 65 aa, Unknown
  Obtained from environmental sample
  DOMAIN (1)...(60): Flagellar protein (FlbD)
  misc_feature (1)..(65): Xaa is any amino acid
MIKVTRLNGLEYYINPHQIESIEIRPDTTLLMLSGKHVVVREKVEEIIDRIVEYRSRIGGFKNEE

SEQ ID NO: 89072 - protein, 456 aa, Unknown
  Obtained from environmental sample
  misc_feature (1)..(456): Xaa is any amino acid
VVFLCCCNKKGQNDFSSDLYHTDDSGLTFTPPLPQEYSDNAYVRRSYFWERSLAVRKEKRTAELRRLLYVGMTRAENELFLSGCLDISKTLGLENKDQDSGIENFSLNLKQYIELKSEKAAGNSAAYSGGAVVNGGIKGDTILEGNTFFGLCLPAFGAHLPSAKDAGDSFFHIEKIPVYNEQQIRNVEKSGSRFSNDQKGLNEFFELVEPFYENADGIETPDVPKKHFTPTSLHGGATVSGDATYSSDVHWTDRKSAWSGETAADIFSSVDTLIEHYAKQQGRDNDKFNYGSFGTVAHICIEALLSNQETKIPAHLTGLVSSRDADAILSAGKELAERFAQSPLGSIARKSENLKSEFQFRSLLHVGRKKFFINGTIDLLFEDAETVYVVDFKTDNQEFPWEHIPQMACYYKAASDLFAVPANKKCMTWLYYLRTGHAVDVTMKAKDFDFGNILKI

SEQ ID NO: 89073 - protein, 617 aa, Unknown
  Obtained from environmental sample
  DOMAIN (10)...(617): UvrD/REP helicase
  misc_feature (1)..(617): Xaa is any amino acid
MEPNKEKINLNSEQQAAAYCDENAVVAAGAGSGKTMVLASRFAWLVTERKYRVREILTLTFTRKAAAQMYRRIHLLLAEIADENSDIKGELAREALEEFAQARIQTLDSYSATIVKQAANRYGISPDFSIDDERCLRLAHNEAMSFFIARRGHPAIQRLYPNKSPVSIANDIFASALFNYTHIDKRPNPMKDFAKQYDIICDQWREQSALIINILQKLAEANAENENYLPDLTPVINQFSTGRIIFPNARQLGEYFEQLVEIPHNKIIEWTDSHPLQTTLTNIMEYLLSLLSLSLLRGKRSNNPIKELLKELRVVFGEFSSILTFCIQAGLTCSVLKLLSNLQERYLDRKRAERVLTYTDVARLAKTILIEQRDIRQSEKKSFKAIMIDEFQDNNELQKDLLFLIAEKKDITNKTVPSAKDLSPGKLFFVGDEKQSVYLFRGADVSVFRKLKRELGGTNLPLKTNYRSAPVLIGAFNSIFGGYKFDPEGTATEEKNNGERNPAVFVPAAENLRLPERSRLPGQEWLPPFEASFTPLHASKKNGGKLTLCILDRQDSPENDPAGDLEGGESELLTPVENEARYVAWRIGELLKEKNETGESKYRPGDIAILFRAHSPQ

SEQ ID NO: 89074 - protein, 761 aa, Unknown
  Obtained from environmental sample
  misc_feature (1)..(761): Xaa is any amino acid
EAALYIIALHENQKVPWDAISVSVPDTGNYDPYVFREFDNRNIPYIRQSGKPLASYPGGQFFTAIAGCSSGNFSFASITALLLNRHLPWKDDEKIQALIQFGIDNNCLCSWTEEEAPSKEGVPSDEGDKEKKINVWEDAFENHTNDSAWLYTFFKKLTLMINAMRYADSFSAVRKHYFAFRGSFFDMEKCLDETDLVLSRCIAELGYLVEIENSYPDMRVPDPYTFFTEYLEETSYLAQQSSSGVAILPYRTAAPAPFDCHIVLGANQDSLSAVFSSLSFLPGNKREKLGISDNDASQAFITLHRFNSRLPTAFFCSEQTFSNYAIPHSALKAEIKPRQRYRDDPALGVKFAPDLYHKESSLYTSLYFSDRGQAEPGQAGLPAKLHLNQKQGFNEWLTRRKSADTGGDSETSRPFVEHIRNRFLYKGDDKKLEGKYGVSSSSLELYFKCPLQFIFSRVLKLKNVEIETSLMANETAGIVYHKIINLFLRELKEKGEAIAPPCLQGAPSPRYMLPKSYWDILTEKTDIVFNSFPYLSGEEDDKPAMSMLTARLLRAEKELFFARLENFLVKFISFFAGFSVAASEGGYTLNKESYYLNGYIDCILEKGSGDQGSLVIVDFKTKYMPDLSDCIGLEGLANFQLPMYIRLAENEFGKPAGAALFFSIVDARPKVLFGVIEDAISGEIIPGKEGDRITHGSDEYERIMGEFDRKAEQFAAEIINGTFAFSPSHWELCHECGYNKVCRTLYKIFQGEKQWNQTKKK

SEQ ID NO: 89075 - protein, 486 aa, Unknown
  Obtained from environmental sample
  misc_feature (1)..(486): Xaa is any amino acid
VLALKMAAYANGVAKLHGVVSRDMWQGLWPGVPINEVPIGHVTNGVHPRTWISSGMIELLDRYFGPHFENKPTDLSVWERMSRISDEELWRTHERRRERLVVFVRERIREQYKRTGAVERRIQQAEDALSPYALTLCFARRFATYKRGNLLLRDPERLLKLVRDNDRPIQLIFAGKAHPHDMPGKDLIREIVHFAERYDVTSRIVFVENYDMTVAKYLTSGGDVWLNTPRRPMEASGTSGMKAAMNGVLNCSILDGWWDEAYNPEVGWAIGHGEQYADERLQDDIESKALYDLLERDIIPLFYQRGRDGLPREWIKRMKDCMRQIGHSMSCHRMLMDYSNNYYFPALKNYRKLIKDEYADAKSLAAYFGKLRDSWDSLRIVKLEANTKPVMQRGDSLNVTAHIDLGKMSPNDLLVELYYGAVSNQSNEITNAHRAEMKWVSNKDGLNQYHVRVECTDTGFQGHTVRILPKHDALVHPYRSGFIKWA

SEQ ID NO: 89076 - protein, 298 aa, Unknown
  Obtained from environmental sample
  DOMAIN (143)...(213): HAMP domain
  misc_feature (1)..(298): Xaa is any amino acid
DAAQVLEAIHSIRAEARGCILFTGNRDKVIESKNEIEDHFKQFEASVERFSKALLDHPEAKAMFAEATEKYEKVFRPSVRKIIDGAERGVPKEELLTEMVANAKPAVDLISRNMRKCAEMDMSELHDVVAAGRGLAATGIVVVIILTLLCLAAIVFFGVHISNMISNPLNQAVKMIDELGHGHLDMRLSLGDRRDEVGIMAKTMDKFAHDLRHELLAGLKMVSVGDLSAPVTKMDDNDEIGETLRKTIDSLKVVVDAMKKISVGDLSVKIEPKSDKDEISAALKRTIETLHRLIVDDG

SEQ ID NO: 89077 - protein, 146 aa, Unknown
  Obtained from environmental sample
  DOMAIN (16)...(146): 3-dehydroquinate synthase
  misc_feature (1)..(146): Xaa is any amino acid
MRRVEVNTSKKYSVWIEEGLLSHAGERIAAVCGGEAAALVTDDTVNELYGDIVEQSLRAAGYSTTRFVFPHGEQSKNMATYTSLLCALTEANLTRQDVVVALGGGVVGDLAGFAAATYLRGIRFTQIPTTLLAMVDSSVGGKTAVD

SEQ ID NO: 89078 - protein, 277 aa, Unknown
  Obtained from environmental sample
  DOMAIN (1)...(142): NAD binding domain of 6-phosphogluconate dehydrogenase
  misc_feature (1)..(277): Xaa is any amino acid
MKIGIIGLGLIGGSFAKAYKAAGHTVYASEIDKSILDFAVLSGAVDAPLDAGALSICDLILIALYPQAAIEFLDRMACHIQSSATVIDCCGTKKNICAAGFKAAERYGFTFVGGHPMAGTEQSGFKHSKANMFKGAPMIIVPPVYDDILFLEKIKRLLAPAEFGRLTVTTAEKHDAMIAFTSQMAHLVSNAFIKSPTVFEHKGFSAGSYKDLTRVAWLNERLWAELFIENQDHLLYELDLFIASLTQYRDALKNEDFDYLKTLLYDGRCLKEKVDRQ

SEQ ID NO: 89079 - protein, 442 aa, Unknown
  Obtained from environmental sample
  misc_feature (1)..(442): Xaa is any amino acid
VRLSGVMESRELVIEAERPGTSETKTGRSVAVSGREIAQTAEIGLIEDVMNSIKLLPGVGYTGFMNAQPSIRGGFPGDMNASLDGYYIMKPYHWGGGFSIFDPRMVQSAQLSHGVFSARHGHTISGLLDITSKNPSPDDTEFELGVSTSTASFNLSFPLANKGGILLMGRVTYYEPVIFLTRQLGDFYKQIGLFTQETLNTLNAVRVAPYIRSGTITGNYRFTDTIELRATGFWGMDGIGVTYENESQDNGGLSSSSRLALDYTNYQGFITAALNWNPRNDMLAKFSVGTGYEDREVDLESRNIVRKKEFSNDFYEKYPQLKPLGLTPSPYDITESMLQSDIMFNVQARADYDLELGKGFLAAAGVQELFTKYSMKGDQQGSVELWFSMLGKDYQERIKGLFQDNLPDIFDQLTDQFWNDLRVAFPRLYSPNAENFLFTSSG

SEQ ID NO: 89080 - protein, 409 aa, Unknown
  Obtained from environmental sample
  misc_feature (1)..(409): Xaa is any amino acid
LIPGHRCVPFANAGLLPHEYIFSWQGSTIPSTTTEGPPEEFYPYYSVLGEEYAPQYVAKDNAENEEAFNGDPFDDPPEVSIKTIDMRNIYRETAFVPGDRFVVRTLDWKQGSFELEKVSKDEWNAADLDAWLLAADEGFENSFSKLGPASCTEEQIAYAYWYGSPRMREFPAYSLETYLYEKTNRIETSAYGIETRFWYAGREIPDKKELDSGPVFPDMSPFELILHKYKIPVSEYVIQSYILDSLYRENGNADLVFERLVPAEIELADRDKFFLLDYIYSVMDEFRVFYTPFTDKVTGPIRSRAGELHTAVIELVSRLNKGDIDLSWLPRHTFIVLSQIQTHTAGILSQLQIHTTSVMENLDSSDILNDTELEAIDNSLDSMIETYEEVKELIDEALESFRRNRIAVL

SEQ ID NO: 89081 - protein, 449 aa, Unknown
  Obtained from environmental sample
  DOMAIN (202)...(281): Cache domain
  misc_feature (1)..(449): Xaa is any amino acid
MTMVMLLNNAMLVFIALIAVIFLIFLIFNIYISNILKPISIMLERMQTLSAEWKKSSHSLRIKQIVFVCFAFILMIAISCIATNIIMRRHLAYEAQEMLRDAELTIASNLREAFTTLIDSSFSVRYMIERGESQKNIHRYMTDVTDWLLSNKDLVYGFNGIYGYIRGEYLDGTDWEPPPDYAPQKRPWFIAAREKRGELAETIPYVDADSGEIVISYSRELFDSSEKSLGVLAIDVLLNQIGEYVETIRLSETGYGILLNQNFEIIAYPDDELKGKRLDSINGDYAKIHEKLASGKPVVSLSVIDSENIKHIAFFKRIPNGWYIGSMTPYNVFYRDTYIMALILALVGFALMFVLSLLVLRQHRRIENYTDAVMELNEASRRFVPTQFVKIIGVENITSLKLGDSVQNVITVMFFDIRFFSVHSQMMSTNETFDFVNKVFGLAGAIIRK

SEQ ID NO: 89082 - protein, 359 aa, Unknown
  Obtained from environmental sample
  misc_feature (1)..(359): Xaa is any amino acid
AREVRAKKKAAKAKTVDKGDAKKKNVTAEITGTAKVMDKVGVIGKTVIAKAADKFGAEGSAVTAKVMDKVGVTGNAVTAKVADRVGVMRNTVTAKVPDRVGAKGIAVTAKVADRNSGTGKTVTAKIAGKAVAKKPAANAVKKKPAATADKENATAEIVTCVKITDKRAPVSAIAGRINEYVVHLNRREVSAIAINEWLVSEGYIDTINDKGKNRKVTTDKGISIGIITDIRKVGVERVRVNMFDRKAQELVVAKFCGADGFGDGYTGLTEMAQELCELFAAEPTVVPELTPQPNEEIDAQEVEYEIPSIDEYINDDEYINEAEALPPPMEIVNSQRTIFSVIADALKSFGKIFSRREKI

SEQ ID NO: 89083 - protein, 103 aa, Unknown
  Obtained from environmental sample
  misc_feature (1)..(103): Xaa is any amino acid
NCQSVFITRGGRRLSRKGIWKNYSKYATLAGTGTKVHTLRHSFATGLLEGGADLRTVQALLGHADLGTTQIYTHVDAGLLKESHRKYLPRLDKSRFGERSGQC

SEQ ID NO: 89084 - protein, 320 aa, Unknown
  Obtained from environmental sample
  DOMAIN (48)...(314): Polyprenyl synthetase
  misc_feature (1)..(320): Xaa is any amino acid
MDQQYTHRLEKIEAVLEHWLPETPDMNWAAEVFPGLADKVKPELLRTLTAPDKDLLSRGGKRWRPLLMTLVCEALGGGDAALPLAPLVEFCHNASLIHDDIEDNSNERRGKPAVHLLHGVDVAINAGSFLYFLPLACIDSWSQAAHYGRDAYSLWAAYLRKLHLGQAIDIHWHRNFDIVPSVDEYLAMCALKTGCLARFAVELGALAARTTGRDTGKAGTMGEAAPLGEAAEKLGIGFQILDDVKNLTTGIPGKQRGDDIVEGKKSLPVLLFLSRYPEKKGMVCRCFMVAGSDGAGAPETEELIQALAACGVIKEAGEQG

SEQ ID NO: 89085 - protein, 209 aa, Unknown
  Obtained from environmental sample
  DOMAIN (19)...(209): FtsJ-like methyltransferase
  misc_feature (1)..(209): Xaa is any amino acid
MADYKKPDYWQLKARKEGYPARSVYKLKEMDEKFGLLKPGGGTRSGERVRVLDLGAAPGSWSLYILRKMRDGVFLAAADLSPLSRQYDGGLFNGDNFCFIQGDITDPAVRDSILAQGPYHLIISDAAPATTGNRFIDTTRSLELAETAAAYTDSALKSGGNLVVKVFQGGDVSALLKHLKTLFKSAKSYKPEACRSESFETYYVALGKK

SEQ ID NO: 89086 - protein, 117 aa, Unknown
  Obtained from environmental sample
  misc_feature (1)..(117): Xaa is any amino acid
MPVSAAFWIFLLIVMVIAFFMLLPKIKNVSLTQKTTETDERKETNERKEKKEEGKKEDGGKTQAEKTAVTEQPEKKPQAEKPAAPEQKEPEKKPQAEKPATPAQPSTAPAPASTPPV

SEQ ID NO: 89087 - protein, 222 aa, Unknown
  Obtained from environmental sample
  misc_feature (1)..(222): Xaa is any amino acid
QQQGTEEDEGKGKKEQGRKEDEKKEKKEEEKKPQTEKSVTPTQPSTTPEQKESEKAPVNKEPEKKPQTEKPTVPAQPSPPPAPVFSPPVKPVETRDRSIYLIHKSNRMLVKVNRNLNATLTDSINALLAGPTPDEIMRDIESLIPEGSRLLNAEVKGSTARLSFNQEFRYNQEGREGCEAQIKQIVWTATEFPNVKDVQFLIDGKEVDFLSEGVVIRNPIGR

SEQ ID NO: 89088 - protein, 62 aa, Unknown
  Obtained from environmental sample
  misc_feature (1)..(62): Xaa is any amino acid
MQLSLYGKSNDQLWFTFFHEACHIIKHSHGELYIEGHGLEDEKENEANAFARDMLIPLISGG

SEQ ID NO: 89089 - protein, 76 aa, Unknown
  Obtained from environmental sample
  DOMAIN (3)...(71): Recombination endonuclease VII
  misc_feature (1)..(76): Xaa is any amino acid
MDKDKPKIGEPFVCPICRKRSIVGVTAKIVADHDHHTGNIRGFICDSCNTGLGRFKNGENYLMNAVNYIKDHDVLR

SEQ ID NO: 89090 - protein, 182 aa, Unknown
  Obtained from environmental sample
  misc_feature (1)..(182): Xaa is any amino acid
MNIETSLFYDLKILLPVILVSLGAIFSLVAESFLNPSKRHNALPLINLFFLVLAAYFTGIISGDFGDPWNLFSINYVKEVFLYATALCAAIGTAALQNTLKSSNTECGEAYTLLMLSTAGIMIMVLSADLIPLFLGMELASFPIYALIAMNRSSKQSNEAAFKYFISGAALSAVFLYGVAMF

SEQ ID NO: 89091 - protein, 604 aa, Unknown
  Obtained from environmental sample
  misc_feature (1)..(604): Xaa is any amino acid
FGVYKEVEEYFYGNEQVAGLKDWDEIDGVICMLCEDNFGFMRTLPSADIRERKGGFGMYYHFDYHGGPVSYEWMPSTSFERTWEQMCMAFDYGIKDIWIVNVGDLKFNEVPLAYFMELAFDFEKWGTNSPNSIDEYTTTWLEKTFPRTDAKVHEKMADVLHGYIRMNAMRRPEAQNAGIYHPCHYLEADRMLALAEHIEKTNEDVYSALSQNEKDAYYSMIYFPAQASVNLIRMNLYAGKNLHYAQQGKKIANKFSALVGGCIEKDRALHKEFASFKGGKWKGMELEQHIGFVKWNEDNYRNPLRVQVKPAYKPRLVVSRKDREEVYTKNYGRVMTVLVDDFLYAGNDEVIIEIANDGIGSLEYEIIPEKEYDWLRISSRGQQSLKGKVESQEEITLRCDREKLTGETQNARLLIKEKKIKDAVVVDGKTTIAIEIKAKNPVIQDLPPMTFLENNGVIVMEANHFCGKRDATDAGFIELKNYGRSGSGMKVYPTTADFNENDERPLLAYRFLIEEQGDYTAEIWTAPANSVQNKRPLRFTIAVQGERRQQLITAVPADFMAGSHYDKRWCEGVLDQIRISKAPLTFEKGVWEIEIGALEAGLVL

SEQ ID NO: 89092 - protein, 376 aa, Unknown
  Obtained from environmental sample
  DOMAIN (13)...(376): Histidinol dehydrogenase
  misc_feature (1)..(376): Xaa is any amino acid
MKVISSKEFDSFWKKNTKRAEDTETEKVVKEIVAEVRAKGDAAVRNFASKFDKSSPQQLEVPLSEAKRALEQLRAADPSLTQALELAATHIKLFSDKQREQFADFQFEMEPGLVTGQRILPIERAAIYVPGGRFPLFSSVLMCMIPAFCAGVEEVIFSSPPTKDGIPDKKILAAAAIAAEVAGNNKVRIFAIGGAQAIAALALGTKSVPRVDVIAGPGNKFVAAAKQQLFGEVGIDFIAGPTDVLVIADGQADGGDIEKTADLVAADMLGQAEHDPDARARALVPSKELAEKILAAIERRIKKLPTEKTARASLDAGGLIVVYETREEAIRIANIIAPEHLELQIADADNWIPKLKNYGSLFIGSLCAEVLGDYSA

SEQ ID NO: 89093 - protein, 124 aa, Unknown
  Obtained from environmental sample
  misc_feature (1)..(124): Xaa is any amino acid
IEGLCRIRDSFNSYTLDLLALAGATAAVTDAAYYDEINKRVITTREKTAQALRDLGFTVLPSSANFLFAKPPKVSGSELFTALRSRNILVRHFNKDRISDFLRISIGTDADMDKVIEACREILG

SEQ ID NO: 89094 - protein, 328 aa, Unknown
  Obtained from environmental sample
  misc_feature (1)..(328): Xaa is any amino acid
MSEDIIGQETETQPGEEREKDLQNNISLNNKKLKQHRKSIGHEAMTNRWGYFFVAPFIVVFCVFNLWPTLYTFILSFTDLKGLRTDFNFVGLTNFTKLIHDQYFWGALGNTFIIWGVNFAPQLGLALVLAIWLSDVRLHLAGKGLFRAVVYMPNLLTAASVALLFRSIFGYGGHVTAPANQFLRLFNIQDTVRLFDSVLNKFVEQKEAFNFFRSVAFSRGLVSFIQWWMWYGYTLIILMAGITTISPSLYESAVIDGANSRQTTWYITLPLLRPIMLYILVTSAIGGMQMFDIPFLLTDMQGAPAYKIRNFTVYQYNMALGRGANDYA

SEQ ID NO: 89095 - protein, 405 aa, Unknown
  Obtained from environmental sample
  DOMAIN (9)...(98): Cyclic nucleotide-binding domain
  misc_feature (1)..(405): Xaa is any amino acid
MSGEFQPVTVNLKKDAYIFVEGKHHADKFYIIKQGNVRIIREALTDETGSALGPGDMFGLISAMAAHGYIESAVAVTDVSLLAVERKQYGSLIRKVNTIAVNSIKCFSQRLRELDIALSQRTLKNTASADPSHIIQIGDYYKNSGKLKSALYAYNQYLALRPDAPNTDDIKAIIAEMKKTIIEPRPEYPPDKMVQRYPKEHLLFAEGEPGHTMYIIQDGSVKITKIVDNKEIILAVLGKGDIFGEMALLEDKPRAATAEVYEDCTLLAVNRDNFSNLIKEQPDMVVRMATLMSERIWLLYRQLDNTFIKDPLGRVYDALLIQLEKNRVDINSDEPYLCNFGIKELIGMAGMQESENKQLDRKIAGDGKLTFKDDKIQIIKISDIVKESTFYRKAQKIAENRKGKL

SEQ ID NO: 89096 - protein, 95 aa, Unknown
  Obtained from environmental sample
  DOMAIN (12)...(66): Helix-turn-helix
  misc_feature (1)..(95): Xaa is any amino acid
MTDIRKLLAANIRNFRCELGLTQAKLAEKADTATHYIAMIEGGKNFPSPEMIEKIAACLGKDSADLFSITPIKHHWKKEILTEIDHLITARIKKE

SEQ ID NO: 89097 - protein, 68 aa, Unknown
  Obtained from environmental sample
  DOMAIN (4)...(49): SpoVT / AbrB like domain
  misc_feature (1)..(68): Xaa is any amino acid
MNTVTLSNEYQLIFPEEIRETFGMKAGTSFEVISYNNRIELIPIKSIKSLKGIFKGIDTNIMRDSDRI

SEQ ID NO: 89098 - protein, 343 aa, Unknown
  Obtained from environmental sample
  misc_feature (1)..(343): Xaa is any amino acid
MNTIPITFNENLPAYTAVGGNERRASTGLSAVILNRGGRYPRYTFFEELEKLGFDYVLSIESSAANYDLESLSSGFPFVRFILPQGQINRGEEINLAASELSSPLFFVLWNDLKFLRSGGAGRMAERLFAGAQGEKNIYKRLCTTPLIQNARSETMPTLIVPAFVHEKKAEKVIRTLPFIPRKEGQLTLYPFDGIGIYDRERFIRLSGFDPYIKNFYWQLMDFGFRSSLWGEEIASTALIKLSYEGLVPEDDSTVDEGFLRFFLKNLTPVFKGDYAHVPLRRFPGYLKMRGGLLAAWDEFFSARAWVKTNRFRFSSDAGIMTELFASIDTEAEAEDELAMEEK

SEQ ID NO: 89099 - protein, 345 aa, Unknown
  Obtained from environmental sample
  misc_feature (1)..(345): Xaa is any amino acid
MNTIPITFNENLPAYTAVGGNERRASTGLSAVILNRGGRYPRYTFFEELEKLGFDYVLSIESSAANYDLESLSSGFPFVRFILPQGQINRGEEINLAASELSSPLFFVLWNDLKFLRSGGADRMAERLLTAERVEKNTYKRLCTTPLIQDARSETMPTLIAPAIISEKKTGKSIKTIPFIPRKEGQLTLYPFDGVGIYDRERFIRLNGFDPYIKNFHWQLMDFGFRSSLWGEEIAATQLIKLSYEAHVPEEDITAGQGFLRFYLKNLAPVFKGDHAHIPLRRFPGYLKRRGDLFTAWEEFSSARAWVKTNRFRFSSDAGIMAELFASIETEVETGDNHDEPRGEM

SEQ ID NO: 89100 - protein, 344 aa, Unknown
  Obtained from environmental sample
  misc_feature (1)..(344): Xaa is any amino acid
MNTIPTTFNENLPAYTAVGGNDRRASTGISAVILNRGGRYPRYTFFEDLEKLGFDYVLSIESSAAHYDLDSLSSSFPFVRFIIPQGHINRGEEINLAASELSCPLFFVLWNDLKFLRSGNAERMAERLLTAEPEEKNSYKRLCTTPLIQDARSETMPTLIAPALVPEKKAGKVIKTILFIPRKEGQLTLYPFDGIGIYDRERFIRLDGFDPFIKNFHWQLMDFGFRSSLWGEEIAATQLVKLSYETLVPEEDITVGEGFYRFFLKNISPVFKGDYAHIPLRRFPGYLKRRRGLFTAWDEFFSARAWVKTNRFRFRSDARIMTELFASGVEAEAGDATGESREEK

SEQ ID NO: 89101 - protein, 537 aa, Unknown
  Obtained from environmental sample
  DOMAIN (253)...(427): Radical SAM superfamily
  misc_feature (1)..(537): Xaa is any amino acid
MKALCVLYGGRLEAEAFEKVLPGRAGNESAFSLAVAAARSFPGVEKTVLLGIKDSSLVDLPPGLETVFRTSWTRKGLFEEISRLSAGWDFTYFAWVDCPLLDKALAGAMAERHLRYRAEYSYADGWPYGLAPEILGPGIAGILAKLSENNDGPVERDALFFTIQKDINAFDIETEISPVDLRPYRLSLTADSRRNLLLLTRFMGELSAEPVGRGSPPVLKQTASNDQISAADIEKLILEKPALLRTLPAFFNIQVLGACPQACSICPWPSHGGSVPVTERKELMPKAAFASLLDKIAEFAGDAVIDLSLWGELSLHPDHFELIEMVLARPALSLVIETSGIGWKEDELKALTAMHVKARKNHMAPLSWIVSLDALDPERYKELRGPGFSEAQSCAKTLFSLFPNDAYVQAVRLKGAEDDIEKFYRFWKGENSKQVIIQKYDDFAGALPKMQAADLSPVKRRPCWHIQRDMNILLDGRVPGCRENLAALKEGDQVLGNAFSDDLSLIWENGAALYNGHCKAEYPGICALCDEYYTYNF

SEQ ID NO: 89102 - protein, 240 aa, Unknown
  Obtained from environmental sample
  misc_feature (1)..(240): Xaa is any amino acid
MKALCVLYGGRLEEEAFEKILSGKTGNESAFSLAVASARAFPGVEKTVLLGMRDSGFADLPSDIETVLHPSWTRRSLFEEISRLSAGYDFTYFAWADCPLLDSALTGAMAERHLRYRAEYSYADGWPYGLAPEILGPGIAGILAKLSENSDGLVDRDALFLTIQKDINAFDIETEISPVDLRPYRLSLTADSKRNLLLLIRFMEDLKQTVSNDAISASDIEKIILEKPALLRTLPAFFNI

SEQ ID NO: 89103 - protein, 284 aa, Unknown
  Obtained from environmental sample
  misc_feature (1)..(284): Xaa is any amino acid
MFLRSLSVPVNTINGVGSSAAQKLARLGIRAAADLLLHYPRDWEDRSNIVPLKAYRNGKVCTVVTVFAREWIGYGRMRTPKIYIEDENTQAALVCFKRPWLDKQIITGQKYMVSGTFKYRYGELQSRTFEIELASLGTSFGKILPIYPLTAGIIQSKMRAFISSAIKKYVKDLENELPNEIMEKEALLTKTQAVREIHFPTSTGMLERAKKTLIYEELFYMEVMVVRRAIERKSRIKIERADDKNNNENISQLQQQLMERLSFSLTDGQKSAVMEINRDMSSNI

SEQ ID NO: 89104 - protein, 85 aa, Unknown
  Obtained from environmental sample
  misc_feature (1)..(85): Xaa is any amino acid
VVDQTTSVANGGTARVRTPFSINARGKTLFITATSPTVVEIYNIKGGKEASLNVTGATHTVNLSLPDGVYFAKVRGTPNVKFVVK

SEQ ID NO: 89105 - protein, 143 aa, Unknown
  Obtained from environmental sample
  misc_feature (1)..(143): Xaa is any amino acid
MERIDAGFCEVANPFNRNQIKRVSLVPAAGGMPQDNTADSVDAFVFWTREPKNILAKTEELEKRGFRFYVMVSITGYPAELEPNMPDLSKVLANMKKLSQKIGQDRVIWRYDPVILTSVTDEDFHCRNFDFLARELADYVRRV

SEQ ID NO: 89106 - protein, 285 aa, Unknown
  Obtained from environmental sample
  misc_feature (1)..(285): Xaa is any amino acid
MQTVSSRHSVVALPPFILGVRANRHITNGNTISARVVAIGVNDSLLAGQKVSVELKRVSWASYLIDSDFSTGRPKYITNESVDLIEEKSVVTGTAPTAIEFKNQQPGVYVLALSSRDRLGRLQTVKIDLYLAGGDQQTSWKKAEQNVFETVMDRNSYEPGQQAKVLLKSPYKKALALAITEMPSGELSYKWVSIDNGQGTFTLDVKQEMAPRVPVSFLLMRPRTAAARRASDGASVDAGKPETVGNTTWLTVNPVANMLDVKLSHTPMVTPGATLEVTVNLRDIQ

SEQ ID NO: 89107 - protein, 302 aa, Unknown
  Obtained from environmental sample
  DOMAIN (111)...(191): Bacterial pre-peptidase C-terminal domain
  misc_feature (1)..(302): Xaa is any amino acid
PNKSFVVLSAGAAGADWTISGEIIDTPEGAVRFYTRLIRSEDRAVEASFHFDVERNEQIVALLASGSSQGGRSSSSVAPDASEPDSFENPVPYEIGADANAQTANRTLHGGDEDFFLLLPANDGQLTMETTGSTDTYMEFYNAETREKLGQNDDGGTGSNARIRYSVQAGKRYIAKVRGYDGSTGSYGFRAYMTIRTTSTGFENPVAYEIGSDEHAPVMNRTLDREDEEYFLLLPVSDGQLIMETTGSIDTFMEIYNAQTREKLVDYDDGGRGENAPIIYNIQAGKRYIAQVRGYDRASGSY

SEQ ID NO: 89108 - protein, 800 aa, Unknown
  Obtained from environmental sample
  DOMAIN (214)...(514): Alpha-2-macroglobulin family N-terminal region
  misc_feature (1)..(800): Xaa is any amino acid
LLPFKFERVSVRAYSSPRTQEGDSIPVSLEFSQEVEPDGIQKYFSVEGFPALKKENIHVYGSTVVINNLPLEYEKKYTVRILAELKDLYGRALGKAQKVEAEVGEANSYVYFRNSGSRMLEAGYPAKIVWETQNPVSIRSRIAQAQNPYEKIPLSGLSEMDISKLPQNSKHYFMEDLSPFLNAAGKGSVTMQWEYRTKSSWEKGRIYNNDEWLTVQVTNIGITLRYGYNMALIWATHLSDGTAVPNADVELMEGGKVVLAGKTDANGLAVFNFPKGDFISKFSEPQSGYWNNTFGNGFRVRVSEGSGPTQDRAEFIPNDSHNLWRFSIEAYESPFIMEKERPVIFLFTDRGLYRPGETVTFRGIDRNLINGQYTAYKGQYRIEVSTGAYKAPVIATLEGNTTGNGGSFGSFTLPSNIDPGQYRIIYRRAGTTGSEREREHSTAFTVANFERLRFESSLLFTDSVVYQGDKLSASLSASWLAGGGLSGAPYTWYLTREPASVIPGGTEGQWRNWNFGSEVSDERSFVGRGEGTLGPDGKAGISNETINQFIEGAAYSYRLEASVQDTARQEISSRAAILVHPASFYIAARIDSGTIKTAATGAAAGGAATNPSAWFLSAGQPATLSWALVSPNGDGVGTSLTSQDLSIQLVRHEWKQARQQGTGGRINLVWERVEEITAQRNVKITPASSGGIISGVFNFTPDKSGLWEFRLSGSDQKKRVAATRSRFYVSGAGWVRWDSDDVDTITLNTDRPSYAPGQTAKIMARSPLEKGKYLLTLERENVISQKIIELNGSALTMISP

SEQ ID NO: 89109 - protein, 380 aa, Unknown
  Obtained from environmental sample
  DOMAIN (269)...(351): Helicase conserved C-terminal domain
  misc_feature (1)..(380): Xaa is any amino acid
MPDVLAEFLAESESKGLQLYPAQEEAVLELLEGKNVILATPTGSGKSLVASFLHRLMLSKNLRSVYTCPIKALVNEKWMALCKEFGAQNVGLSTGDATVNHNAPILCCTAEILEQIALREGENSNIGAVAMDEFHYYSDKERGVAWQIPLLTMKHTQFLLISATLGDTSFFETEMTKLNGLQSVCIKNAERPVPLEFAYSESPLANEIQKLLNEGKGPVYVVHFTQSEAAENAQAFTSLDIAGLLKKDKIAEAMANFRFSSPFGADIKRWLRQGIGLHHAGLLPKYRILTEKMAQQGLLPIICGTDTLGVGVNVPIRTVLFTKLSKFNGEKTTMLPVRDFHQIAGRAGRRGFDSVGYVVVQAPEHVIENKLREAKFSKTG

SEQ ID NO: 89110 - protein, 62 aa, Unknown
  Obtained from environmental sample
  misc_feature (1)..(62): Xaa is any amino acid
ELSKLSAENDLISNPEIWFDFHDARNKTSHEYGEEVAEVVLEYALKFLPCAKEFLEVLEKKI

SEQ ID NO: 89111 - protein, 257 aa, Unknown
  Obtained from environmental sample
  DOMAIN (10)...(85): RNA 2'-O ribose methyltransferase substrate binding
  misc_feature (1)..(257): Xaa is any amino acid
MRNKLTDELAVCGMNAVLAVSEHHPLTINRLFLREDRLNSFTGICKQLAERKRPYKLVEDEELERICKSVHHQGVVMMIEEPVIEPLTNEDLDLWAQEGKTGLVLHEVGNDHNLGAIARAAAFFDAHFIVVNEHDSEARLSTSAYRIAEGGMEHITVRKIGNTAAFLKDAAKEILVIGTDIRARRRIRDLSGMVKDWQHSNARRPGIALVLGNEENGLPQNVKDNCTYLLRVPGTGNIESLNVSQAAALFLHEIYDL

SEQ ID NO: 89112 - protein, 117 aa, Unknown
  Obtained from environmental sample
  misc_feature (1)..(117): Xaa is any amino acid
MEDVGVYLRGRILDYFEEKGIEINLKYIDPSYAIRSSPANPDDSIYCERLGNAAAHAAMAGKTKMIIGLVNNEFVHLPIKQVITHRSKVDPESSLWRDTLDATHQPAMMVNSFYNNG

SEQ ID NO: 89113 - protein, 310 aa, Unknown
  Obtained from environmental sample
  DOMAIN (10)...(295): Dihydroorotate dehydrogenase
  misc_feature (1)..(310): Xaa is any amino acid
MMNKNAAPPDLSVTIAGLRLQNPVIAASGTFGYGREYAGIIDVSRLGGICTKGLTLNPRAGNTGIRLWETPAGLLNSIGLENPGIAAFIENELPHLRTLGPAVIANLSGSTVEEYTEGAALLNASSVDMIELNISCPNVKAGGMAFGLDPAAAAAVVTPVRRALHHKPLMVKLSPNAPDLTAVARACINAGADALSLVNTFKAMAIDVQKRKPVFDNISAGLSGPAIKPIALRMVWELCGELRPAVPIVGFGGIASTNDALEFLMAGAAAIQVGSATFAHPAAMIEIIDGIEDYMRRCDIAKLEDIAIHG

SEQ ID NO: 89114 - protein, 296 aa, Unknown
  Obtained from environmental sample
  DOMAIN (7)...(294): tRNA synthetases class I (E and Q), catalytic domain
  misc_feature (1)..(296): Xaa is any amino acid
MGNGEWGIRDRYAPSPTGLQHVGGIRTALFNYLFARSRGGTFVLRLEDTDRTRSDARYVQNLYDTFSWLGFHWDEGPDIGGPFAPYTQSERSELYKKYADELISKGQAYYCFCTAERIEKVRQEREKANLSGYDRHCRVVPPEEAARRAAAGEAHTIRLKIPLGETTRFNDHLLGDIEWKNDDVNPDPVLLKSDGFPTYHLANVVDDHLMEITHVMRAQEWLASTPLHVIMYKSFGWAVPEYCHLPMVMGQDGKKLSKRHGATSIDEFRRQGYLPEALINYVALLGASYEEARPEG

SEQ ID NO: 89115 - protein, 113 aa, Unknown
  Obtained from environmental sample
  misc_feature (1)..(113): Xaa is any amino acid
VTSNNHRGGRRYAPYAFTEQGVSMLSSVINSERAIEVNINIMRAFVKLRHYVLSKSDTNEQIAELRKLLMVYIENTDYKLLKHDKAIGQIIIALNNLIDKPPKTKRIGFNTGD

SEQ ID NO: 89116 - protein, 55 aa, Unknown
  Obtained from environmental sample
  misc_feature (1)..(55): Xaa is any amino acid
MADKLAQIEKLIYEIHGQRVMLDSDLAALYGVELKAMNQAVKRNIGVSLLILCSN

SEQ ID NO: 89117 - protein, 673 aa, Unknown
  Obtained from environmental sample
  DOMAIN (470)...(673): Methyl-accepting chemotaxis protein (MCP) signaling domain
  misc_feature (1)..(673): Xaa is any amino acid
MKIKFKLSIVVITIMAAVVAGITMLLLWQSSKNTLQLSLRSQEHLVNSRAEFWKGREDGYVRALTTLANVMGDFETLMPEERRDNYDEMLGSAIKEEPNMLVLYTVWKPNALDGMDAKYIGRTGSTPTGQYAMAWSKEAGGTVKRQSNDIDNVMEHIYGSGKYKDFVSEPTLRTIDGVEKYTLRIVVPITNNKTNNEEVVGAVGCVLSIDAMQNIVENTVKNNNEINMLIIYSNKGSIIAHYKPENAGKNMFDADEELGNFRNDIFKAMNNNEICKGSVYEPNLDDHIRFVAKPIQIGNSDTNWMVLIGVSESYILKEIKAITQFTITLGIISIVTTAVIFFFVLGYIAKPIITVTNTLKDISEGEGDLTKTIPEKGNDEFSEMSRYFNLTLEKIKKLVISIKEHATVLSDTGNELSSNMTETAAAMNEITANIQSIRGRMINQSASVTQTGATMEQITTNIDKLNGYVEQQSASVSKSSSAIEEMLANIQSVTQTLVKNGESVSELTTSSSLGRVSLQDAAYDIQEIARDSEGLLQINRVMNDIASQTNLLSMNAAIEAAHAGTAGKGFAVVADEIRKLAESSSEQSKTISEVLEKIKASIDKVTASTGNTLTRFEIIDSGVKTVSNQEEVIRSAMEEQNEGSKNILEAVGRLNEITRQVKDGSSEMLNGSR

SEQ ID NO: 89118 - protein, 317 aa, Unknown
  Obtained from environmental sample
  DOMAIN (99)...(186): PSP1 C-terminal conserved region
  misc_feature (1)..(317): Xaa is any amino acid
MSDYDEYEDEEDISALEDNHEIKLQEHDVITGADAGIESIAPDAPIYRLRLLYSQETFLAVYREDSLTPNTMVIVPTRYGRDLAQVIGAVHGKLPSVSEIAWIVRAAAPEDLEKSRNNTKLEKEAFDICKKKILNHKLEMKLVLVHYLLEEPKILFFFTAENRVDFRELVKDLVSVFKMRIELRQIGVRDEARVLGGLGVCGRGYCCHCVSDKLKPVSIKMAKDQKLSLNSVKISGPCGRLMCCLFYEYNFYSEQQRALPQEGVRVSLNNESWKITEVNPVTGQIKLSSDDGRFMTASSAQFERTENHWRLRDAVKN

SEQ ID NO: 89119 - protein, 527 aa, Unknown
  Obtained from environmental sample
  misc_feature (1)..(527): Xaa is any amino acid
MKSLPFAVQLSLIVFLILIIPFIVLMSYIGSSTLRYSEEEIARNSLEHIELDCRFTESFMNNISGQVHRFAVYHDFYLYEGLQKYSAIQGNVDNGLRIQRLQRELVSIARTDDAILSVFFFFDDGDYIISSDRGIVELADYPSLSWMRTIPAGREGLGGFWTPRELQSSTVSETLRGQDSGYFTRVVSYVYQLSKLITGVMGTVVINVRESSIANHLNPRNDRDNTLGIILLQSDGRVISHPLESNFMVQGRNLPHIAEILDSKGNSGYKFLREGSEQYLYTWLKAGYFEWVFVSVQSMGVLFNRTARTIRNMIFLSLIVLFFGTMASMVVFSWVSKPMRRLVKGIKTSVGIEEPAIRNEMDILSSAFTRIGHKEKELRDLLNEREKDAALLAIRNLLSDDPLTPQETGILEQVLPHRYFRVAIASLDNYEEYRRRTTTEQRAYHRFLFISEAEKSAEPSLVLRGVHLLEAQIALVINVDEKIENPKLLPFLRTLQKTAKPVFETTLTIGLSEIGYAMNGLYQCAAQ

SEQ ID NO: 89120 - protein, 70 aa, Unknown
  Obtained from environmental sample
  misc_feature (1)..(70): Xaa is any amino acid
MLVAEWDYELDLEVAKEEAHEKGLSQGRKEGRAEERHKIIKGLYQIGVGIETIAKAVDLSERQVKDILGL

SEQ ID NO: 89121 - protein, 280 aa, Unknown
  Obtained from environmental sample
  DOMAIN (203)...(235): Ankyrin repeat
  misc_feature (1)..(280): Xaa is any amino acid
AGKDVAEQLHKNFGEYSPERALKLVYLKLQSDGGQSIKIGSKTYQNPEEVAAETDARQIVLIKEAILEEDSLFLVWLSDQAGSFTTTDGFYKLNPQDRFYLLSLFPFLSYKEFVKNNWEQAAINDLVILIHSNPGRFDLFEAYAAQGLPFSKQTDTSVVSWQPTPMSYLAMFFKELLNDEMAGLELVRFLHKKGADINEASGDGSFPLNIAVRCRNIALVKLLLELGADVNKTDGYSVPLLYAIGKNDDDDDEAVRIAIACMLLDYKANVRIIDSYERYA

SEQ ID NO: 89122 - protein, 263 aa, Unknown
  Obtained from environmental sample
  DOMAIN (162)...(216): Transglutaminase-like superfamily
  misc_feature (1)..(263): Xaa is any amino acid
LNTVRFQYQTELVFSSPASEHRFLLRILPQSDDRQQIKSLSWNIDPSPADTLWQTVDGFGNNALAGRISAPHGNFCFGIEGDAQVSGEPYTESDEPPRFFLYPTELTRAHRVLVDFYDDSNRFAPVKTLDRIQFFSHAVHARLRYKRGATENSTSAAQAFDIGAGVCQDYVQILLTLLRLDKIPCRYVAGLASDYGETHAWAEAWTGTQYCAVDPTRDKLIDEGYIALSRGRDFTDSSIERGVFKGACRGTQTVSLKMEINNN

SEQ ID NO: 89123 - protein, 441 aa, Unknown
  Obtained from environmental sample
  DOMAIN (1)...(419): Amidase
  misc_feature (1)..(441): Xaa is any amino acid
LTRAKEIQSRIDAAKAAGEPLSPLAGVPIAIKDNISTEGIKTTCASKMLGNYTPVFNAAVIEKLEEAGMVVIGKLNMDEYAMGGSSETGAFGAVCNPWDVSRVAGGSSGGSATAVALREIPIALGSDTGGSIRQPCAFCGVTGIKPTYGSVSRYGLLAYASSLDQIGPIGQNIDDCAALLSIISGPDKRDSTCVIEKPFEFSEPKSKLESVKIGLPRNYFAGGIDDEVKTAVLATAKEFQASGAIIEEFEMPFLDYVIPTYYIIACAEASSNLSRYDGLKYGHRSANAQSLSEVYRLSRNEGFGLEVKRRIMLGSFVLSSGYYDAYYKKALQVRALIKDAYTKLFTKYDMILSPVAPTTAYKIGENSGDPMKMYMGDIYTVSINLAGLPSAALPCGFDSTGLPIGFQLIGDAFSEKKIIDTARVYQSRTDYHVKKPEGIKV

SEQ ID NO: 89124 - protein, 306 aa, Unknown
  Obtained from environmental sample
  misc_feature (1)..(306): Xaa is any amino acid
LGIAAARSLSGFLSRAKTERPLEVTLVSPIPPHNSQDETEELYGITVLGRIPHLSERLAEYDLLVTHFGIGAFEAIYARLPVIIVSPSSYHEKLSRKAGFFSLGIGVGAADRLGKLACNFGDTGKPDIVKTLEQKSKEIADRYGLCEDQKETIATFLCRVSPYSPLVCPVCKKPRNVPVLARFTEESYRQCPHCGIIYLARLGEPPIEYEKDYFFGDYKKQYGKTYLEDFPGLVETGKRRLEHIVKLIQRDLPRSYTEIHGLEPKVVRSQNFMKTLCNSVSSVVNIFFHLTNKSFLDRKNGRERNY

SEQ ID NO: 89125 - protein, 196 aa, Unknown
  Obtained from environmental sample
  DOMAIN (1)...(192): Cytidylyltransferase
  misc_feature (1)..(196): Xaa is any amino acid
MEALAFLPCEKKILACPEDSVSAFAPLAEEAGFVLIPGPKEDVLARYCLTIRKSGADRVIRATADNPFVFIDAAGAIEGEASALGADYAGYSGLPVGAGVESVASEALLRAEREAEAPYEREHVCPYLYRHPELFRLHRPLAPRRWQGSEYRITVDTREDYDRANLLYGRLSTMQPGERNLGENILSQCERLWMGK

SEQ ID NO: 89126 - protein, 537 aa, Unknown
  Obtained from environmental sample
  DOMAIN (462)...(537): Histidine kinase-, DNA gyrase B-, and HSP90-like ATPase
  misc_feature (1)..(537): Xaa is any amino acid
MTMSSVKSLKMFANKRFLVFSCILFFVFALSSITAYFISARQINHSFIKNQLSIAAETMRLRLETAVDSDLALVVKMADTPVIRQYFMNPSNPVLKSQADDEFTLYKEHFNDKILYWVNDVDKIFYSTGNAPYVVNPDDPENYWYNLTLYETEKFIFNINYNPDLEQIYLWVNVPVFVKTQTGKKPIGLIGTGINLTDFSNFVVSSYHKFDENITTYMFNKYHEITSAVDYTLVENKVRLDEHLGETGKELIRVARELSGDESRNFIYNNKVYQVNSIPAMEWYMIVSYPVPDLLSLNKAMNTVFFSMLVLILFLFIIINVFVANSENAIAKQNLQLIEANRKTESASRAKSDFLAKMSHEIRTPMNAIIGMAELLLRGELSSEARSYTQDIKQAGNNLVSIINDILDLSKIEAGKLEIVPGKYLLSSLINDTVNIIRTRLKEKPIRFFTNIDGNIPNSLIGDEVRMRQILLNLLSNAVKYTEKGHVGLTITVDKQDDKQVLLRMAVFDTGKGIKPEHLMNLFDEFVRIDMKKNPWH

SEQ ID NO: 89127 - protein, 943 aa, Unknown
  Obtained from environmental sample
  DOMAIN (858)...(939): Hpt domain
  misc_feature (1)..(943): Xaa is any amino acid
MNPYDPYLRTLAYTELELYKEHFENQTVFWVSDADKIFYSTGNEPYVVDPDDPASYWYNLTLYETEKYNFNINYNPDLDQINLWVNVPVFADLRGDKKPIGMLGIGINLTDFSNFAASSYWEFDKNITPYMFNKYNEITSAADYNLVENKIRLDELLGDTGKELIRASHELSAGEIRSFVYDKKIYLLNSIPEMEWYLAVSYPIPGFWALNRAMNIVFFSMLFLILFLFIIINVYIARSENEIAKQNLQLIEANRKAEFASQAKSDFLARMSHEIRTPMNAITGMAELLLRGELSNEARSYARDIKQAGNNLVSLINDILDLSKIEAGKLEIVPVKYMLSSLINDTVNIIRTKLKEKPIRFFTNIDGNIPNNLIGDEVRLRQILINLLSNAVKYTEKGHIGLTITAEKQNDKQVLLRIDVADTGKGIKPEHQANLFDEFVRVDKNQGIEGTGLGLPIAKRLCAAMDGKISMESKYGMGSVFTVIIPQGIESKKPFAAVEEPEKKKVLVYEGRVVYAKSICWTLENLKVPYAVVTNQDDFAAALYHGPQPSPRGVEPEVRGSPLAEWFYVFSGYGLYEKIKPLIGKDDSVFCGGKKPHLALMVEWGTEAYIPNVRFVSIPIQSLSIANTLNGKTDRRDYFESSVSSGMIRHTFPHARLLIVDDIATNLKVAEGLMAPYNVKIDTCLSGAEAIELVKRNKYDLIFMDHMMPEMDGIEATAAIRLWEKQKLEKKAGNPRKQIPIIALTANAVVGMREMFIENGFNDFISKPIDVSKLDEMLNRWIPEEKRDRGSGNDTSTRSAVTNTQSRRSRNPVPSPQSLARYPVVQNPGPQTTIPIIPGVDTARGIVMTGGTVDAYRQVLSLFCKDAQDRLPFLQNAPDANLPSADTMKTFITQVHALKSASASIGAQTISSLAANLKPQAKPGIQPLSEKICPILQNSLQRC

SEQ ID NO: 89128 - protein, 425 aa, Unknown
  Obtained from environmental sample
  misc_feature (1)..(425): Xaa is any amino acid
MAPATPKANSARFLISIAEYPSSAFTVTKFSGRDAVSATYSFEIEFQPSESARASDAQAPVLTAERVLGKPCRFELIRDKNGEITGYDGVVSEFKRMIRSKPVYAIRLVPWMELLSLNINNRVFQKLTVIDIVKKVIKNAGLGARCAFKYKCGGYAYPKIDFCVQYRESDLNFISRLMEQNGIWYYFSGDGGVVVTDDFAEFPKMAGGIPFVENIGFAETTKRLRDDNDVEARNFTKQADVDGESSVDNTDESEALRLEYLYGGEFGESVYALTAVSAVIPKSVRLRNQNYRTPETPPEGASEGVDIGGAWGSVYEYGGAFKNDEEGKRLASLYLTRLQTENSQTLGSSRCAAFRSGRIISIDGVGEFLLLSVEHKGGQGEGSGNPEYTYNNRFRCIDSTKKSYAPPLLAKPPVAAGLITAPIDA

SEQ ID NO: 89129 - protein, 67 aa, Unknown
  Obtained from environmental sample
  misc_feature (1)..(67): Xaa is any amino acid
VIDGIKAAGSADPTAVKDAMAKINGPYVTGNIRYDADRNPIKGAAILEIDKKDGKLVNAYKTTVNPK

SEQ ID NO: 89130 - protein, 310 aa, Unknown
  Obtained from environmental sample
  DOMAIN (240)...(309): S-adenosylmethionine synthetase, C-terminal domain
  misc_feature (1)..(310): Xaa is any amino acid
MKSNRYFFTSESVGEGHPDKLCDQISDAILDACIKDDPQSRVACETFASTSLVLIGGEITTNTFIDFHNLVRDIARDIGYTDPSYGLDCNSMAVLDMIHSQSPDISQGVSGTGLKKFKGQQGAGDQGMMFGFACNETKELMPMPIMLAHKLLLSATKQRKNKTIKWLRPDSKSQVTIEYEGNKPIRIDSVVISHQHAPEVSYKEIETTVIEKIIMPVLEPTGMLDKKTNYYINPTGRFVVGGPFGDTGLTGRKIIVDTYGGMGRHGGGAFSGKDPTKVDRSAAYAARYVAKNIVAAKLADKCEIQLATQS

SEQ ID NO: 89131 - protein, 84 aa, Unknown
  Obtained from environmental sample
  misc_feature (1)..(84): Xaa is any amino acid
MFNDGNIEGAKKVFLTTKYSDGLSRVGDHYKSQNKPLEALQMYWIAPDRTKSEPLLEQLAAVLRGLIPEDEEYGVFQEGQEQHD

SEQ ID NO: 89132 - protein, 244 aa, Unknown
  Obtained from environmental sample
  DOMAIN (59)...(162): ATPase family associated with various cellular activities (AAA)
  misc_feature (1)..(244): Xaa is any amino acid
MAENKQTDDKANKLTPKEIVSELDKYIVGQKKAKRAVAVALRNRIRRLKLDPELREDIAPKNILMIGPTGVGKTEIARRLAKLAGSPFLKVEATKYTEVGYVGRDVESMIRDLMAAGFQMVKQEMQETVLQEAKKRAEEELLDLLLPSNSKKPKEKKMKPVVRPMGAFSINPENSNGSIIGTTLQVGIPFMNNKEENEEEKNAEAKEEPVNDGEDEKFKATREKFRVMLHEGKLEDRPVELMVN

SEQ ID NO: 89133 - protein, 87 aa, Unknown
  Obtained from environmental sample
  misc_feature (1)..(87): Xaa is any amino acid
KYDRFFLEWDDERAGSLDALVVFKDKPNTEIVLGLLSSKANILDDETRVIRMLDEACKIIPKDRLFLSHQCGFASCDGGNELTENEQ

SEQ ID NO: 89134 - protein, 635 aa, Unknown
  Obtained from environmental sample
  DOMAIN (23)...(267): Iron only hydrogenase large subunit, C-terminal domain
  misc_feature (1)..(635): Xaa is any amino acid
MCIGCGNCINACTHKARTLIDDTDRFMEDLKQNKKIIAVAAPAVASFFPDQFLNLNGYLKSLGVEAFFDVSLGAELTVITYLDYIKAKNPRTVIAQPCPAIVTYIEIHHPELLPLLAPADSPILHTIKLVKTFYPQYKDHKIAVISPCIAKRREYDETGLGDYNVTMLALKNILDEQKINLSSFPKVEYTGVSAERAAGFPIPGGLLDTAERFVPGIRRRTDKIEGVHNIYPYLQEISEMLNTKAQLPLLIDCLNCEKGCIGGPGTGNAEKSLAMLREPVQRRMAELEKKQHSQIGNNKYKKYHHVLRKYWKKGLYNRSYHDLSGNNTIKQPGETEITEIFHSMKKFKKEDIYNCTCCGYGSCKAMATAIYNGLNKHENCAHYILALLRENQEHIANASELIERINNLIQELNDTISSQAAAVDHSSVETEEIVASIKDTSEMSLKQQESVKGLIEIAGHGQESMRKTIQSINEISQHVEGISSAIRIISSIAANTNLLSMNAAIEAAHAGDAGRGFAVVAGEIRRLSETTRENSVSISHTLTNIINGISDTTKQSGETDTRIAQMSKEISGFAETMSAFISTFNELSAKSGNITASLVSLKEQSSAVKTSYAQMIEMTEKLAKALKDLSDLSKR

SEQ ID NO: 89135 - protein, 70 aa, Unknown
  Obtained from environmental sample
  misc_feature (1)..(70): Xaa is any amino acid
MPSAFFATDLGNRQQATGNREQGTGNREQGTGNREQGTGNREQGTGNREQGTGNREQGTGNREQGIIHIF

SEQ ID NO: 89136 - protein, 310 aa, Unknown
  Obtained from environmental sample
  DOMAIN (87)...(286): SRP54-type protein, GTPase domain
  misc_feature (1)..(310): Xaa is any amino acid
AEVKIIKEKLESSDLASSKEEHPTLNRIDDLLILNDFPASYRKALLEKVRKEISLDALNNYQIVQDKVLEWIGESIKIYEAGKFNIRPRIVILVGPTGVGKTTTVAKLAANFGIDSKTRTHKRNVVLITIDGYRIGAKEQVEKLSEYMQFPCFSTVDYDELKAIIATNSEVADLILIDTIGRNPRDMEELGKMKKLLDASGTLAEVYLVVAATTKTSDLKEILQQFESFNYRSVIITKMDETIRAGNVIGVLSEKNKSVSFITNGQGVPADIQEASVIKFLINLEGFKVNRNKLEEKFPDKRKGQMQEWV

SEQ ID NO: 89137 - protein, 223 aa, Unknown
  Obtained from environmental sample
  DOMAIN (1)...(223): FHIPEP family
  misc_feature (1)..(223): Xaa is any amino acid
MSGLIGFYAFHIGRVQKKQESFNEMMAKTGEAGKKQRDDRGDVPQMEPPDPLSLELGVGLIPLVDKDKGAELMERVKQMRRQIGLDMGILIPKVRIVDNILLGQSEYCFKIRGVDVGKGKIRMGNYLCINPGTVKEELSGEKTTDPAFGLPALWIGEEKRDEAERSGYTVVDPPTIIATHLTEIIKRHAAELLGRQETKAIVDSLQKDYSAVVDAIFTSKDEK

SEQ ID NO: 89138 - protein, 134 aa, Unknown
  Obtained from environmental sample
  misc_feature (1)..(134): Xaa is any amino acid
MKNTIKFRFMGILTLLVTCAIFAVAAMLLWNALLPEIFALPQISYLQAAGLLILARLLFGGIGGDLHGGGRGPGRGRHPFHHGNKFREKWMNMSEEERKEFMEKEKDFSNFFHGRFSRFRDSFADDEKPEQGRE

SEQ ID NO: 89139 - protein, 446 aa, Unknown
  Obtained from environmental sample
  DOMAIN (159)...(336): Trypsin
  misc_feature (1)..(446): Xaa is any amino acid
EYRSNVRSKLTTLREQATESLINAQIKAVEEKRWGDATSLARSLASLGITAENTGEEPELVLEYAKEQLSEGKNLAAFLAAVRAHNLKPLSFDDALLFLKKAVDVRQRRTAAFFLSVIEDIGGGAQIPQELKAYAQGRDTPTDMIKGVATVLVERGVRIQQGRGVPDNVLGSAFFVDATGLLITNYHVISSEVDPSYKGYSRMYIRMGDSASARIPAKVIGWDKAMDLAIIKTEIVPEYVYSVADWIIPNVGETIYAIGSPVGLEKTVTQGIVSALGRRLVQIGDVIQIDAAVNRGNSGGPVVDMAGRLVGIVFAGIEQYQGLNFAVPAERLAAALPAMIAGGKAERPWLGLSLCESIDGAEILYVAPFTPAAEQQIREGSIIKAINGEMVKTPQGALIPALQDIIFPLSPGELVTLELELPQGKTVRHIIKLASRPEVPMADAAK

SEQ ID NO: 89140 - protein, 143 aa, Unknown
  Obtained from environmental sample
  misc_feature (1)..(143): Xaa is any amino acid
MELKRVVVTGLGTINPLGKTVEEYFDNLLKGVSGAGPITRFDASKFKTQFACEVKNFDVGQHPDALDKKEARKLDLYTQFAMIAAYEIIKDSGMDFTKENVDEIGVVWASGIGGIRTFFEEVKGFVEGDGTPRYSPFFVPKMI

SEQ ID NO: 89141 - protein, 78 aa, Unknown
  Obtained from environmental sample
  DOMAIN (6)...(73): Phosphopantetheine attachment site
  misc_feature (1)..(78): Xaa is any amino acid
MADVAAKVKAIIVDKLGVDEAEVTPTASFTNDLGADSLDTVELIMEFEKEFGVSIPDEDAEKIATVGDAISYIEKAKK

SEQ ID NO: 89142 - protein, 83 aa, Unknown
  Obtained from environmental sample
  misc_feature (1)..(83): Xaa is any amino acid
VKSELEQIPGIGKNMAQHLINAGYTTIASLKGQNPEEVYFKDCKFQNIQVDRCALYQYRLAVAYANGTITDPDKLKWWNWKDK

SEQ ID NO: 89143 - protein, 210 aa, Unknown
  Obtained from environmental sample
  DOMAIN (33)...(189): Bacterial regulatory proteins, deoR family
  misc_feature (1)..(210): Xaa is any amino acid
YFLVHGAAIYKGDPSLSTRISDYHLLLEKAVSNPEKERIGKAAANEVKPGDTIFIDIGTTTEYLALNIPQNSPITVLCFTINTLFEVYQKNVQHLIMGGGYYHPDTQLFESSDTVNFIRQTRASKYFLSAAGVSKEMGLTCINQYEVGVKQACIDSSLKKILLTDSRKFGVVRSAFFSPLDKIDMIITDDGISAEWVKIIEDMGIALHVV

SEQ ID NO: 89144 - protein, 113 aa, Unknown
  Obtained from environmental sample
  DOMAIN (39)...(113): mce related protein
  misc_feature (1)..(113): Xaa is any amino acid
MKLMIRFADQIVGALIIIAVGILVFVIFMLGSSQRWFVRDNDYVTYFSSASGLSPNMPVLYKGYTIGRVKKVEFNMADDRMDVQFSIFKEFTDKVKRGSRIDLVSSPISALGG

SEQ ID NO: 89145 - protein, 476 aa, Unknown
  Obtained from environmental sample
  misc_feature (1)..(476): Xaa is any amino acid
MENDGSSYLFSGSVIYRSDQDVTILKKATISSGESENEFWSIKASKLWLLPGSDFAIFNAVLKVGEIPVLYIPFFYFPGDEMIFHPVIGYRSREGGFVQTTTYLIGQPKANASESSLSKIIGNSDNNEKEIQGLFLRNTSRPIKDADSVSLKAIFDYYVNLGTYTALDLTTPKKGIFNQLDLSLGLGFTRTVSDADGFFTPFWPNYDGTYERNESNLFSKNVPFRYKMNFKSGISMKYGSLSWNIPYYSDPYVARDFTNSRAESMDWMNMLEKGADFEEKSSEGDLGSYSWSMSGNINPSFKALSPFISNISIPSISTSVSFNKLKDNDVTNTASPNYWFYAPDKYTIYSISGSVSGTPVSLGGVQSKPAVKKSDSQTGEDPFNGIGIPISPWATDDADKEKTTSSEILVPPVLSQTFSLPAAGNIKFNIDYSLSPTTSSEMQFMTEKWKTYEDMDWNDSKSILTSVSGSTNLNSA

SEQ ID NO: 89146 - protein, 563 aa, Unknown
  Obtained from environmental sample
  DOMAIN (40)...(185): GAF domain
  misc_feature (1)..(563): Xaa is any amino acid
MGSNIEKTEKVVQDLSGRRAAIVEALNKSVEIFAVHKEETFEEVMTNGIRPFAEAVGLDRVVFYKLVDVEGGKRLGQIYRWDKSEGGLMSLADELKVLPNLPFLENYISITSQGGCVRLRKSDYTEEMDAFMRSYGILSILIVPIFMHGELWGDISFQDHTNDRYFDEDCSDLLYTAARIFSGAVIREEMKRRGKMEAALNRAAIRFISQNEETFEATMTAGIREIADAFNLDRFSIWRNSLRPDAIHVSQIYRWDRESGGTTMPTKGLDDVTYAQLAPRWEKLLASGETINSPVKFLPEAAMLRSFGCVTAFITPLFINNIFWGFALLEDRHNERYFEKDYIDMLRSAALLCANTIIRADMEREIVDANEFNSAVLDASPLGFTIFDENANVIGCNDTIVKLFKTTKKYYINHFDEFSPEYQIDGKKSRDKTVELVKRTMNGEKLVFEWVYCTSSGEAIQNEVTLVRAMYKGKYVVLGYQYDLQERIKREIELARAKEVIELQLAKLNLVVQATKIGLWDMEAVHDNPVNPNNTLLWSDEFRHMLGYTDENDFPNILRSGAT

SEQ ID NO: 89147 - protein, 651 aa, Unknown
  Obtained from environmental sample
  DOMAIN (116)...(181): His Kinase A (phosphoacceptor) domain
  misc_feature (1)..(651): Xaa is any amino acid
IANLFEYLSSIFPENLPDSTTVPIVVCDDTATSHEAVFQALHDIDVMAVIGAPLYVDGHLWGVMCVEQSLTPRKWTQNEKRFVAITASTIAGVIMRDIYTVKLKEALSKAMEASKAKSDFLSNMSHEIRTPLNAITGMTTIGKNAKDMERKDYALDKIEGASTHLLGVINDVLDMSKIEANMLELSPCEFNFEKMLQKVVSVINFRVEEKRQKLAVHLDSKIPKTLIADDQRLAQVVTNLLSNAVKFTPEEGSITLNADLMGEKNNSCTIQVSVSDTGIGITEEQQKRLFSSFQQAESSTTRKYGGTGLGLAISKSIVEMMDGHIWVQSEPGEGSTFTFTIQATRGVDNNQKSLSDVNLNNVRIMAVDDDPDILTYFHDITQMYGITCETAISGEKALELIDKKGGYHIYFIDWKMPVMDGIKLTREIKKRNPEDSVVIMVSSVEWSTISEEAKAAGVDKFLSKPLFPSAIEETINECLGVDKQKIEKTQEEGIDGIFEGRRILLVEDVEINREIVMALFEPTKLEIDCAENGVEAVRIFTETPDKYELIFMDIQMPEMDGYEATRRIRALEAERNKNASARNGTSFTESETRSYNRNLRKQIPIIAMTANVFKEDIEKCLAAGMDGHIGKPLDFDEAINILRSYLGVEKR

SEQ ID NO: 89148 - protein, 775 aa, Unknown
  Obtained from environmental sample
  DOMAIN (66)...(146): Cache domain
  misc_feature (1)..(775): Xaa is any amino acid
VDITNYLLSKDNDTFSSNGPFGYIENPPKDSFFINGIGWKMPDNFLPKERPWYIAAIKNPKNIAETIPYIDYVTGDIVFSYSRCIYNDDGSFLGVVAIDIKADRIGQKIVKNAIEKNDSYGVLVGQDLTIIGHTNPAYVGKKMSDPEVPLSVLVEELVREGKLSEVEWINWKGEPVIGFFRTLPNGWRLGLFPLKNIYYQPLYNMLMIMTLLGIVLASVLIIVLIRVDEAKNKSDAESRHKSMFLANMSHEIRTPMNAIIGMTTIGKSESSIERKDYCFIKIENASNHLLGVINDILDMSKIEANKFELSESEFNFEKMLRRVVNVISFRIDEKHQKFSVHIDHSIPSAFIGDEQRIAQVITNLLGNAIKFTPEKGSIALMVRLSGMGFDICTLQISVSDTGIGISPEQQAKLFKSFEQAESSTTRKFGGTGLGLAISKNIVELMGGSIWIESELGKGSTFSFTIQLKRSTNDKQRLLSSDINSKNLRILVVDDDEDVISYFIEIAQDLSLMCNTATSGEEALKLIEKKGGYDIYFIDWKMPGMDGIQLAREIKTHITKNSIVTMISAAEWGDIAEEAKEAGVNKFLSKPLFPSTIAEMINECLGVENQQAKKSQVVENTGIFAGHRILLVEDVEINREIVLSLLESTKLEIDCAENGKEAVRMFSETPDKYELIFMDLQMPEMDGYEAARRIRDLEAEHNKKILEDIGENSAENNNNDANNGNLRKQIPIIAMTANVFREDIEKCLAAGMNSHVGKPLDLEDVMGILHKYLDVL

SEQ ID NO: 89149 - protein, 89 aa, Unknown
  Obtained from environmental sample
  misc_feature (1)..(89): Xaa is any amino acid
MIRVEIIANHSVEENILEALKKEDAGKYYTKYPGIFGIGSAGSRMGDAVWPEENFALVIWCEEEEANAIKRAVDSVKEKFPGEGIKLFR

SEQ ID NO: 89150 - protein, 361 aa, Unknown
  Obtained from environmental sample
  DOMAIN (186)...(355): NAD-dependent glycerol-3-phosphate dehydrogenase C-terminus
  misc_feature (1)..(361): Xaa is any amino acid
MAAQTAVIGAGAWGTAVAKVIAEKGKDVVIWSFEEDTCDDINNRHKNSRYLPGVELPENLRASTNLVETASGRDFLILAVPSLYLLQTAKQILEASSIREGITAIAVLTKGFLSTDKGPRLILETLEDYLPGFYRQSLVYIAGPSHAEEVSRGKITGLIAASENAKNSFRFRDLLKSKGLFVFSSLDVRGVQVAAAAKNVIAIAFGMLDAFKTMEGNSSGASEYTNLFGDGTESMLLAAGLNEIQSLGMAMGSTHPETFTSISGIGDLDVTCRSVFGRNRRFGKDIIEKKILEPFKDLDDLLARINELGYLPEGVAAAKYVKVLAEKYKLRMPIAAGMYNILNREIEPADFLENFLNDLGR

SEQ ID NO: 89151 - protein, 88 aa, Unknown
  Obtained from environmental sample
  misc_feature (1)..(88): Xaa is any amino acid
IVISKEKPATKREDINLFQGDVDEPIYSGFQTKFYVKVNDSTLIRVIKQHAKYSDEGPDIVWKDQVYLSWSANDGYVVGDGYTAEAEP

SEQ ID NO: 89152 - protein, 210 aa, Unknown
  Obtained from environmental sample
  misc_feature (1)..(210): Xaa is any amino acid
LKRNILLFAALAALGMTGISCAKNRLNIYNWSYYTPPSVIEKFEKEYGIRVIVDEYASNEEMYTKLKTGGTGYDLVFPSQDYVSIMIQQDMFEKIDRSLIPNLRNIDPLVLRKTDYDPNMDYSVPYYWGAAGVLVNTGKVPNFERSWSIFGRSDLRGRMTMLDDMREVMGDALVYLGYSVNSKNPAEIEAAKNLINNQVETKLDKIRCRG

SEQ ID NO: 89153 - protein, 72 aa, Unknown
  Obtained from environmental sample
  misc_feature (1)..(72): Xaa is any amino acid
MIDIPDVIIIGAGPAGLVSGTVLNEGKRHYLILEKGNDLTVRNANNPKDVVTGIGGGGLFSDGKISFPPSAS

SEQ ID NO: 89154 - protein, 117 aa, Unknown
  Obtained from environmental sample
  misc_feature (1)..(117): Xaa is any amino acid
MTREFVMLPEFDRQWQKMGLGDDELRQLQGTLLQNPKAGDVIRGTKGLRKIRIAFEGQGKRGSGRVAYVDFTVYETVYLITAYPKNEKDNLSKAERNAIAMMIAKLEQGLKDQENIK

SEQ ID NO: 89155 - protein, 409 aa, Unknown
  Obtained from environmental sample
  DOMAIN (270)...(348): Toprim domain
  misc_feature (1)..(409): Xaa is any amino acid
VPYISKSSIQEVADRLDANAVVSDYLHLEKRGGRLWACCPFHKEKTASFTVNPDLKTYYCFGCHKGGTMISFIMEMDKLSFPEAVEVLAKKAGVELVYEDSATGNFSAEEEEKKKKKEELFELYRRISGTFHHFLLKNPEASPALDYIISRGINNEMIESFGLGYSPADRYWLDKFLTEKGYSKEFLSASGLFSSRDMRSTIFSGRIIFPIKDQQGRNVAFGGRFLPGLVPEREGWQPPKYINSPESVIYKKGETLYALDLALPEIRRTKTVYIAEGYMDVIALHQAGITNALAPLGTAFTDEQAKLLKRWAEKIIFFFDSDEAGQAAANKGIFTCRKNGFSCAIVSPEAAIAKDPADILLNFGPEALRNAVNSTIGDLDFLLARARALYGSSGWKGRPKAPRTSFPTL

SEQ ID NO: 89156 - protein, 272 aa, Unknown
  Obtained from environmental sample
  misc_feature (1)..(272): Xaa is any amino acid
MHEPPLLNQHRRNGGGKDIWGVNYVPTYETGNALLPEPNNFILKDIRQWRDVIKAPSLEGIGWEMMVKKNLEETKIDRKQTALALNLHFGYFEHLMSFMGFTEGLIAMSEEPDEVMELFTYICDFYMEVVKNVIDLYNPDVLTMMDDTAAWNASFISPKMYREMVYPFHDRYAKIGRDRGLKITMHNCGKCEEIVGCMVEMGVNLWDPAQTCNDLAAIKSKYGNKLVIAGGWDGRDRLLEPDVTDDEIVASAEETFKKYAPGGGFAWCGGFL

SEQ ID NO: 89157 - protein, 613 aa, Unknown
  Obtained from environmental sample
  DOMAIN (2)...(198): Glutamine amidotransferases class-II
  misc_feature (1)..(613): Xaa is any amino acid
MCGIFGYVGSKDAVSIIVDGLKKLEYRGYDSAGIAVYGKNGLGVVKQKGRLTALEARLAEQPLAGLPLAGSMGIGHTRWATHGEPSDINSHPHVGSENKIAVVHNGIIENYRHLKERLEHRGVNFASQTDSEVIAQLAEHYYTGDLLETVIHVSNALEGSYALGVICADDPDILIAIKKDNPLIIGVSDKGSFIASDVPAVLKHTNKVYYLNDKEIAVLRKNSVEFFNIDKEPIEKTAETITWNLDSAEKGGYPHFMLKEIMEQPKVLRETVNSALNNYKTIIDKLDVSKFTKIIITACGSAYNAGVTGKYVFERLCRFPSVETELASEFRYRDAVINDKTLVILISQSGETADTIAAMREAKSKGAVTLSIVNVVGSTIAKEADYCMFTAAGPEIAVATTKAFSAQLVLLYVLAVWFAVKLGKISKEEEQKLMTEINALPQKTEQILKQIDSIQMYASTAVVYKSIFFIGRNIDYAISLEGSLKLKEISYIHSEAYAGGELKHGTISLIEEDTLVVALSNCGSLYGKIMSNVEQVISRGAKVLLIGSCPADNLKADKNFEDKLFTIDLPKCSDLFSPSLSVIVLQLFAYYVAANKGLDIDKPRNLAKSVTVE

SEQ ID NO: 89158 - protein, 349 aa, Unknown
  Obtained from environmental sample
  misc_feature (1)..(349): Xaa is any amino acid
MIYVLCDGVGSGIYANISAITCANRILELIKGGMSIRMTCEMVAASMHRARKEDIPFAAFSAALISYDGKYTIYSYESPNPILMKNNHATVLNPRFYTTGFEVIGESTGVLNLGDSLIMFSDGVSQAGLGHGHGMGIGSDGVCSYINLNFKPNDIISNLPYRIVEMCKKVSGGHCEDDTTLAMLNCREAKELTLLTGPPSKRTMNHDYALNFKNMPGKKVICGSTTTDIIAEELGLKVETISMGKSFGQLPEYHIEGIDLVSEGAITLNQVNNILDEPVELLSDNSVAERLCFMLHTADIVNLMIGNASNSAHDDLIFKQSGIKIRKHVIRRIAEKLKNMGKLVIEQHY

SEQ ID NO: 89159 - protein, 110 aa, Unknown
  Obtained from environmental sample
  DOMAIN (61)...(94): Tetratricopeptide repeat
  misc_feature (1)..(110): Xaa is any amino acid
MANFACSCYKEAIDDFSNSLDLDKQSYKSAYYRGVVYSVMKQYEKAIDDYTLSLTINPYQSFCLFRRGQAYYHVGDYPQALADCENSLALEPNNKSVLKFKELLLGKLKM

SEQ ID NO: 89160 - protein, 144 aa, Unknown
  Obtained from environmental sample
  misc_feature (1)..(144): Xaa is any amino acid
MNLGLLGAGLVLGIAAVGSGLGIGVAAQAAIGAWKKCYLTNKPAPMTLLVFIGAPLTQVFYAYIMMGSIKSAADNMEYSLLNFGFSIASALAIAFSAIFQGKAGACAADALAESGKGFAQYVSAIGVIETVALFTMVLTMQSLL

SEQ ID NO: 89161 - protein, 241 aa, Unknown
  Obtained from environmental sample
  misc_feature (1)..(241): Xaa is any amino acid
VQNYIDDRDVYCTLGAKIYKTTYEDCLEYATSEQLTAMGVTDCAGHALGCKKCPHEETCEIKAGRVKRRKSAKTVLLSLMYGKGVKSLAEDLKTSTEEAEGIIRSFYEAIPGFHDFNEQCKTLAHKNGYVQTMLGHRRWLPDIHLPQNQYLFKNMKTKRQYASYSGNSNWSFNPSLATLYQTKQKCTKERLEEFLDSSNDKIKVYSTNALVAACYRRVLNTMIQGSAAEQTKVSMLALWAD

SEQ ID NO: 89162 - protein, 271 aa, Unknown
  Obtained from environmental sample
  misc_feature (1)..(271): Xaa is any amino acid
GRFTKNDLDAVSPAVSTSITLSTLHGCPKEEIEKIAAYLITQKALHTYIKCNPTLLGYETARRLLDEMGYGYIVFDDHHFRNDLQFNDAVDMLKRLQERARERKLGFGVKITNTFPMEIKRKELPGNEMYMSGRALFPLSINVAKKLSQAFNGELPISYSGGADYFNLKEILETGIRPVTVATTILKPGGYERLLQLSELAAETVSVISVAAPINVNALSFFAESLPKLARYRKTYRRTGSRKPLPPTPHSPLPIPLFGCAKAPCMDGGCP

SEQ ID NO: 89163 - protein, 208 aa, Unknown
  Obtained from environmental sample
  DOMAIN (5)...(156): Ketopantoate reductase PanE/ApbA
  misc_feature (1)..(208): Xaa is any amino acid
MIKRVCIIGGGNLGMALAVEISRNTEAEIRLLTSKYAIFNQTITSVDTTKNTSTSAKLFCITDDYAMALADVDLIFVTVPAFLVQNVIKNMKITKQITIILAPGTGGREFHFKNFSDQGHIVAGLDRVPFVARVLEPGKTVAASKKNSIRFSAIKKTDNSFIEKLLTQYLNIQSLSISNYLNITFTPSNQILHTTRLYAMLSGKTIND

SEQ ID NO: 89164 - protein, 352 aa, Unknown
  Obtained from environmental sample
  DOMAIN (171)...(308): HD domain
  misc_feature (1)..(352): Xaa is any amino acid
MGNEKKIIILVDDNPANLRIGKNVLTEKYAVATSPSAEKMFSLLESNKPAMILLDVDMPEVNGYEAIRILKSKPETKDIPVIFLTARAESDDELAGLSLGAIDYITKPFQPPLLLKRIEVHLLVEAQQKELQYFNENLQKMVEEKTQNVIELQNALLKTIAELVECRDDITGGHIERTQRGIDILLEGIERSGVYMEETKGWNKDLLLQSCQLHDVGKISISDSILKKPGKLTEEEFNEMKKHAAFGEQIIEKIEALTKESDFLDYAKIFAASHHEKWDGTGYPRGLKDSKIPLLGRIMAIADVYDALTSARPYKEAFSHEEAVRIITESSGTQFDPALVDIFILVAEQFKN

SEQ ID NO: 89165 - protein, 1054 aa, Unknown
  Obtained from environmental sample
  DOMAIN (914)...(1001): Hpt domain
  misc_feature (1)..(1054): Xaa is any amino acid
MKKPKTSLRKMVWGEHKISLRFRFINIALFLLTSLIMAVVLLSVLQNITKQVSVDYARYFAANAAGTFGAHLSKEIALVSKTVSSHEIIEWFLDENNYQKKLMAYDEMMGTINQLASNNLYIAIQKTLNEFTLAKNSDIDDIRAVGNLDPDYYDDAWYFECIASNFEYVLNVDIDKVFHRKLVWLNYKVTHNGVPIGVFCAGLNFADVVEELFSHYDGSKIRSLIIDADGVIQMDSSLLNTDFLKYDDEIRIEEEFKDPKLIEAVNTWLEGITGYFEIGDEPAIVELSSGLNRRGLSSNDKYRYATIAPIGSTNWSVVTLFDSSSLFSLSKLIPLFILMGVLFIAFAFVTSIMSYRFLYKPAVELARSKDDFLAKMSHEIRTPMNAITGMAELALRENVPDAAQEHIITIKQAGANLLSIINDILDFSKIESGKLEIIPVKYMLSSLINDTVNIIRMRFKEKPLRFFTNIDGTIPNDLYGDEPRLRQIILNLLTNAVKYSEKGHIGLIITINKRNDKRVWLKIVVTDTGKGIKPEDQKKLFGEFVQVDTRKNKGIEGTGLGLAITKRLCLAMGGDISVKSEYGKGSEFTVIVPQNIESQEPFADVEEPWRKKVLVYEGRSVYANAVCWSLENMKVPYTMVKNKEDFAAALYREEWSYVFSGYGLYENIKPLMEKSDSFFCGGKKPPMALMVEWGTEAYIPGVRFLSIPVQSLAIANILNGREDIKGYNKSSGTVRFTFPRARILVVDDIATNLKVAEGLLAPYHTTVDTSLTGLQSLEMVKRNEYDIVFMDHMMPGMDGIETTSAIRAWEKEQLENKQSNLRRQIPIIALTANAVVGMRELFIENNFNDFISKPIDISKLDEILNHWIHEEKKLKISKNDSPYSIPNSPLLNISGVDVKKGIAMTGGTLAAYKQVLTLFCKDAKDRLPLLQKTPEADTMLTFITNVHALKSASASLGAGDISVAAAELEAAGKVSDMAYIRENLPGFAVKIETLVNNILDALEPDKPEYHDIPNSTSPAPHSMLPLFKKLSEALKTKNAAEIDRIQEELNKKQL

SEQ ID NO: 89166 - protein, 73 aa, Unknown
  Obtained from environmental sample
  misc_feature (1)..(73): Xaa is any amino acid
AHSRIGELQRLAGSIKEHLRGILNAIKLKANNAAAEARNSCIQRVKYMACGYRDKKRFNQEILFQFGGLDLAL

SEQ ID NO: 89167 - protein, 225 aa, Unknown
  Obtained from environmental sample
  misc_feature (1)..(225): Xaa is any amino acid
MEEKMELPNSDAVSGQTQGGLRSKQEKHTARRLADVCILGLIVLLAGSCEKKQKLYIYNWTYYTPDSVIEKFEKEYNVMVIYDEFASNEDMYAKLKSGGSGYDIVFPSADYTSIMIQQNMLEKIDKSLIPNLVNIDPVVIKNAKYDSNMEYSVPYYFGAAGVCVNTDKVPKYERSWSIFAREDLRGRMTMLDDMREVMGDALAFYGYSVNTTDKAQITRARDLIN

SEQ ID NO: 89168 - protein, 295 aa, Unknown
  Obtained from environmental sample
  DOMAIN (66)...(283): Binding-protein-dependent transport system inner membrane component
  misc_feature (1)..(295): Xaa is any amino acid
LNLKAKNYGPLYSAPMAVWFTIFFLAPIIIIVLYSLLKKGLYGGVEKELSLEAYRYLSDPVFLSITLRTIITSVIATIITILIALPCGYCIARSKHQTVFLVLIIIPFWTNFLIRVFAWMNILGSNGFLNEFLLHIGVISDFINFLYNQKTVILVLVYMYLPYAILPLFSTIDKFDFSLLEAARDLGANQLVSIIKILIPNIRSGIFTAILFTFIPIFGAYAVPLLVGGMDSYMLGNVIADQLSKSRNWPRAAAISMVLTLVTTLGVLIMMHIQKRDASRITEAKGSEGKLGSAE

SEQ ID NO: 89169 - protein, 381 aa, Unknown
  Obtained from environmental sample
  DOMAIN (104)...(296): Transposase IS66 family
  misc_feature (1)..(381): Xaa is any amino acid
EIRDIKSAHQIEIAGLKAENESLRKENAALRTENQKLKAIINKDSSNSSKPPSSDGLKKIFNSREKTGRKPGGQMGHPGRVPVLFENPAHIIDHRRERCCCGGTVAYGEEYQAKQIVELVIRAEVTEHRSYTGVCEHCNATAQNDMPLQDIITYGETVKAFAAMLSSEGLVSINRIQAMLYEITGGAIELSEGTIVKWNKELSGKLAPFIEKMKEKLLAQPVLRKDETGIRVANKLQWLHVLSNEAYTLYFSHKKRGNEADKEIGILPMYSGVLVHDHLKGLYSFPCEHAECNVHILRYLKSAAETNKCVWASSMIALLVDANNTVKDHKAKNIPALDSALLAEYRARYDKILEQGRLEFFQCGRKDYNSEDMKLLRRLEE

SEQ ID NO: 89170 - protein, 77 aa, Unknown
  Obtained from environmental sample
  misc_feature (1)..(77): Xaa is any amino acid
LFGKTAKEWREKNPNEKGNIRDYASIDELICLSNMENINAVLINDGIPQKERLLRLNKIAIQQMTILAEVQGRKLLK

SEQ ID NO: 89171 - protein, 277 aa, Unknown
  Obtained from environmental sample
  DOMAIN (19)...(246): Glycosyl hydrolases family 11
  misc_feature (1)..(277): Xaa is any amino acid
LSGGTTWNGTKGATVINGSGDDAIGVEAWTEAGGDKTKLTWYGANQGGGSAFRAEWTNSTDYLGRVGYQWGTNGKKWNNLGDLCVDYNYTRSGSGTGGSYSYIGIYGWTIGSSNSAEFYIVEDWFGNGQQAANNLGNNCQTHNNITVDGRTYQVVTCIRPQGSGCVSCNNQAFGQVFSIRQGMAQNTAANKCGTISIKKHFEEWTKMTTEKGGQSPAKYIYDKTYESKFLVEAAGGTGWFEASWMKFSRTGACGGTGGGTSSAAVVSSSSRAASSSS

SEQ ID NO: 89172 - protein, 360 aa, Unknown
  Obtained from environmental sample
  DOMAIN (307)...(360): Elongation factor Tu C-terminal domain
  misc_feature (1)..(360): Xaa is any amino acid
MSKEKFDRGGKPHVNVGTIGHVDHGKTTLTAAITRVMATKGLSKYVAYDEVAKASESQGRRDDTKILTIATSHVEYSTEKRHYAHVDCPGHADYVKNMITGAAQMDGAVLVVSAPDSVMPQTKEHIILARQVGVPNMIVFLNKIDQVDDPELLLLVEEEVRDVLKHNGFPGDKIPIIKGSAFKAMSEPDNAESTKCIDELLEAMDSYFPDPVRDSDKPFIMPIEDVFTIQGRGTVVTGKVERGVLKLNEEVEIVGIKPTKKTVITGIEMFNKLLDEAQAGDNVGTLLRGIDKKEVERGQVLAKPGSITPHKTFKGQIYCLSQEEGGRHSPFFTGYRPQFYFRTTDITGTVKLPEGKEMVM

SEQ ID NO: 89173 - protein, 215 aa, Unknown
  Obtained from environmental sample
  DOMAIN (62)...(106): Bacterial regulatory helix-turn-helix proteins, AraC family
  misc_feature (1)..(215): Xaa is any amino acid
MLKPYDLLQNILLDIENGVKNNINVSFLCKKYDFSEGHLRRLFKFVFKQPISAYIRSRILTASLNDILETNTNILDIALEYGFEYEQSYIRTFKREFGITPGDLRKTEKIIKIKPPLHLFDERRLDNGILFGPDFVMVPRFHVIGKRHHLSFKDLPTEPLLTKHFWENERKQIKETVNPHACINLSCNLNLEEGHFDYVPSLQVENLKNIPSGLS

SEQ ID NO: 89174 - protein, 92 aa, Unknown
  Obtained from environmental sample
  DOMAIN (1)...(57): Domain of unknown function (DUF814)
  misc_feature (1)..(92): Xaa is any amino acid
MHARDYHGSYVFVKQRSGKTVPLDIMLDAGNLAVFYSKGRNNAEGDLFYTQVKYLRRVKDGPKGLVIPTQEKNLHVKLDEERLRDMEDCRVF

SEQ ID NO: 89175 - protein, 136 aa, Unknown
  Obtained from environmental sample
  DOMAIN (2)...(123): Phage integrase family
  misc_feature (1)..(136): Xaa is any amino acid
WTAKVKGKGNKERITPFGEEAAEKLTEYLRDVRPKLAGKTNKTQALFIGKNGKRLSRKGIWKNYAKSAALAGVSSHLHTLRHSFATALLKGGADLRTVQELLGHADLSTTQIYTHVDVGTLRENHRRYLPRLTTSE

SEQ ID NO: 89176 - protein, 78 aa, Unknown
  Obtained from environmental sample
  misc_feature (1)..(78): Xaa is any amino acid
MKVLVDTNVVLDVLLKRTQFYQDSFKIFQLVDQERIYGCLSASSITDIFYLLRKDRHNPTEVYQIMDELTALFLVVPV

SEQ ID NO: 89177 - protein, 512 aa, Unknown
  Obtained from environmental sample
  DOMAIN (303)...(421): Response regulator receiver domain
  misc_feature (1)..(512): Xaa is any amino acid
ALSPLKQKDVVVGMMGIARDITQRKSMEEEIRAASQAKSAFLANMSHEIRTPLNAVIGLTDLLLEDDQLTDYVAANLLKISNAGGTLLSIVNDILDFSKIESGKLELIPVEYYIPSLLNDVITLVVMSIGEKPITFRLNIGDDLPDTLYGDDLRVKQIFTNLLSNAVKYTRQGSIELSVSCTREGNTVWVDVTIKDTGIGIREDDIKKLFSDYFQADAKANRNIEGTGLGLSITKRLVEMMGGTISAESEYGKGTTFRLRFRQGFVNEKPIGADVSRRLREFCYTDNKRIVNKRLVRSNLSYARVLVVDDMQTNLDVAVGFLRYYKMEIDCLDNGQAAVDRIRDGIPVYSAIFMDHMMPGMDGIEAAEAIREIGTDYARKIPIIALTANAIHGTEEMFYEHGFQAFISKPIDIMEMDSVIRKWVRDDSHGNLAIRDTPESGGSSVTDVPSDSTVIDIPGVNTKKGLSQCAGMMNLYLPLLRSYTVNTPGILDKLRTVSVETLSNYVITVHGL

SEQ ID NO: 89178 - protein, 443 aa, Unknown
  Obtained from environmental sample
  DOMAIN (11)...(45): Putative Fe-S cluster
  misc_feature (1)..(443): Xaa is any amino acid
MALKGLDIFKLTPKTNCKDCGCLTCMAFSMKAAQNGIEISKCPHLSADALKVLGEATEPPMKMITIGAGDCAHKLGGETVLYRHEKSFVSKPLYCVNVNAENIDAKLDSIKKVDYERISERMYIEAINVEYTGDAGAFLEAVRKALAAKRTLILDVKDAGAAQGALEIAKDSKPLLNAANESNYREMNELAVKYGVTLGVSGGNLDSLHDTVAALEAAGNKNLVIDVGAVSPRVAFANAVQIRRAALKDGDRTFGYPSLVNTAKIAPNNHEMQTALASLFTVKYGSIIIMDGINYAQALPLFGLRQNIYTDPQRPMRIEPGVYPLNKADENSVCATTVDFALTYFIVSGELERSGVPVNLLISDAGGYSVLTAWAAGKFSASSIARFIKENSIEGKIKNRNLLIPGKVAVLKGELEENLPGWKIIVAPNDAVSLVKFMKELRV

SEQ ID NO: 89179 - protein, 107 aa, Unknown
  Obtained from environmental sample
  misc_feature (1)..(107): Xaa is any amino acid
MVNAILHVAENGCKWRSLPESYGNWHTVYVRMNRWSKAGVLRRLFEALQIEGVIQIKMESVCLDSTTVKVHPDGTGAFKKTGGRASGGRAECSPQRFMWSPRLTARL

SEQ ID NO: 89180 - protein, 246 aa, Unknown
  Obtained from environmental sample
  misc_feature (1)..(246): Xaa is any amino acid
MKEAIGDESVFLRIHEFKNGLIQFTDSTNAMRLVREYGRDIRYNAAWKKWLVWNGKFWELDEGNVLIHEKGLEMVHNIYDELLKTADYRERIEIEKAAMLSESVRRRKAFVEAATWISDLRVKTEELDANQWLLNVKNGTIDMTTGKFREHRQEDMITKIANVEYNPKANCPKWKKFVREIMDYKGEIIRFVQTASGWSLSGDISEQIMFILYGTGANGKSTFLNTIMYLLGDYAMATPTETFMKK

SEQ ID NO: 89181 - protein, 106 aa, Unknown
  Obtained from environmental sample
  misc_feature (1)..(106): Xaa is any amino acid
MKYLGLCAIVKDEDPFLEEWVCHHALLGVEAFVIYDNASAHPVRERLRAFMNGSFLTVVDIRGKNRQIDAYNHCLRTFGRNFRWLGFLDLDEYAVPKRTKDLRVLL

SEQ ID NO: 89182 - protein, 238 aa, Unknown
  Obtained from environmental sample
  DOMAIN (55)...(232): Ribose 5-phosphate isomerase A (phosphoriboisomerase A)
  misc_feature (1)..(238): Xaa is any amino acid
MEQDSNRSMKEAAGKAAVDALVKSGMKLGLGTGSTAIHAVRRVGELLANGTLRDISAFATSFQTEIECEKLGIPFYSLNSKELASGLDLTIDGADEVDPQNRVIKGGGGAMLIEKLAAYSSALFAVIVDESKIVQSIGTVFPIPVEVVPSARVQAARVLEKLGASVFLREALRKAGPVITEHGNLILDIRFSSPVDPVFMETEINKTPGVAENGLFTQNIPVVYIARSNGTIETRGVK

SEQ ID NO: 89183 - protein, 397 aa, Unknown
  Obtained from environmental sample
  misc_feature (1)..(397): Xaa is any amino acid
VSIQDMKQNLENYKEADRQAKGAIAKIGVLKKICAKAAEWRNYDGLILKQEYLKLSIERENEKQKKDNAVRQLAETQNKLDFTNREIAALNQKRLDSEQELRALDQSLAANNAHRLYEEIRARIERIQHDLANKKEQAEKYRDLKSQCEALLNRVLTEDFDGEEAALAEEVKKYQNERYIAERKKDEAANNLRDIRSELADLERGILRYPDAPRELRAALEKAGIEAFFLAEAAEITAPEWVDAIEGWLNTRRFAVLVDPVHFQKAIEVYDRLPRSVAGAFIPNIEKMRDAVARQGSLAEIVKAEGYARIYINYTLGKVMRSDLANLKTYDSAVTKECMTYTNHTASRIREDIYRRHYLGRAALEERKKFLTADAARVEAEFVSAEREEREARGRED

SEQ ID NO: 89184 - protein, 448 aa, Unknown
  Obtained from environmental sample
  misc_feature (1)..(448): Xaa is any amino acid
WKWQNAFQKLPDGAQKATLAMDVFGKSGASMVSMLKGGSGELQKMTNEGKAFAGNTEAVAEAMEKLKDASVRAKADIMGMIAVLADTAPFKTFIGYLDELGKKLGEKAQHEKTMRELDKQNALADLKLLQIQESRLRYGKLEEGEKLKHIVTTQKQIDALQEKLKLDNDELTLMKAKTNVAMLERTKNRNDKEERDLNVYKDEIKAINDKREAVAKAAAEEAKAIADYENKQKALAEAEKAKEAARQKSIQMYEAETKRLNDWLVSYEKSKRTESEIAEDNYNQELENFKKLNERKILIGEAYDTKLIAAREDYRTKLKEIGDKESEERIKKSEETQNKEWDLRRIAAKNYSTIADIELEQIEAKYAKEIELAKKANTDIALIEKAKEAELSAAREKFIENERQQQDLLRSLRETAAQTEEERTLIQMERINAKYDAELEKYKDNEEM

SEQ ID NO: 89185 - protein, 452 aa, Unknown
  Obtained from environmental sample
  DOMAIN (6)...(273): Amidohydrolase family
  misc_feature (1)..(452): Xaa is any amino acid
DAGGEFLAPGFIDAHIHFESSMLAFSEFARAVLPRGTTAVASDLMEIAIVSGPEGIKEIFREAEGLPLTLLHTVPSFMGEETDMQTIGAALGPQLVEELLKKPQAVGLAEVMVEPILAKSKESEALLALAGGLGKTAEGHAPELYGAALNAYSGAGVRSDHESTNRAEALEKARHGIRVQMREGSAAADLLPCLDIITKDHIDPRYCSMVSDDIDMLHIFEKGHLDHKVRMAVANGVDPVVAIQMITINPAESLKVDGIRGSISPGKTADIVMLSSLEQCTVESVIAKGKIVVDQRKTVFSKPSFRYAACMLNTVHLSKPLAAADMVIPASGASKAKVHLIGAKGTTLLTDRLEAELPVLNGVIAADTKRDILHIACVERYGKNGGIGRSFITGFGLKSGAIATSVGHDHHNITVVGSDANDMALAVNRIAALNGGLVLAEGGKVIYELPLP

SEQ ID NO: 89186 - protein, 134 aa, Unknown
  Obtained from environmental sample
  misc_feature (1)..(134): Xaa is any amino acid
MNLIVLDTNVIVSALWNRNGKPAILLRMFFENEIVLFYDEEIFKEYNRVLRRDKFKFLEPEINDLLHFIETNGIPISNTEKSIEFMIDESDRKFYDVAKKCKAFLITGNKKHFPNESFVLSPTDFLNLYLKQVT

SEQ ID NO: 89187 - protein, 80 aa, Unknown
  Obtained from environmental sample
  misc_feature (1)..(80): Xaa is any amino acid
MKLGNLGKQIVIKSKKAFGLLLFENAEQVDGNIYFSKRKERDDKARNDYLKKERLDKIDSDELFLVDILRRQVKQNDIKF

SEQ ID NO: 89188 - protein, 76 aa, Unknown
  Obtained from environmental sample
  DOMAIN (6)...(74): ATP synthase subunit C
  misc_feature (1)..(76): Xaa is any amino acid
MDLSVLIAVGAGIAVFTGLGAGIGIGIATSGFLQAISRQPEAAGKMTPMFFVGVALAESTAIYGLVISILLITKLG

SEQ ID NO: 89189 - protein, 297 aa, Unknown
  Obtained from environmental sample
  DOMAIN (2)...(294): ATP synthase
  misc_feature (1)..(297): Xaa is any amino acid
MASLRDVRLRMRAIEQTLKVTKAMNLISTAKLRKGRKMLADTVPYFSRIQKSMYDILSSEKYIGSAFFRKPDPSKPSYTAIIVITSYKGLAGGYNANIYRNVKELCANIKNPLLILIGGNVGYRYFVHSPYTILENFSFHPEIPTVEHAADVSEYVVSQYLSGVFDSIHIVYTHMFSMVRLVPTVHQIIPLVKEKIQNDLFEIGGEKRVDLKFEFLPSMGAVFDALVPQYIKGVIYGAMVESHASEQSARMKAMDEASKSAEDMLVSLRISYNRARQAGITQEMSEITGGSTALADK

SEQ ID NO: 89190 - protein, 473 aa, Unknown
  Obtained from environmental sample
  DOMAIN (317)...(473): Glycosyl hydrolase family 3 C terminal domain
  misc_feature (1)..(473): Xaa is any amino acid
SHQSAAVERLGIPEYNWWNECLHGVARAGVATIFPQAIALAATFDDNLVEQVMEAVSDEARAKNNEAIKQGNRGQYWGLTFWTPNINIFRDPRWGRGQETYGEDPCLTARMGTAVVRGLQGDDPENLKLAACAKHYAVHSGPEKDRHTFNAIVSKKDLWETYLPAFKALVDAGVESVMGAYNRTLDEACCASNLLLKDILRGRWGFKGHVVSDCWAIRDFHQYHKITNAPEESAALALNAGCDLNCGCTYPMLTVACKKGLVSEEAIDAALTRLLRTRFKLGMFDPPNSGKYGKLGRKVINCEKHKQLALKAAEKSIVLLKNDNKLLPLDSGPKVITVAGPAAANAHALFGNYYGVSPRFVTILEGLADKVKDAFGIDLNYRQGCLMYGDISKSNVVYGEANVSDIVIAVMGLDGAIEGEEGDAIASDSNGDRMAIELPPWQVKFLKAIRAAGKKIVLVLTGGSPIAFPEDLA

SEQ ID NO: 89191 - protein, 688 aa, Unknown
  Obtained from environmental sample
  misc_feature (1)..(688): Xaa is any amino acid
DRPIRPNGYWYEYGGLFSAWLQQTYGMEKYSQLWKEMGKDSSLSFFVYKSDFYRIFKKVYGVEFTDEWKKFSAGFALDVIENNEDELSSRKYRYFAEREYFIAGLTARGDNLYFIESSESKIGVYNTLTGKTKTINAASSLYDIDVSADRKTMLLSGYKYVEDRAFALVTEHKTDNGRKTGRDYKGLYKARYFRDGVIGLRSELHNNCIVYENFNGESEILFRGNEALMFSGPQAVDNDRIAFIASIEGKRELWLYNYASRELFKIENTEDDNNYQEYMRDLGVSEGKLFFSYNSDDRMYKLGIIDLEAMQAVLSGMEFSGGVFSPVCAGEEVYYLATFVSRNSLLRFPEPANSVSGNRINLRLTKQESEDKKTDSAPLYEGPSKPYIGLRYINPLKFWFPLPLIRQKGEDEDSSVRLDGGGIITVMADPTDRNLVYLLAFADVPYKMAMIDQFVWQNTSLGFPLSINFSDKVTESGEKINRHTGASLSGSINFIGDQWNNKFMLGGGYARNARYEEGKSAYEWEETKSGFFIQTGFVFSYRRLSLKFTGVSLTDSFEPHMDMIFQASTKTRFPLSFTFFGAYDKGGMDLHGASNTFSSSSVEEFAMEEYSHPSGLNLFWLGGANIAVGLFSFEIQKNLSHLYFNRISGSLSVRNKIYDAAGNPNAPGIEVNKFHLVQSLGLKLVMKT

SEQ ID NO: 89192 - protein, 226 aa, Unknown
  Obtained from environmental sample
  DOMAIN (14)...(217): Ribosomal protein L1p/L10e family
  misc_feature (1)..(226): Xaa is any amino acid
MKHGKKYKESAKKYNPANTYELTEALKLVKSMAYAKFDETVDLSVKLNLKKSQTVRDTVVLPHQFRGEKKVLVFCKPEKEKEAQEAGATFVGADDLIQKVKDGWTDFDVAVATPDMMKDVGKLGMVLGRKGLMPNPKTGTVTFDLKGTLAELRKGRVEFRADKTGVLHLAVGKISMEPSQVAENVTTVMAEVKRKRPIDVKGEFIQSVSVASTMGPGVWVAIKDQD

SEQ ID NO: 89193 - protein, 72 aa, Unknown
  Obtained from environmental sample
  misc_feature (1)..(72): Xaa is any amino acid
VEFRADKSGVLHLAVGKVSMEPSQVAENITAVMTEVKRKRPVDVKGEFIQTVSVSSTMGPGVWVAMKDQDKE

SEQ ID NO: 89194 - protein, 202 aa, Unknown
  Obtained from environmental sample
  misc_feature (1)..(202): Xaa is any amino acid
MAQDILSKQVPFGQVALLVLFSLPSVIALSAPFASLVGLLMTVGRLSSDNEILVLLSSGLSFRNVFIPAISVGIVISILSFIANDILLPGGYIKFAQLYRRILSSIPAVEIEPNSVKKFKNTEIITGNVTGNAIDNVLILDKTSDGERRVIMAANAELKDSGKSGLSLDLGRAFVLSSKEIAREDYDYASAGNLSYWVPQED

SEQ ID NO: 89195 - protein, 249 aa, Unknown
  Obtained from environmental sample
  DOMAIN (1)...(249): Iron only hydrogenase large subunit, C-terminal domain
  misc_feature (1)..(249): Xaa is any amino acid
MLLANGRKIIVSLAPSFVSEFTDWKPEELIAALKKLGFAAVSETALGADFLSARIAQDLASYAANRSDGDKPPLMISSACPVIIEYIKLYKPNLTPYISPHASPLLTHARFLRSRYAAQTDGKIAVVFIGPCIAKKHEADIYSEEIDAAITFAELREWLQKERVTPQTISFSLASQADKALEQRRNNKTIFFPWLHKERPASQTILFSLSSAYHTDNVFEPRRSAKGAFFPIEGGEITAFSAYITEKDP

SEQ ID NO: 89196 - protein, 763 aa, Unknown
  Obtained from environmental sample
  DOMAIN (225)...(502): N-6 DNA Methylase
  misc_feature (1)..(763): Xaa is any amino acid
DAGTLLVTDNGVNGYNLGKYGYLFAQYLINSLKKELNEELEKTEAWLDGNNPDQKQSSDIGLKSLQQEIEQQRKERNSVLSTVSKSTLTELEKITDKKELNNWLESAENALRTAKNSSLKEIKRQYDYDGGVSIGDNILKLFDIPDRVSPQDIKQILIYNAQHIVDAINNKINSLNYPTELIDNSQTKQTTQFSPFGAWTDFNSRLSLQERERLNNEAVSVLEKAREGTISDIEKNILRRYSGFGGISASDERGVLYDYYTSPPVAHLVWQLLEKSGQVKDGANILEPSCGTGVFFEYAPIAFKTLSFTGVELDERTAKVSQLLHDSKNIKIHNSSFEAFNLSDKAGSFDHIIGNAPFGERSAALSALDMPEEKSLDNYFVSRSIDNLKDNGTMALIVAPGVLENKTNEEFRLSLNKKAQFIGAVKLPNRSFHHTHTQVMPDILLFRKYPTDIQERLSALDDETFKTLPLYDNDFVSGVYFEKHPEHIAGTLSEGTGQWGNDEIKGDITPESLEQILSSFKPADIISEDIFRQTRDNFEISDTTEKKEKLFLSDEELKQIENKTLTRGAIKVSENNIYILSKYNQWDFVSQDTNLTNKLTEVKAISHNVHIIQDAMKAGHKNEVFNYLQKECITQLLNYQEKYGNLPADDADLKRFTRNNPAVKGIYETFLKPDDPLLTQENVYRKEVEILDGHNTAVSALLLLRERMKEATEENIRASFPDTAETLIKEMRAHKDVFITTDNIYQLREDFISGDAWKKIDEL

SEQ ID NO: 89197 - protein, 268 aa, Unknown
  Obtained from environmental sample
  DOMAIN (25)...(219): Type III restriction enzyme, res subunit
  misc_feature (1)..(268): Xaa is any amino acid
KTHIIAPVKTYSVNIAGWKDKSKDGKDIKPHQWQSIHHLYRNQCGISALGTGFGKTVTGIALMSLLRQEGKAHRIFLQVPNNKIKDWIEEIHAVMPSLKIASIDPEEPGYSSRDKRYAKYQAMARSDADIILMPESSASEIQLSAENDSRITEKVSFLYKLEKADGSKRQQAMAELKGEYKAASGKKNVTVCFEDFGCDAVFVDEAHRYKNLFTSTLSRETGMNDGRQSAKAMSLYKKCDYIREKNNGKNTYLLTATPLTNSPLNIQH

SEQ ID NO: 89198 - protein, 302 aa, Unknown
  Obtained from environmental sample
  DOMAIN (12)...(302): Lyase
  misc_feature (1)..(302): Xaa is any amino acid
MKDNSRQVLWAGRLEEKPEAEAFAFQASIAVDKRMVQEDIAGSRVHAAMLAKQGIIPGDTAQALDRELERIVGEISSGALIIDQNAEDIHSFIEGVLTERLGDAGRMVHAGRSRNDQVALDLRLYLKKTILDLRAELAETIATLLDKAEAHAETVVPGYTHLQRAQPVTLGYHLVAWCCALDRDRGRLADALERLDECPLGSGALAGSTLPLDRAATAEALGFKRPTLNAMDSVADRDLVLETAAAISIIMVHLSRFCEDIVIWASEEFRFIDLAESYSTGSSIMPQKKNPDFAELIRGKSG

SEQ ID NO: 89199 - protein, 270 aa, Unknown
  Obtained from environmental sample
  DOMAIN (104)...(226): HD domain
  misc_feature (1)..(270): Xaa is any amino acid
LEAALIAAADSVDVAYQLQNVPAANLEALRGKISANAGLYSTKAAAGILLDVMDAGMLEKLRDGNISSTMDKSLPRWEVDLCDPSVIKIAGFISHIIDFKSMFTRKHTSQIANRAWLMAGYYGYSKEDKAALFLASSLHDIGKIAVPVEVLEKNGPLNDDEFQIIKSHVRLTHDWLCNIPGFEIIKNWASNHHEKINGLGYSFGKPGEELDFNSRLIACIDIYQAVSEERPYHSARSHEETMPVLYGMAAKNLIDKKIVKDIDDIMAKYP

SEQ ID NO: 89200 - protein, 70 aa, Unknown
  Obtained from environmental sample
  DOMAIN (9)...(65): YcfA-like protein
  misc_feature (1)..(70): Xaa is any amino acid
MNQWRSIKANRLLAALIKIGWSVKRQAGSHKTLERSGYPDYVFAFHDGEEIGPKMLARVAKHTGLTSNDC

SEQ ID NO: 89201 - protein, 75 aa, Unknown
  Obtained from environmental sample
  misc_feature (1)..(75): Xaa is any amino acid
MNFDIEFEQEEDGRWIAEIPEIPGVLAYGVTPLQAGAKAKALALRVLAERMENEVSIPGINSIAFANHYEPMAIN

SEQ ID NO: 89202 - protein, 258 aa, Unknown
  Obtained from environmental sample
  misc_feature (1)..(258): Xaa is any amino acid
MMFSPLTPLEINTDYTITLSADAHDTKGLSMDEPFNRHFSTRPDNTRPFLISSYPEMYSEITDARAEINLEFSVPVPLKTLYENVSFSPSMTGIWRLENDGRLAIFTPAEPWTQKTRYEIRFSASLTDNNGMNIGNDFLCVFTTKIDLEIPYIVNVMRTTNKNEIIILSADRGYSSAAESPVENQDWEKDDKLTLVFSKPVDSISVKNNTSVENGPNLLMETPAGYETEYTFRFESIPAYESRFTLKIKPGIKDITGN

SEQ ID NO: 89203 - protein, 342 aa, Unknown
  Obtained from environmental sample
  DOMAIN (7)...(153): Mur ligase middle domain
  misc_feature (1)..(342): Xaa is any amino acid
LSNQVPHGLSPRTNRLGDVEFDAAVLTNVTHEHLEFHGSWEQYRDDKANLFRALDKGYAKTGIEGVEKIPQPFGVINADDNSASYFAGVTRQKTLSFSVNGNDADLTVRATESGACDNWYYVHISAENTAIDIRDRLPGAFNAGNVLAALLTVSGLTGVPARKIASLCPRLLPVRGRMTAINKGQPFEVLVDYAHTPSSFQAVFPPLRKRLDLSGGRIISLFGSAGERDTQKRAEQGKIAAAYSDYIVLTDEDPRGEVPMDILDEIARGIYAEKSGLFKQGENLFLIPDRPAAIRKVLSLARSGDIALLLGKGHENTIIYKDHVMPFDEIAEAEKALGELKG

SEQ ID NO: 89204 - protein, 86 aa, Unknown
  Obtained from environmental sample
  DOMAIN (6)...(85): Plasmid encoded toxin Txe
  misc_feature (1)..(86): Xaa is any amino acid
MNDLIFTPVAFKEYLEWLAEDKKTFKKINDLIKDIQRNGLTTGIGKPEPLKHIKGYSRHIDHANRLVYSGDEMHNLHILSCKGHYI

SEQ ID NO: 89205 - protein, 302 aa, Unknown
  Obtained from environmental sample
  DOMAIN (8)...(302): Nitrogenase component 1 type Oxidoreductase
  misc_feature (1)..(302): Xaa is any amino acid
MSHYVERPRFFCSLGGALSTLEALPETIPILHCAVGCAGSIAWAQNGGSALQVGGYCGGLSVPSSNVCEQDIVFGGTDRLQEQIESTIELMEGRLYVVITGCVTEIIGDDIRSVTSEFSDRVDIVAANTGGFKGNSYLGYDIVLSEIVKRYVKKGADKKKKSVNILGIVPYMDCFWRGNLIGVRRLLEKIGVQVNTFFTDEDTLDGVKNSSSAELNIVLSDVYGLETAKTYEETHNIPYITATLPVGPTASAELLRTVAKVLKLDVDVEAIIEAESRRYYKYITPLVDIYNDCDLQKNSVMS

SEQ ID NO: 89206 - protein, 448 aa, Unknown
  Obtained from environmental sample
  DOMAIN (212)...(447): Binding-protein-dependent transport system inner membrane component
  misc_feature (1)..(448): Xaa is any amino acid
MLRKSLTHWRWLAAGLVMAVLFTVYPILYTVYLSYTNMSGGHLLTKAQVVRRLSEQMYSPEDGGSWDLSVYRKGNDFMLLLHKDGIYSTIKPEGALEKREFAVPPEKIDNYDKMSQAEIMQNLQALGKLDFGKPPLVVKIISLREASVQLPLYAYNSAEDTFTDNRDNEIYRSVLGTYTSQSGKTLAPGYFTGIGWRNYTRFLSNSGYLKPIFGILVWNIAFSLFSVLISFGLGMMIALIFEDLKYRRLIRTLLIVPYPIPVLVSIMVWKGLLNENMGLVTTVISNIFGSSPKFFTDLNWTRFALILINVYLSYPYFYVLTSGALKAIPKDLFEAASIDGARPFTVVRKIVLPLVMRILSPLVIASFCFNFNNFTLVWGFNAGGPPMADTAVPMGYSDLLISFIYRLGFSSSNAADYGFSAAITVMLFILVALMVFFQTMNTKTIKES

SEQ ID NO: 89207 - protein, 229 aa, Unknown
  Obtained from environmental sample
  DOMAIN (22)...(229): Beta-galactosidase
  misc_feature (1)..(229): Xaa is any amino acid
MKKAMRHPPIAVKFPCFLHGGDYNPEQWLKWKDTVWKEDMRLAKLAGVNTLSVGIFAWAALEPSEGEYRFDWLDEIMDMMAENGMAAVLATPSGARPAWMAQKYPEVLRVNAYRQKNLYGERHNHCMSSPVYREKTAAINTRLAERYKEHPALAVWHISNEYSGECHCPLCQENFRTYLKKRFGGLDALNEAWWSSFWSHTYTDWSQVESPGPLGDSNVHGLNLEWRRF

SEQ ID NO: 89208 - protein, 374 aa, Unknown
  Obtained from environmental sample
  DOMAIN (81)...(261): Radical SAM superfamily
  misc_feature (1)..(374): Xaa is any amino acid
KTSTRFDIETEISPVDLRCHRLRLCADSKRNLLLLRRFAQGGVPDQGSAQGGDQVPDTAAIERIIAEKPEILRTLPAFYPVQVYGGCPQACVFCPWSKTGNITERRDYMEAERFDTLLERIAAFSGDAVIDLSLWGELSLHPQKMELIEMVLRRPELDLIIETSGIGWKDDEIHKCAALAQTAGGRASPSGKNKFRLSWIVSLDTADPARYREIRGSGFAEANEFAKKLLSLFPKDAYVQAVRTAGAEDDIEKFYRSWKEITPNTSNIIIQKYDDFCGFMPRKQASDLSPVQRQPCWHLMRDMPVLIDGAVPLCREQIAVGNGGVGLGNAFSESLDVIWERGQRFYTEQAGQMPGGKKYDSLCAGCDEYYTYNF

SEQ ID NO: 89209 - protein, 428 aa, Unknown
  Obtained from environmental sample
  misc_feature (1)..(428): Xaa is any amino acid
MNKTTVYTLKALALLLIAAGLALGGDVDTVLAGAGKSLNPALSPKSADAINANNNAAVVKAYVIPVVGTVDHGMAAFVGRCLREASKEAGVVVVLNIDTYGGQVDAAFNIVDSISACKAPTVAFVRSKALSAGALIALSADKMAMRPNTTIGDVAPLINTNEGPKMLGEKHQSPIRAKFRAMAERNGYPAVLTEAMVTEEIAVFEVTLTDTAFYADSAAAERVILRPLITDTVFYVDSAKLAALDPGVKSKIASSKKVVRAGELLTMTDAEALRYGFSAMTAGSVDEMLQRMGYKNAKVASARKNWSEGFVSVIAMLAPVLMMIGFSCIYIEMRSPGFGIPGIIGICCLAVVFFGQYAVGLANYTELLLLALGAALLALEVLIIPGFGFAGIAGIALLIIGMVLSFQSFVIPNPEFPWQAAVLKRNIV

SEQ ID NO: 89210 - protein, 92 aa, Unknown
  Obtained from environmental sample
  misc_feature (1)..(92): Xaa is any amino acid
MSLSEKVAKLKEEDFKQIIGVKRATFYEMADVLRQAYASKHKNRGRHSKLSIEEQLFMSLKYWRQYVTQKELAFEFCVRRSNRSRHHSNNAK

SEQ ID NO: 89211 - protein, 401 aa, Unknown
  Obtained from environmental sample
  DOMAIN (297)...(364): Elongation factor Tu domain 2
  misc_feature (1)..(401): Xaa is any amino acid
EKQPLFEHLLFGGGVIPKAETVESGKTTSDSSPEEIERKISIYAAMGHVDRNGTKINFFDTPGSSDFTGNVILSFRASEFALLMVDGRSGVQIETIKLWRSLEAQKKPRGVFISKLDNDQTDFNKALADVKEKFKMEPVPVIIPMGLGGAFKGVIDVLHDKAYLAGGDGVEKECPIPDEFKDAVAGAREKLIEAAAEGDDTLMEQYIEKGSLSPEEMKTGLIKALVDNKYIPAFAGSALKNSGLLPLMDFIADVGPNPRSAKDAVLGGDGKAQEVSIDPDKPLSALVIKTTYDQFSGKLSWVKIISGKLAADTEAINVSENKKERIGKLYTCQGKKLEEIRELSAGDVGIITKSATLKTNDTLAAADAGFTFVPLQLPEPVHSVAVAALAKKDDDKLGEFL

SEQ ID NO: 89212 - protein, 409 aa, Unknown
  Obtained from environmental sample
  DOMAIN (17)...(409): ArgJ family
  misc_feature (1)..(409): Xaa is any amino acid
MSNIKKISGGVCAPKGFVAGGVHCGIRAKSKKLDLALLYSEKPCTAAAVFTTNKVKAACVLVSQEHVSGGVLHAIIANSGNANACTGEGGLAAARKMASLASGLFGISPKEVAVASTGVIGVPLPIEPIESSMEILRSSLKGGEEGHSTALEAIMTTDIRRKDGAVEIEIGGKSVKIGGMIKGSGMIHPNMATMLCFLTTDVSISRELLEASLRRAVERSFNRVTVDGDTSTNDMALIMANGASGLTVTADSVEYQAFSLALEQVCVTLAKAMARDGEGATKLVTVTVNGATDEKAAEALAKAVASSSLVKTACFGADANWGRILCAMGYSGAEFDPDKASVSFKSKAGEIAVCSNGGPLPFSEDNAKAILSEEEIEITINAGEGSGSASAWGCDLTYDYVKINGDYRS

SEQ ID NO: 89213 - protein, 89 aa, Unknown
  Obtained from environmental sample
  misc_feature (1)..(89): Xaa is any amino acid
MANLFDYISWRGDLEFDQFPFNPVDNIVFSQLSYLPMDGIVPGPQNHNSITVEELAAKYAAMQQEIPSEVTRDITVIDAISVINAMDRA

SEQ ID NO: 89214 - protein, 244 aa, Unknown
  Obtained from environmental sample
  DOMAIN (5)...(155): SpoU rRNA Methylase family
  misc_feature (1)..(244): Xaa is any amino acid
MDLSDIVIILCRPSEPGNVGAVCRVMKNMGLSRLRMVAPESFDEATLLARTVHAEDVWRNAGFFDTLADAAADCSLVVGTTRRRGRRRKSISMEPRALTEWLKKQERAPVGFVFGNERTGLEEDELNFCNVASHVPVSDSFPSLNLSHAVQIYAYELFLAFGQIEENPVKGEWVPLEYPAVMQLTESITSTLAELGFYKRPGREEQTRFLRDLICRAGLTEREGRYLKDIFSKAARLGIIRNEE

SEQ ID NO: 89215 - protein, 97 aa, Unknown
  Obtained from environmental sample
  DOMAIN (1)...(74): DNA methylase
  misc_feature (1)..(97): Xaa is any amino acid
IGEERLKGEDGKKAHSTQKPEELLKRVILSTTKQGDVVLDPFFGTGTTGAVAKKLKRNYIGIEKEPEYIKLAENRIANIKDFFEEAEWEEKSMSNEQ

SEQ ID NO: 89216 - protein, 162 aa, Unknown
  Obtained from environmental sample
  misc_feature (1)..(162): Xaa is any amino acid
MAALNSAGFRDALPGEFTFRAFINGKLDLTKAESVMELVSAKTDISRRRAVSRLSGSLQTEIEEIKKSLVQVLSGAEIYLDYSEDEVGADINEDEGKLPYLNIALEALERLKKLSSSWRMERIYQEGVTVVIAGRPNAGKSSLFNARVERRPFYRYGNSRHY

SEQ ID NO: 89217 - protein, 538 aa, Unknown
  Obtained from environmental sample
  DOMAIN (3)...(401): Peptidase C10 family
  misc_feature (1)..(538): Xaa is any amino acid
MGKALRLVSAAVCAAFLAAPFAVRAERVDPETARGLARRVAEFSRGKASAADVRLKHVEAGRRGAPAVGALGRAGAGAEDTLFYVFDFGVDGGFAIIAADDAVKPVLGYSFDGSCDTRGLPPNAAAWLESLRRQIVWARERGAERSEYVRREWESYLGAAAAKPLSAGVSALLRTQWDQYEPYNLLCPMADGVRAAAGCAITAWAQLMKFHNHPARGVGRSVAYATYTYKINIPSVNFEIDYRWADMRDTYPETEDETPQSIAVATLMYHLGVSVKTDYLPEGSIADGLADALTAHFGYDLGMRRVDRERFQRVYGKAAWEGLLKEQIDAGLPVLYGGSDPRAGHEFIVDGYDNSGKFHINWGWGGRYNGYYEIDAFVDISADMYDFSNIRYQYAYIDVKPDAGGVRKSYDANFTLAEVASSKTDVAPIERFTVNAIVTCDTAAYVAAARPMLVGAALSDGRDSIVAILGMVRADIYPWKSDAATAVSCAVPAAVRAGEYKLKIAVSEYDYHSGTKEYVPRGWEIVSRGASGVSNSVA

SEQ ID NO: 89218 - protein, 234 aa, Unknown
  Obtained from environmental sample
  DOMAIN (56)...(207): Cyclophilin type peptidyl-prolyl cis-trans isomerase/CLD
  misc_feature (1)..(234): Xaa is any amino acid
MRSFEKKIFVVRQIFAGLCILLMSACTGQKASGGNSSGEPSPKQASADSALGEGLFARITTSRGDIVVRLEYQKVPMTVCNFVALAEGKMTAAGGKPFYDGLVFHRVIKDFMIQGGDPLGNGSGGPGYRFPDEFDSSLKHDGPGVLSMANAGAGTNGSQFFITHVETPWLDGKHSVFGRVVKGQDVVDAIQQGDKIEKVTIIRNGEAAANFRADQTVFDALVRNSESAAAAKAK

SEQ ID NO: 89219 - protein, 330 aa, Unknown
  Obtained from environmental sample
  DOMAIN (111)...(327): DNA methylase
  misc_feature (1)..(330): Xaa is any amino acid
MSSNVSKQKRKDLTDKIKAIHKYIASAKPDENTHNFLVWLSEIEKEINTKKFGLVFEEHREAIDDTLETHTPVLTENKKLFINNGTQINFMIEGDNLSALKLLLKTHKGKVDLIYIDPPYNTGNKTWKYNNDYVNKDDSFRHSKWLSFMKYRLLIANKLLKETGIFVCAIDDYEFSELKLLTDEIFSEQNRLGTVVVIHNPGGRQDEKFFPTAHEYMLIYGKNILKSNVNTLSLSEEKIAQYTNKDKFGKYKLRGFRRSGANSRRQDRPNLYYPIYYNNKTGELTIEKKQNFIKLLPIDADNTERCWRWNSKTFMDKKAKYIEVKEKNGN

SEQ ID NO: 89220 - protein, 334 aa, Unknown
  Obtained from environmental sample
  DOMAIN (2)...(133): tRNA synthetase class II core domain (G, H, P, S and T)
  misc_feature (1)..(334): Xaa is any amino acid
VQTHIGPAEDTASVIYLRPETAQGIYINYKNIIQSNRMKIPFGIAQIGKAFRNEIVTKNFIFRTCEFEQMEMQFFVKPGSDDKWFNEWRKRRWAYYEKLGVKMDHLRWHQHGPDELAHYAKDAYDIEYLFPMGWRELEGVHNRTNYDLNRHTQFSGKDMQYIDQDNNNERYIPYIIETSAGLTRNVLMILCDAYDEEYVPSEKKSGSSEGTASGTVGSADDWRTVLRFHPSLAPVTVAVLPLMKKDGLAELAQDIRRDLKEDFATDYDQSGAIGRRYRRQDEAGTPFCVTVDYQSKDDGTVTLRFRDSMEQVRVPKSELSTRLRQEIKEYKRVK

SEQ ID NO: 89221 - protein, 812 aa, Unknown
  Obtained from environmental sample
  DOMAIN (583)...(702): Response regulator receiver domain
  misc_feature (1)..(812): Xaa is any amino acid
VSIRLKTIFILIATVVVITVSTLGISLFVSQYRFNETVQTTLQFMSRIASGLLTSEIGRLKEEVKFTAEQIRKYDLSILENQMEQDSPYLTLSVLTREGVILHAGDPDARPLSGGRENAYIQRAFGGETIFSTTTYTPSGKLITRILTPIDDDHILVATLPGLYLSNFLSPYKVWETGNIFVIDHEGVAVAVNQYDYRVQERHNYIDWGKRDRAYQKMGAVFQYIIENKEGIKQYPYNGSERYCAFDTVYGTDNWSVLISAPFSESPLTHIRQMLFICAAIIMALGVITALLAANSISAPYEKMTELRSTAEAASASKTRFLANMSHEMRTPLNAIIGLSELELGSAKLQGESFTNVEKIYTAGMTLLGIINDLLDISKIESGKLLMIPVIYDVPSMINDTVNLNVVRIGSKPVQFRLHVDKSMPSKLKGDELRIKQVFNNLLSNAFKYTDSGFVDWHISAVRHGSQIKVISTIRDTGIGIHKDDQEKLFKDYYQANLKANYYLEGTGLGLSITKNLIKLMNGTIKFESEYRKGSSFTVEFYQDAVNDDVIGEEAAEHLSRFRFSAQRRSRNQRLLRADMSYATVLIVDDVVSNLDVARGMLKPYKIGVECVTSGKEAINRVLDGKVHYDAIFMDHMMPGMDGIQTTRIIREEISNEYAKTVPIIALTANALLGNDSLFLENGFQAYLSKPIDIIRLDQILNQWVRDKKKEKELKPQEADSENSIKTRQIKKYVIPGVNTTEALERFDDDDEVYFQVLKSFITYNPKQIETLRTAGEDHDAYRLAAHSLKGSSRNIGAEDLGNQAERLEKSA

SEQ ID NO: 89222 - protein, 288 aa, Unknown
  Obtained from environmental sample
  misc_feature (1)..(288): Xaa is any amino acid
DHNNNIPWPLLSGNGLKTVYAKYRDNLGNEITVTDDIILDTNSPDPKPIPGADTSNYGILINNGAAYTNDANTHLQLSAVSTVSPVIEMQISNDPGFGIGTSTGWISYNVTHSPWPITAVDGAQTTVYAIFRNAAGNVSITVNASIIFSSTLPVPIGAGVTINNGADYTSTLNVSLNIGALNAVSFIISNDKNFTPGVGTTATLNYSDYTSGGVLGIPFDYEPWFLAPGGNGVRTVYVRFINQLGHYIDRSDTIIFRGSGGKGSGDKIYSYPNPRRPSRGDEGKIGFG

SEQ ID NO: 89223 - protein, 272 aa, Unknown
  Obtained from environmental sample
  misc_feature (1)..(272): Xaa is any amino acid
MNDKTKGAANAAYDEMMGMAGKIDGIYQAASGKLAELEAINSRGQKLAALNKFSKFRGSPVNYERFGNEYLLLIDEDGIPRVFAPAGRGTWSPISSPECLYEKITSVDGGGADSMAGFVLTERGGRRKHYDGNGLLTGVTELNGDYIEIVRSANGKAAKIRGPHGNEWTVEYNGEFISAINGPEKTKVQYGYSGDNLVSVQDKEEDTGKYNYNQERLSEIVKPDGSAIRLEYGYNGSGGVQLVTSTTHEEGASERFDYNPSQKMTTYTNHSG

SEQ ID NO: 89224 - protein, 294 aa, Unknown
  Obtained from environmental sample
  misc_feature (1)..(294): Xaa is any amino acid
MFQRVWGDANDVRQDNQGNEIRPAQVEKPRWETAFFRDSLGYSTEPYEFYLGAGNNTIRLEGINEPAAIRSLCLKAPVPAQDYREYAQGIDTRTYRNTDTDFMLKVQGEHALYRSDPSLYAIYDRSSGATDPPSVAKIKLNMIGGQSWRVAGQWIEWDFLVPESGMYRFTVKGRQNYNRGFVSNRMVMIDGQVPCMELAAVPFTYSNKWKLATFRDDQGDMLFPLEQGRHTFRMQAAMGGMGEMLSVMEESIFRLNGIYRKILVLTGTEPDIYRDYRVDVVYPEIITAMARKAK

SEQ ID NO: 89225 - protein, 475 aa, Unknown
  Obtained from environmental sample
  misc_feature (1)..(475): Xaa is any amino acid
MINIDNNPPNVVITSPYSGQYVGTNMSIIGRVADNIELKSLSFMVINVINPNDRLVVEVEELHPTIFETVNLENFKAGEYIVRVISKDLADNETIVSRKVFYDPNDIDAQIGIYSPLPGEEHTGPVYVAGLVKGTSLPETVMLKLDGEEFQELPVDRYGVFRYDLSEEEMKTKGPHKIIAYYKTEKGRTISSANHTVYYSHFGPILLIDSHRDGDVITNRPWLRGRAMFIWPPHPDGREYTRAEISQYAVKKVEVSYDNGRTFKQAIGKGDWKWRLEPLDLPLGTQPVVVRAVFENGEEAVRRVLLFMDPEPPKVETVSPAEKSRQREEINVYGAASDNFDLTDVDIRLRPGHKFWYSVPEAIRGLYFDVKTLGATYFDVGVGLDFFDHNVRIQGQWGIAPPLGSDLQDIDIVSSGRYVGNVWGIKIIANVYTLPFDWLFKDRDWEFYKMKVAVGANFSWFEMDDWRNEGRPDND

SEQ ID NO: 89226 - protein, 741 aa, Unknown
  Obtained from environmental sample
  DOMAIN (561)...(644): Hpt domain
  misc_feature (1)..(741): Xaa is any amino acid
MIVIYALVFLLGRYTISAMNRFRLAGQTFDTALKTSPNLIVIVDDKARVEYISKTFVEVLGIEKQEYAIKLPFIDLFPTNELKLFFGELLHHKGRITEIFEMEIGGSRHHFMLHSEALRADGIARTFDCLEITPILEAQRAAEVASKSKSNFLATMSHEIRTPMNAIIGIAQIQLQRDDLPDEYATALRKIYGSANNQLGIINDLLDMSKIETGKMVLIPVEYDTPSLINDAVQLNVVRIGSKQIEFKIDIDENLPSKLYGDELRIKQILNNLLSNAIKYTGKGSVKLSIGYLTDNNGVMLRFVVEDTGQGMKLEDKDRLFSEYMRFNAQANRATEGTGLGLNITKKLVEMMDGTISVESEYGKGSVFTVTIRQKPVECTAIGASIVEQLSKFVFTGDRHTANLQIAAEPMPYGCVLVVDDVATNLYVADGLLSLYQLKIETADSGFAAIRRVENGYIYDIIFMDHMMPRMDGIETARKLRELGYKGTIVALTANALIGNDEMFMRKGFDGFISKPIDVRQLDEVLKKFVRDKHPKEAEKRAAETVNFKQVEPVNYAMNPKLLKFFCQDAKKAVVTLRKTVESGDANLFTITAHAMKSALANVGETEASGLAAALESVGRSGDMGYIAANIDEFIQTLESLIDKFGGTENVNAANNDSVDSVDAPEDKNYLIEQLRQIKSACDSYDDNAAYAALDRLKEKRWKRSTTESLEKIREALYVSSDFEGAGKLSVSLSDFLTVDN

SEQ ID NO: 89227 - protein, 241 aa, Unknown
  Obtained from environmental sample
  misc_feature (1)..(241): Xaa is any amino acid
MSAFGSYAGTETLDFTKLGGCGLYLITGETGSGKTTIFDAISFALFGEASGAGRDKYPMLRSDFADENAKSFVELDFASGSSVYSIRREIKKSSQDVHLVLPDGTSLGGARETKEKIAEIVGLDRDQFAQIVMIAQNDFLRFLQSGTDKRVEILRRIFNTVALKNFQESLKSHAKKLDNEMAVVRRDFERYGVDPYKREEQLAAWEAQIEADGGALVGYDKRIAEYMGKKTAVDKEIAVTG

SEQ ID NO: 89228 - protein, 403 aa, Unknown
  Obtained from environmental sample
  misc_feature (1)..(403): Xaa is any amino acid
MFGQSNLAYNLKGIAVRSKFVEKDLSAITNQSDRINFLESWAENPEWELDWGDWDKEKINTHSLTANLSASIMEKTQTFSMSAELPPRDEKLTWNTGINIWITSTNASWGMQRPEGQEEWRLDPFNFRESVNFGNFGSLSFNMAMDTEGWDSPETGKIEKRLNSITTSLNLTKWGVSAAFTASRMAGYEYIAGTGWRLRTGEENYILRPKDFSLSVSENIAMKDIFKKITNNPNNIDFSINIKSGLFINLQQYTSSNFTFSLGFTLGINKFLNLSIAAESGNSRIYQYFHDWPVFRDAPIELSSNTQTNLFLDLFDSFRFDNDDLRKRSGFKMKSFRITATHHLGDWNAILDWSMTPYRTTGSLRYEINNEVSFLIQWIPISEIKSDISYNKSKSPEWVVKGL

SEQ ID NO: 89229 - protein, 498 aa, Unknown
  Obtained from environmental sample
  misc_feature (1)..(498): Xaa is any amino acid
AGHSFYRTRNILTASGGVEYIKTEGDKIETFRGDSITVDIDNWSSVFLGGVSERSLQSDNTTYLFAGTVISRDEEDVTVLNRATISSANNPDSLWSLNASRVWLLPGSDFAILNAVLKVGELPVFYIPFFYYPADDLIFHPVIGSRTREGHFIQTTTYVLGRPRATSSSQSSLTKILGNSTDIERKREGIFLRSTGKKVKDPDKVSLKVMLDHYINLGTYIGADLTLPAYKILGATNISVGIGLTRTIGLQNGTYTPFFPDYDGETDWNHSNLFSFDVPFRYRFKTANSISGKYGSFSWSIPYYSDPFVDGDFLKRSEEMDWINMIQQGAASMEAQDTSESRQSHEPWTFNGQLNPKFPNMTPYINSISIGTISSTITFREVNLRYNYSTNDIRYYSPSSFFFAPDTATLYQVNATISGAPLSLGGNKASRSSPSVDATEIGDPLKDIGVPRSPFEAKAEEKNINKDTTDKLVPPALTQRFDLPRVGNNSFNIDYRLA

SEQ ID NO: 89230 - protein, 217 aa, Unknown
  Obtained from environmental sample
  misc_feature (1)..(217): Xaa is any amino acid
GIAKFDEARQLTRQVRLIFPVNQEAGILDLRIEQFLDPAAFNASFEQRMRNAIAGTKRRSIESFADLQNLAEINPRYPNLRAIITQAEIDMGYRPPPPNPANIARSRELTDSARRIFESNATTQYEVALTQLNEAITLNPQNTEATQVRDRLLSRMSVPGGIVLSSEDEADYQRALRELNLGNSLVALSLVERLMQNPKNRNITKLVELQRRIQSVL

SEQ ID NO: 89231 - protein, 273 aa, Unknown
  Obtained from environmental sample
  misc_feature (1)..(273): Xaa is any amino acid
MFAVFTLSAQEFFWEEAETFSPRPGKFPISAYSNDFSVIAWQEVTLNSDASVTSSGFINIFLAVKEQGKDWAQRGTVGGPYIYLGTEPSIISMVIDNKGRILIAAASGNAQAEILISENRGFSFSKYIVNLGAENSVAPRLYVRADGGYLLFITRGSGQSLSICYSRSDNGINWSSFEFFTQENALSLNFLPVHGSIGRKDIVFYQSLAVGTESISTYQLYYKTSEDGGKTWTEARRFTAFNDPVVQGQTNADSFDNQRPHLSKYGDNLLLVW

SEQ ID NO: 89232 - protein, 374 aa, Unknown
  Obtained from environmental sample
  DOMAIN (4)...(374): Cys/Met metabolism PLP-dependent enzyme
  misc_feature (1)..(374): Xaa is any amino acid
MDISTICVHGCEKKFDTTGSVAVPIFASATFAHPGVGKSTGFDYSRSLNPTTVHLEDTVSALEGGCQAIAFSSGMAAVSALMELFSPGDHIIASDDLYGGTVRLFTHISEKNGVKVSYATAENIEKGITPSTKAIFIETPSNPMMRVTDMAAVAAIAQKHKLLFIVDNTFLTPYFQKPFSHGADIVLHSGTKYLGGHNDTLSGLLVVKDSVLAEKLRFIVKTTGACLSPFDSFLIIRGIKTLAVRMERQQETAMKIVHWLLEQTAVKKVYYPGLKGHHDYDISRRQTSGFGGMLSFSMWNGQTAEKVLESVKVIKYAESLGGVESLITYPMLQTHADLPESERNARGINECLLRLSVGLEAAEDLIADLKQAIV

SEQ ID NO: 89233 - protein, 268 aa, Unknown
  Obtained from environmental sample
  misc_feature (1)..(268): Xaa is any amino acid
MLKCFFEDTAPIGGKDTRALFRGLKIEDARERYLEHQGKYPVIFLSFKDVGKENIDRACMAFKGMISEEFRRHNYVKEKIGDSIDLKKFENLSSGDGELTLELSIPNIELKYIYKTKIQEWFKKRIAGKNLDALHNAVLSGDAETFQSELSALLSESISYMDNAESLYHGVMIGVFARLNGYRLKSNRENGDGRSDLVLYNANENGGKAVIFEFKLAPNAKTLAKACEDALKQIEDKNYAAYWDEEGYKNIVKYGIGFYKKRCEVRKG

SEQ ID NO: 89234 - protein, 362 aa, Unknown
  Obtained from environmental sample
  DOMAIN (148)...(351): Binding-protein-dependent transport system inner membrane component
  misc_feature (1)..(362): Xaa is any amino acid
MIFSRKKMSEALNEFSQNVKPISLYRDAWNRLKKNKMAMIGMVVVLIYFLISLLAPILPFYNYAEQEMKHIYMQPSFKPSGEVMVSTREAYFSKLMAREGRSEYTAVEKEELDNLRSEAETNPIHKKVYIFGTDVLGRDLLTRVIYGGRISIGIGLVGTLTAMLFGTFYGALAGFIGGKTDNIMMRIVDVIYSLPYLMLVIVMMALFGGKSIFILFIAIAMISWLDLARVVRGQIMSLKNSEFIEAARSAGAGTGRIIWKHLLPNIVGLIIVYSSLQLPTFIINEAFLSFLGLGVSAPMTSWGVLIDDGTKVMELYPWLLVIPAVTMSFFIFCMNFLGDGLRDAFDPQAKNRLSYGGETDGG

SEQ ID NO: 89235 - protein, 381 aa, Unknown
  Obtained from environmental sample
  misc_feature (1)..(381): Xaa is any amino acid
NRGPGRGQMPGQMPLKLYGKGDSDSTWNRLGKYPAGKNTILCARDVMSTIPTTFNHNFPSYTVVGGRERYNSTGLSVVLLNRGGRYARRSLFHDFEKTGFDSVVSVEPEPVHYDLDELSARFPFVRFVVPHSWISLGEQINLAVSELTSPLFFVLWNDLRMIAGGTAHRMAERLTRPVESNGNGKGKSQFMRLCTVPVIQNSRHDTIPTVIAPVIRQKKIQTRFLNPSSEGLPSLYPFDGVGIYDRERFIQLGGFDGTITNSFWQLMDFGFRAYLWGEEISLSQTLKFSYEAAIPAEDDSAGNDYSRFYLKNLAPVFRNDCAYLPMRRFPGFLFKANNGFLGAWDDFSESRKWVDTNSFRWRCNPKTIASYWNLETLNKEA

SEQ ID NO: 89236 - protein, 233 aa, Unknown
  Obtained from environmental sample
  DOMAIN (3)...(212): Cytidylyltransferase
  misc_feature (1)..(233): Xaa is any amino acid
VLAIVLQARVDSSRLPGKALLPLGGRPIVLRVMEALNKIPAELRILACPEDSKSAFAELAQEAGFSLFAGPKEDVLDRFCLCLRNFGIRHLIRATGDNPFVFADAAYAIITEGLTLGADYAGYSGLPLGAGVESVNAKALLLAGTEAVSQYDREHVCPYLYTHPEKFLLHRPLAPQAWQGSGIHLTVDTQQDYEQAQALYAALDRLENTGKLSEGDRYKGEVIISAYTNCSSL

SEQ ID NO: 89237 - protein, 383 aa, Unknown
  Obtained from environmental sample
  misc_feature (1)..(383): Xaa is any amino acid
MITDNNLSPLPILIIPACESGRGGGHLVRSMTLVRELRALGRDAWLYLSSSNADAVLDTAQFDRAWLLAESGLPEKSWQCIILDNFQTPAEELARWQKIAPVIGIDEGGKHRGCFDFLIDLLPNCDKMTPNIARPSLLPLPKNKPRPLARVETEPLKVLLSFGQEDSASLGPALAKTLANHQNIEITLLKGNLSKENLPCSRANFVGEFPVPCSLKQAIPNLNEHLTDYELIITHYGLTSFEALYAGVPVLLASPTGYHEKLAKKAGFWTLGIGSKRKEKKEERKKIGKRNAEKKLSALLKKNEAFFSYYRDLKNHCAELAIKFDLDHEPQQSLAEFVNSFRPDVSRICPVCGEELSGSVLARFPERSYLRCKGCGAISMNRI

SEQ ID NO: 89238 - protein, 253 aa, Unknown
  Obtained from environmental sample
  DOMAIN (3)...(212): Cytidylyltransferase
  misc_feature (1)..(253): Xaa is any amino acid
VLAIVLQARVDSSRLPGKALLPLGGKPMLLRVMEALNRTPAELRVLACPEDSESVFAEIAGEAGFTLFAGPKEDVLDRFCLILRRFGIRHVIRATGDNPFVFTNAAYTITTEALTLDADYAGYSGLPPGAGVEYISAKALLRAGTEADSQYDREHVCPYLYTHPEKFLLHRPLAPQHWQGPEIRLTVDTQQDYEQAQVLYAALDSMEKAGKLAEGERYKGEVIIRAYRELGNREQGTGTEDCYSQTNRVGNKQ

SEQ ID NO: 89239 - protein, 379 aa, Unknown
  Obtained from environmental sample
  misc_feature (1)..(379): Xaa is any amino acid
MPKILETRLPNRLKSSGKEGGDSTRNRRAKYPAEKNTILCAKGVMSTIPTTFNQDFPSYTVIGGRETFTSTGLSVVLLNRGGRYARRGLFHDLEKTGFDAVVSVEPEPAHYDLDELSTRFPFVRFVIPHTRINLGEQINLAVSELHSPLFFVLWNDLKMIAGGTAHRMAERLTRPAETNGNGKGKNNLMRLCTVPVIQNSRHDTIPTIIAPVIRQNKIQTRFLNPSSEGLPSLYPFDGVGIYDRERFIRLGGFDGTLKNSFWQLMDFGFRAYLWGEEISLNKTLKFSYEAAIPAEDNSTGNDYSRFYIKNLAPVFRNDCAYLPMRRFPGFLFKANNGIFGAWDDFSESRRWVSTNSFRWRCNPKTIASYWNLETPNKEN

SEQ ID NO: 89240 - protein, 528 aa, Unknown
  Obtained from environmental sample
  DOMAIN (236)...(417): Radical SAM superfamily
  misc_feature (1)..(528): Xaa is any amino acid
MNALLVLYGGSLSNEAEEVLFNGKNSLEMTIERSRQFPSVGKTVLLAAEGSSFPVYEGIEIDKRASWTVKDLLEALAAHSEGFDLTYFAWADCPFIDPELAKRLVDRHLRYAAEYSYADGWPYGVAPELLSPGTAVILSNILNDNDNGPVERDSLFAVIQKDINAFDIETEISTVDLRCHRLRLCADSKRNLLLLRRFVSALDTAGAAQVPDTAAIERVIAEKPEILRTLPVFYPVQVYGGCPQACAFCPWPQKGGAITERRDLMEAGSFDSLLEKIAAFSGDAVIDISLWGELSLHPQKMELIEMVLRRPELALIIETSGIGWKDDELDKCAALAKTAGGRASPSGKNKFRLSWIVSLDTVDPARYREIRGTGFAEANDLAKKLLGLFPKDAYVQAVRTAGAEDDIEKFYRSWKEITPNTSNIIIQKYDDFCGLLPRKQASDLSPVQRQPCWHIMRDMPVLIDGTVPLCREQIAGNAQNLGNAFTEPLEVIWERGRRFYTEQAGQIPGGKKYDSLCEGCDEYYTYNF

SEQ ID NO: 89241 - protein, 322 aa, Unknown
  Obtained from environmental sample
  DOMAIN (106)...(320): Cation transport protein
  misc_feature (1)..(322): Xaa is any amino acid
MVAAYRKNKGRIDVREGFAIVTFSWIAAALIGAIPFYVYFTAHGNAAPLNALTDAIFETMSGLTTMGSTVIADVESLPKSLIFWRILTHWIGGMGIVTLALAIFPAFGVVAYQMFRGEMTGPSKERLRPRLAQTAVILWGVYAFFTLVETILLMAGDMPFFDAVCHSFSTMATGGFSTRNASVASFDSAYIEWVIIAFMILGGTNFFIHYRIIFHNDWETLKSNREFRLYAAILVAASALCVIFLLLQGLHSSSWSQNNFKSQPLSLTEAAVKTAAEQDKISAPHDLIRRSIFHAVSIVTTTGFVVADWNMWPDFTRVMFFI

SEQ ID NO: 89242 - protein, 288 aa, Unknown
  Obtained from environmental sample
  DOMAIN (1)...(155): YicC-like family, N-terminal region
  misc_feature (1)..(288): Xaa is any amino acid
MTSMTGFAYREWANENISISVEIKGYNNRFLEILVNTPPWLPQLEQRVRGIISGLCGRGKVEVGIRVRETNTPMTVSVNVNAANAYMQAINSLKSSLDLDEKLNLSTLINMEGVLNIEKNRDDERYWNLIEPVLIEAGAVFQAERIREGMHTEEDILNSISKIESTLQTVTAHLPALESSIKENIKARFREVSAGEIDENRILAETAILLMKYTVSEELSRLSSHLGEFRAETTKNDRPGKKLDFLCQEINREINTIGSKSAILEVSRAVVEMKEALENVREQLRNIE

SEQ ID NO: 89243 - protein, 267 aa, Unknown
  Obtained from environmental sample
  DOMAIN (33)...(162): HhH-GPD superfamily base excision DNA repair protein
  misc_feature (1)..(267): Xaa is any amino acid
MEIAEFKKIVLSNYRQQGRKFPWHFADPWGVMVSEFMLQQTRTERVIPYWENWMKLWPQPKALADASMETALRAWSGLGYNRRCRYLKESAAIIANDNGNKVPETPQALLSLPGVGPYMSAAIACFAYNYPVVFIETNIRSAVIHCFFPGRSDVRDSEITPILEAALAHEEPRTWHYALMDYGAFLKSTMPNPSRRSAHYTRQSPFNGSFRQARGKVIKALVSLGQCGTEELKLASGLEEQKLYEVLEKLKKESFVAEDGGVYRIGS

SEQ ID NO: 89244 - protein, 207 aa, Unknown
  Obtained from environmental sample
  misc_feature (1)..(207): Xaa is any amino acid
AQEGANRENAYLLKSRRLAKLAEEAFAVGNYDLSARIANEAAWLAKQSDVHVAITAAKRYLDQAAASGVSARFPQEYKEAENWYKQSSKARDDEEWDIAIEAAGMTAQLLGGLVSSSSGTLSGALPATYTVQSWSVSKDCLWNIAGLAGVYGNPHLWTVLYNANKLKLPDPNNPDNLEPGIVLDIPSIKGEVRQGAWESGKAYEPIR

SEQ ID NO: 89245 - protein, 481 aa, Unknown
  Obtained from environmental sample
  DOMAIN (1)...(408): 4-alpha-glucanotransferase
  misc_feature (1)..(481): Xaa is any amino acid
DTGYQSSPYFSLTAFALHPLYLRIADLPEAEKFKDKAAAINKEFGQEIRFPYEKVLRAKMNLLREIYTENESAIEKKAGPKGSLGAWIKDNPWIKPFAVYRRLKEAHEEKSWKEWTDHRDVTPQDIEALWEDPKFRGDHLFWAWLQEALDSQFGAAAKAVAEAGIVLEGDLPILMNDDSCDAWAHKEIFNQELSAGAPPDMYSPEGQNWGFPLHNWAEQEKNNFAWWKQRLAVAGKYYQAYRIDHVLGFFRIWASSHRDYSASLGRYIPYTPITNSDLKKLGFDKGRIRWISIPHIPTSELLNAMRANQINEADIPAATKKIFSKALDQVGSEELWVFKKKIKGEKDIDALGLHPSARSYLFSAWRNRLFLEYAKGKFFPTWSYRDSRGYNSLSKEEKENLEQLLQKRMARSEKIWEAQGKKLLSVLVESSPMLPCAEDLGAVPNCVPKVLTKLKIFGLRVVRWHREWDKANQPYIPFEDY

SEQ ID NO: 89246 - protein, 36 aa, Unknown
  Obtained from environmental sample
  misc_feature (1)..(36): Xaa is any amino acid
KRKARKGRNPRTGKEIRIPAKKAVKFTPGKALKEAI

SEQ ID NO: 89247 - protein, 460 aa, Unknown
  Obtained from environmental sample
  DOMAIN (48)...(364): Glycosyl hydrolases family 43
  misc_feature (1)..(460): Xaa is any amino acid
MQALFEGLTLAPPLKAYGDVNPICLQRFGADPWGLVYKDRVYVYMTGDTFKLSSGSSLAPDFSNLQANDYLNINTIRVVSSSDLVNWTEHPEIKAASSQGAATRATNSWAPAAAYKNIDGKDYFFLYFADNASGIFVLRAESPLGPFINPRPDGSALINRSTPNCSNVTWMFDPAVLEDDDGKFYIYFGGGVPPGGNAAQFTSNDPLPGTERAVRLGDDMISIAGIPQNLNVPFIFEDSGINKIGNTYYYSYCSNFQVSNYLQRRQDFPAAVTIRKNGAITYMTSDSPLGPYTLRKMILPNPGEMFNTKGGNNHHAIFEFRGKYYILYHTRLLEMAMGVPETLPREGYRSTHIDEVTVLQDGTIEEIKGSRKGAAQSGRFDPYKLTSAATIGSQAGISTVAVPGEQRMKVTDIDSGDWIALYGVDFSGTPYYEDGVDLGYAEARTFRCRVTPPKSGSGHA

SEQ ID NO: 89248 - protein, 1329 aa, Unknown
  Obtained from environmental sample
  DOMAIN (1009)...(1087): OB-fold nucleic acid binding domain
  misc_feature (1)..(1329): Xaa is any amino acid
MTDFIHLHVHSDFSLQDAAVSVMRLADRAEELGMSHLALTDHGNMFGAMEFIAACGHKKRKNPVKPIVGCEVYVSPGSRFEKKGSENENRYYHLILLAYNRTGYFNLVKLCSYAYTEGFYYRPRIDEELLSKYHEGLIALSACASGEIPRLIQAGKTDEAEKKALYYRDLFGKDPGGNPNFYLEIQDHGIPAGGLKGSDLSQKDINKAVAAISKKTNIPLVATNDVHYLDKDDYIAHDILLCIGTGKVRTEEKRKKYYGDQFYFKTGDEMADIFAEYPDAVENTVKIARRCNTDVPIIETKELPQYLPEFKIPEGFKDPGEFLRHLTAEGLEKRYAKEKENDLNKWEEIKKRADYELDTIINMGYTGYFLIVWDFIKYAKENNIPVGPGRGSGAGSIVAYSLRITDIDPLKYGLIFERFLNPDRISMPDFDIDFANEGREEVINYVTRTYGKERVAQIITFGTLGAKAVIKDVARVLGISIPESEMITKLISFDPEMTLDKAKKEEPRLRELESDPRFTELFAIAHKLEGLNRHSSIHAAGIVIGKKPLIELVPLFQEREEKGGNIATQYSMNFLEDCGLVKMDFLGLKNLDILKHSQELIRRRGGKYSNFNMEDIPEDDKKTFKMLGEGKSHAVFQFASEGMQDILRQTKPASIEDLTALNAMYRPGPMQFIPRFVECKNGKAPITYPDPSLEGVLKETYGVIVYQEQVMEVAKIIAGYSMGKADLLRRAMGKKKKEILDGEKIPFLEGAAKQGYSAQRAGAIFDMLVPFAGYGFNKSHAAAYSVLAYQTAYLKANFPAEYMAATLIVEIKSTDRLLYSIVETRKMGISVDPPNINYSDKLFTVVDGRIVYGFLGIKGVGDAPADEIVRGRKDGHYKSFMDFLNRVDIKAVSKKVIELLIQTGAFDDFNVSRETLAGNMEKAIEYAQKMKEDKQLGQSSLFGDSSESGMPDFKFTEFPPVSRAERLNLEKKLIGFYFSGHPLDEYRQLWEKAVKADLAHPDTIQPGNHILIGIIKNIKRIDSKSGKMAYAALEDYNGEIEVTFFSRTWEACEDKAQDDKVAILKGKIEYQRNKDKYGFIADSWIDVREAQTAIEEEEALQKKREKFRNVWLYMADLKSGGLAKAEKGSYTVIGQLTALRETHDKNGEDMAFGTIQDFEGDIDLVFWAKTWKESRELLNLGEFVALKGSLDPERDRNPQKPSLKVSKVDDLAALSRSAARKADAGEHPKLPPMETQTAIKQNSPDTEQSAPPLNEIHVRLESGAADRDETIQPLRNYLNGNQGPCPVFIHIGEKIIRTNKGLSLEAEKEALGVLEGCIGVAQSWKEQCK

SEQ ID NO: 89249 - protein, 60 aa, Unknown
  Obtained from environmental sample
  misc_feature (1)..(60): Xaa is any amino acid
AAFRHLEMLAADIGERTACLEMRKQFCAYTKGMKGGAPIRERAVHAQTIEDYRRILQLSP

SEQ ID NO: 89250 - protein, 273 aa, Unknown
  Obtained from environmental sample
  DOMAIN (32)...(145): Response regulator receiver domain
  misc_feature (1)..(273): Xaa is any amino acid
RKTAENLKQFRLGKIEKIKKTPQIVHEYMPYGRVLIVDDVETNLYVAKGLMTPYGLLIETATSGLEAVNKIKNGAVYDIIFMDYFMPGMDGIEAAKIIRSLGYTHPIIALTANALAGQAEMFMENGFDGFIFKPIDIRQLDLSLNKLIRDKQPHEVLEAARQQALKKVQPASDSELAAIFVRDAEKALELLNAIHSNAYRRTDDIRMFVINVHAMKSALASIGETELSAAAYKLEQAGRAEDIKAMRSETPVFLEVLREVIERNKPKEDDSEA

SEQ ID NO: 89251 - protein, 282 aa, Unknown
  Obtained from environmental sample
  DOMAIN (3)...(72): HAMP domain
  misc_feature (1)..(282): Xaa is any amino acid
TNIIVTIFVFLTSLAVYFLIVYKLVAAPLRTLTVNVGRLSAGEVLPLVLTSRENEFSLLEDTFSDMSKRNAHSKKITDVLNKMAIIFLSHRDGAFDDTMTAGVRLIADIAEIDRLILCRNHIAADSLYMSEVYRWDRSSGGSTELTESLINVPYAQLIPDWEALLSDGNHINSPSKLLLERSANKLLSFGVLTAAVIPVHINNAFWGFALFGDTKNERYFEDDIIEMLRSATFLFANAFIRADMERDIKEALNKEMEASKAKSDFLSNMSHEMRTPMNAILG

SEQ ID NO: 89252 - protein, 434 aa, Unknown
  Obtained from environmental sample
  DOMAIN (1)...(417): Protein of unknown function (DUF342)
  misc_feature (1)..(434): Xaa is any amino acid
GVKEDVLKAFIDKPVYNEKIEIAEGTKANDGRDAYIQYFFETDQSKVRLKEGNNGKIDFKELNIIQNVVENQPLAKKIAAEKGVPGETVTGKWLSATNGKDINLPVGTNVHVADDDPDTILSDMNGQVIVAGGLVNVEPVYTVNGDVNLKTGNIIFLGTVIVQGNVEDGFSIKAAGNIEVHGTVAKADLDAEGDIIIYQGINGKGEGHIHAGKSLWARFIENANIATGDMVFVSDGIINSYVDAYNRIICQGKRASIMGGKLRACEEINAKTLGNPTSGTETVCEVGYDPKSKEEMERLQMEKDNANKLLEDMKPNILTLTNLKKQRNSLPDDKEAILQDLITKRDMLTTDLKKIDEGLKKIQEYLNSLKARGRVSASQKIYPGVKIIIRDAREEVHAEHKAATFILEAGLIRATKYEEPDDRTKKGPDGYTTN

SEQ ID NO: 89253 - protein, 234 aa, Unknown
  Obtained from environmental sample
  misc_feature (1)..(234): Xaa is any amino acid
MASINSRAPGLSSDNLKIIALLAMTLYHAADMLFPWWKRYLPDVSAALLLLFCMGIGMTAMPVICFLAAEGAYHTKNWKKYLLKLSLWSVPAHIAYAAATRKPINPFAAPFIMHTGVLWTISCGIGAFFALKHLKKFKVELMLLLLALGMYGDWGICAAAAILCMALTRNNFNRQILAMSLCFCIGLVYTYIRQGFALALVQASFLFSIPVLKRYNGKLCNEGAKPLPRMLFYI

SEQ ID NO: 89254 - protein, 130 aa, Unknown
  Obtained from environmental sample
  misc_feature (1)..(130): Xaa is any amino acid
MTYKFAFYVATSALLLCVCRADFGPGGGSADPDCGVNAYLSTFNPVLRVQVSPSNGGRVSASPLPPNSDGTYRYGDIVTVKAVPNTNYAFEEWSGASTDTVDSVRIVMDGNKTLTANFIIKSLKSKAFFF

SEQ ID NO: 89255 - protein, 72 aa, Unknown
  Obtained from environmental sample
  misc_feature (1)..(72): Xaa is any amino acid
MTIKETQEEIARLKGEKDVCLLAHSYQAREIIEIADFSGDSYQLSVAAAKAPQKSVIMCGVKFMAETVKILS

SEQ ID NO: 89256 - protein, 64 aa, Unknown
  Obtained from environmental sample
  misc_feature (1)..(64): Xaa is any amino acid
MRSWIEKLHGFLTLNDREILKGIGKISTKLAREHAEKEYEIFRIKQSQIPYNTDFEEFAGILEK

SEQ ID NO: 89257 - protein, 355 aa, Unknown
  Obtained from environmental sample
  DOMAIN (110)...(355): Respiratory-chain NADH dehydrogenase, 49 Kd subunit
  misc_feature (1)..(355): Xaa is any amino acid
MGPQHPSTHGALRLVLRLDGETIVEIVPHFGYIHRGLEKQAESETYIQYIHLTDRQDYLTSHQNNHCVCLAIEKAMGIGVPERGEYIRVMLCELNRIASHLVFYACFGGDLGGQTALLYGFKEREMIHDIFEEVCGQRLTMNYFRPGGSSKDVPDTFIPRVKAFLKHMKPTMKDYETLLTKNVIVLFRSQGIGVLSKERAVALGCSGPVLRASGVNYDVRKNDPYSIYSSFNFNIPIATEGDCYARYVVRMQEIYESMKILEQCIEKFPSGPYRSKPSPSYKLPQGSYYAQTETAKGIYGTYIIADKGDKPYRIHTRSPSFANLMSLNEMSKGHKVSDLVTIMATLDPVIPEIDR

SEQ ID NO: 89258 - protein, 439 aa, Unknown
  Obtained from environmental sample
  misc_feature (1)..(439): Xaa is any amino acid
MLPGIKNEILDFAMGVQGAQADGRFAAIGVAEKFGQGILTFNAPDQVEKKIGDGPLRDLLVSSLSIARTAVSVIAIEGSLPGTVSEVAKGGENEGTGSIVVSGKPRNEYDIGIAIETSGGINEATFRLTVDALPGKQITVPDGEAKYVIPGTGLTIQFVPGGSGFVEGDTFSFKTTEPRATNGDILAAINEIFEAKLSIEFIAIAGVCAAPLWAALAMKANEAAEIYQYLFFVAQARYLNAGETLDQWKNALCGAERGNTASTRLQVCAGWIEEADANGQVDVRGLIGVYCGSVAARKVMDGPDAVKFGGISAAVSIKPDGLNDGHIEDLKNAGYVTVRKYVGRKGIFFTSGQMMSEEGSDFDLVERRRVMDKACRNLYIAQLPAVNDTVRIGKDGSPEGLEMFLALSQSPLEIMKTNREISDGYVVIPPGQNILADQK

SEQ ID NO: 89259 - protein, 135 aa, Unknown
  Obtained from environmental sample
  misc_feature (1)..(135): Xaa is any amino acid
MALKKEEITRKLLHLFALLMPAGIFYLPEEFGVSPVVPICILAFLLAGSITVESLRFRLPAVQKAFRVCFGHLLRQEEDKKVTGSTYIIAAALICSLIFYNHRYISFIVLTIFILGDAIAAIVGLSVGRIKIGKK

SEQ ID NO: 89260 - protein, 406 aa, Unknown
  Obtained from environmental sample
  misc_feature (1)..(406): Xaa is any amino acid
MTIKRSKINKTFQAIKILLLASSILSCTISSGAYKEIDYAIDQSNYPEAVGVIVKKQEGKNAMYSQKNAIMLFLDKGMLEHYAGNYASSSADLQNAERLIEEAYTKSISEGFLSYIINDNIKEYPGEDFENIYINVFNALNYYNINNIEGALVEIRRLSNTSGKLDLLSRKYDYKDPKTGANLNNMVNRETGVSRLPDVKSVNFSNSALARYLGALFYQADGNTDSAHIEFNQVYRAYSTHKNIYRDEVPKAVEDAWNVPDGMARLNIISFTGLSPVKEEKIIYQSLPFQHPILQTAAFKLPVLVKRPSQINRIEAEIDGVGTFELELLEDMGAVIEETFNARYSNMLIKTYIRTIMKYVIADAAAIEAERGKNALLGLTIAIAAKAAMDASEKADTRMSRYLPDK

SEQ ID NO: 89261 - protein, 718 aa, Unknown
  Obtained from environmental sample
  DOMAIN (499)...(531): Tetratricopeptide repeat
  misc_feature (1)..(718): Xaa is any amino acid
NEAFSEKRLRRVIIPDTVTVIGERAFAHNALTGIVIPNSVTDIEEGAFAGNHISSVNIPDSITVIGVRTFANNALTGAVIPDSVKVIEESAFADNKLSSIVIPNGVTNIAVDAFARNQLTGVSIPDSVLRIGPGAFADNKLVNITLPNKISVIDGGTFRNNQLTGITIPDSVTTVRDVAFMGNPITQITIGTDVKIAAANRREAFDSEFPAIYEENGRLAGTYTCGSNGLWSSGTVQRHYSDENNFETQVLENGEGVSIINYTGAGKTVIIPPVLRDLPVTEIGREAFFKKSGLTRVIIPDSVFIVGYWAFRWNNIGSVEIPDGVGYIGERAFAKNKLTEVTIPNSVAGIGFSAFEENEITRITIGAGVTLNNSFGNSFGDRSFDEFYDKNNRMAGTYQFIDKKWQFTNLSADEQVKALKVMEERPLPPISFVWNSRGVYRDSKGRHIEAIADYTEAIRLNSKWHLPWYNRGYARLQTGDYDGCIADSTEAINIRKNFSDAYVNRGMAYRLKGELDAALADYNEAIRLNEWESSAYNNRGNVYLAKNEYEKALTDYEKALKLRPGYVEAHSNLGTLYFRMKEYDKALAEHSEAIRLNSAYAMAWCNRGVVYYQIEDYQAALENLNEAIRLNPQYVYALLKRGDTYLELKDPDSAIADYTEAIRLDPLNSSAYNNRAVAHKRKGDNEQTIADLDRALEIDPDNEIFKRNREKLLAKRRQ

SEQ ID NO: 89262 - protein, 294 aa, Unknown
  Obtained from environmental sample
  misc_feature (1)..(294): Xaa is any amino acid
MRWIGFVAGRYVSKGRRNSPTPVFSVLGIATGVLALTVIIAVMNGFQLGFIESILEMSSCHVRIEGFISEGSKPFADAGLINELRSVPEVLSVLPFQEINVLLRGRSTSPRGALIRGVPPDALVLDPGLASRLEMEEGFFDLGDPNSIVLGGELARHLLVGAGDEINLLSISGGIREDESGRAYRVAGIFRSGFYEYDLGWAFINIDTAAELAGETARTVLGIKLKNRWQDQKAVEKIKEVIASFDSGASAVSVKSWRDYNRSFFGALRTEKLMMFILVGLIFIVVGLNIFSAQ

SEQ ID NO: 89263 - protein, 249 aa, Unknown
  Obtained from environmental sample
  DOMAIN (156)...(213): Bacterial regulatory proteins, luxR family
  misc_feature (1)..(249): Xaa is any amino acid
TATKVPWGREIMQRGTLVVSRAVNNHSYYKKRFQALGFPDVTVTALEKDALSSLIRKLKPNLIVMGARFYQCCTPFLMGRLHKDFPKINMAAFCIGEYPADLAMYFIINGIKSYITSFDGVDQFYNGIDEVRKGNNYVSPAVMARMDMRRDYIMPAGDITGREREVIRLTCCGYTELEIGDTLHISKKTVAIHKTHIFTSLNVRNPIELIIASLTLQIVSLDELYFRPKDFTVNPLPDEKIKRRRKNDY

SEQ ID NO: 89264 - protein, 414 aa, Unknown
  Obtained from environmental sample
  DOMAIN (148)...(211): Elongation factor Tu domain 2
  misc_feature (1)..(414): Xaa is any amino acid
MVETPHGALTFLDTPGHEAFTRMRARGAQITDIVVLVVAADDGVMPQTIEAINHAKDAKVPIIVAVNKIDKPEANPDRVKSQLSELGLMPEDWGGQTIFVELSALQKTGIDKLIESILLEAELLDLRANFQCNAEGKILESKVDHGRGIVATVMIERGTLAIGDAYVAGIWHGKVRAIFNDKGEKINKATPSMPVEVLGFDGIPNAGDPFHVVDDEKVAREFSSKRQELRRFEDAKILKKVTMDNLHDMISDGTIQELKVIIKADVQGSAEALKSSLEKLSTKEIRLHVIQALPGPVNEGDVDLAIASKAIIISFNVRPLPKAKILADQEKVDIRKYNVIYRAVDEIRLAMEGMLKPDTKEEVIGTVEVRNTFKVPKVGTIAGCYVQIGYYKAQLYRKCSAGSGCYSHRKNSVA

SEQ ID NO: 89265 - protein, 280 aa, Unknown
  Obtained from environmental sample
  DOMAIN (54)...(246): 7TM receptor with intracellular HD hydrolase
  misc_feature (1)..(280): Xaa is any amino acid
ETQKRIEDAKETITPVNRTIEKGNRIIRKGFIITEEEMEDLMVLHFSMPKKDLRNIIGTVLVMLLLYLLFVVLCGRIIIGKKLNNSERYLLASITGFYIIGSVLLFNFLPGQNNIPISLLVPTALFVMLLAVFMGTRPAIIMALALPLASYFSGGFDNYSYIFALISGIAASTVLHNAKDRMSLIKAGVLIAAANSTAIVVILLLQKASIYDYPAMIFGAVLNGIVSGMLTLGFLPPLEHALNAVTPFRLMELADLNAPILRRLFTAAPGTYSHSLMGAN

SEQ ID NO: 89266 - protein, 572 aa, Unknown
  Obtained from environmental sample
  DOMAIN (65)...(497): AMP-binding enzyme
  misc_feature (1)..(572): Xaa is any amino acid
MNEILSRYIPRVDFDSYDDFYKNYRCNVPDNFNFAYDVVDEWAKLQPEKLALLWTDDTQEMRSFTFADIKRLSDKAANALSSLGIKKGDVVKLILKQRPGVWVLMCALSKLGAICIPGTYQLTAKDLEYRCNIADVKLLITVDDKELMENIALARPNCKKLEKIAVIGKTIPDGYIDMRAEIQKSSENFTRAATVTKDPMLIYFSSGTAGMPKMVLHNHSLPLGHIVTAKYWHCVEDNCVHLTQTDSGWAKFAWGKIYGQWICGAAIGVYDTEKFTPNGMLDAILRLKPVTFCAPATVFRYLIKEDLSHYDFSFIRHTSVAGEPLSPEVYNKLLELTKLEIREGFGQSETSVMAAVFKWLPVKPGSMGKPAPLFGLKLLEENGVECDEGIVGNMSITCAGKNMYETKDCDPDSMPPVIGSSDFPGIFRGYWKDKEITETCWNNGTYKTGDMAWKDNDGYLWFVGRNDDVIKCSGYRIGPFEVESALMEHPSVLECAVTAAPDPMRGQVVKATIVLARGYTASDELIRELQNHVKHVTAPYKYPRIIEFVPELPKTISGKIQRNMIRKKDFKD

SEQ ID NO: 89267 - protein, 762 aa, Unknown
  Obtained from environmental sample
  DOMAIN (173)...(239): His Kinase A (phosphoacceptor) domain
  misc_feature (1)..(762): Xaa is any amino acid
VKNEPIPCEITLVRVKHYDDFVLAAYMRDLREIKAAVTEMNESIQAFNLLENMMNNLDTMIFVTVPQTGELLFVNNCMREHFKVEGECVGQFCYKVFFNDKAGICDFCPCYKLDKDPHGTVMWELHNPKTKRIYQNTSRFMEWSDGRIVHIQNSIDVTELIMAKEQAIHANNAKSNFLAKMSHEIRTPMNAILGITEIQLQNKNIPDYIEEALGKINNSGYMLLSLINNILDMSKIESGKMELSLNNYDFPSLINDTVSLNVILYDNKHIEFTLNVDENIPSSMLGDDIRIKQIINNLLSNAFKYTDKGEVSMSISAEYQEDPAIVTLVLRVSDTGQGMTAEQIDTLYDEFTRFNTEVNSKVEGTGLGMSITKQLVLIMGGEIDVESEPGKGSVFTVRLPQKIDNHEVIGKEMAEKLKNFRSADLTQTGKKKHLVYEYMPYGRVLIVDDVDTNLYVAKGLMSPYGLSLETAKSGFEMIEKIKGGAVFDIIFLDHFMPKMDGIEAVKIIRDMGYTQPVIALTANAIVGQAEMFLENGFDGFISKPIDIRQINAMLNKLVRDKYPPEVVEAARKQAAVITDQTVKNIEPSTDSKLRAIFTRDAESAFIRMKTILSNSFRRSDDIQQFVIDVHSMKSALNHMSEKQLSAVARKLEMAGRAKDVPVMIAETPAFLEELRKTIDKFKQKDDDSVEEVFENDLVLLSEKMLAIQKACEKYDEIAANSALEELEQKKWSRSIKEHINAISMHLLHSDFDKAANVASEYV

SEQ ID NO: 89268 - protein, 1150 aa, Unknown
  Obtained from environmental sample
  DOMAIN (549)...(751): D-ala D-ala ligase C-terminus
  misc_feature (1)..(1150): Xaa is any amino acid
SILSGLGGQTGLTLCMQLARDGFLEKMNVRLLGSSPETIDKAEDRKLFKETMQSIGQPVIPSVIAVDVETAVKFADEIGYPVIVRPAFTLGGSGGGIAANDAQLKEIAANGLSLSPIHQILTEKSIAGWKEIEYEVMRDRAGNVITVCSMENFDPVGIHTGDSIVIAPAVTLADKEYQMLRSAALNIIQALGVEGGCNVQFALHPDSFEYAVIEVNPRVSRSSALASKATGYPIAKVATKIAIGYTLDEIINAVTGNTFAAFEPTLDYVAVKFPKWPFDKFVYASRELGTQMKATGEVMSIADTFEEAIIKAVRGAEIGLSSLELPRLAASSDAEIRGMLKTVTDERLFVLYEAIKRGISIDELYSITRVDRWFLNGLKNIKDSAESVPASPSPLVYKMVDTCGGEFEAKTPYFYSIQSGFENEALPFIQKSEKLRVVVLGSGPIRIGQGIEFDYACVHCVWTLKNLDYDVIVINNNPETVSTDFDTADRLYFEPLCIDDVMSIIEIEKPLGVIVAFGGGTAIKLTKKLHERGVKIIGTSADSIDICEDRQRFDALLENLQIKRPKGYGVMTEAQALDAAEKLGFPVLMRPSYVLGGQNMIIAFSPDDIREYMEIILRSKQENPVLIDKYLEGLEIEVDALCDGDPSQGGQGGVFIPGIMEHIERTGIHSGDSIAVYPAINIDDALAEKIFDVTKRLCMALNVKGLVNIQYVLYENDIYVIEVNPRASRTVPYLSKVTSVPMCELATKLSVGKTFSALGISPGIGKIPPYVAVKVPVFSFEKLAGVDTHLGPEMKSTGEVLGIGKNLQEALYKGLIAAGYKIKKRGGILITVRDSDKAEIRDVAEKFVRAGFSLYATRGTTRYLKEKGFEVQPIDKICDNQEVNTETFLASGQISYVICTSKKGRDPALDDVKLRRKACSLGVPCLTSVDTANALADGLLSGYSEINTELVDINSLRTERMKLTFTKMQSCGNDFIYFDCFKTEGINSPESLSVFLADRHKGVGGDGVVLILPPVSNTADARMRMFNLDGSEGGMSGNAIRCVAKYLYDSGLVKKRDMKIETKSGVKELNLSTRNGLVSSVKVNMGRAELRPEHIPVNLKGDNAIARKVTIGGVEYEITCVSMGNPHAAVFCDNLDDLDLSEIGPFSKTI

SEQ ID NO: 89269 - protein, 122 aa, Unknown
  Obtained from environmental sample
  DOMAIN (3)...(116): Type I restriction modification DNA specificity domain
  misc_feature (1)..(122): Xaa is any amino acid
YLEHSRQYTTEVNKIAPKDSVLLCVRAPVGIVNITDHEVAIGRGLCAVSPFGEISVEFIFHWLTAFQYSFVEQATGTTFMAITTDVVQQQIVPIPPLAEQHRITVAIESAFKQLDNIVTNLL

SEQ ID NO: 89270 - protein, 447 aa, Unknown
  Obtained from environmental sample
  misc_feature (1)..(447): Xaa is any amino acid
MPILIVPACEPGRGGGHLVRSMALVRELRALDREAWLYITSPNADAVLDTAQFDRSWLLAESGLREKNWQCIILDRFQTSADELARWQKIAPVIGVDEGGKYRGNFDFLIDILPNCDKITPNIACPSFLPLPKNKPCLSANPETKPLKILLSFGQEDSAGLGPALAKRLVDQQNIEIILLKGKLSNEQNYSSFLILNSLLKESIPNLNEHLTDYDLIITHYGLTAFEAIYAGVPVLLASPTGYHEKLAKKAGFWTLGIGNKRKEKKEKRKKIEKRNAEKKLSALLKKKNFFSLYLHDLKKHCAELAIKFGLEHEPRQSLAELVNTITPDVSRNCAVCGEEFNGPVLARFPERSYLRCKGCGGISMNRINPVPIEYDKDYFFEQYQKQYGKTYIEDFPNLTAMAKRRLAIIKKVESREWRVWSKLGIRNEELGIEREGQNKASDNTPH

SEQ ID NO: 89271 - protein, 478 aa, Unknown
  Obtained from environmental sample
  misc_feature (1)..(478): Xaa is any amino acid
MSVVTAEKDAKKIIELADAENLEAVVIAEVTLEKRLVMNWNGKTIVNLSRGFLNSNGAEKHAKARISSLILTCKKNEPDAPQLEKFSGGLNICSQKGLVDRFDSSVGMATVIAPYGGKYQLTPAQAMAAKIPVLNGETKTCSLMSWGFDPEISSLSPYHGAVFAVTFSLAKIIASGGSRKRCWLSFQEYFERLRDDPVRWGKPVSALLGALDAQLGLEIAGIGGKDSMSGSFTLKNGGNIDVPPTLVSFAVSTAKTDKIITPEFKRAGSYVYLFKPPCSVFEKVRFAALREYFDDMEKLIAKQKILSAWAVGSGGTAEAIVKMCAGNKIGFNAELPLSYEYGFGGFVFETDMPLESCVLLGRTADEYTLSTKTFNIPLDKLQNKWEKTLEPVYPYNIEQEGKTESFFYDKGVTIKAKERFAKPKFIIPVFPGTNSEYDTAKAIEKAGGQAQIFIIRNLTPSSIAESVSAFEKAVNPRR

SEQ ID NO: 89272 - protein, 572 aa, Unknown
  Obtained from environmental sample
  DOMAIN (167)...(320): AIR synthase related protein, C-terminal domain
  misc_feature (1)..(572): Xaa is any amino acid
MDMATIGAKALKKLRFLPDLDESEEINACSVKIKADVDGVEQDWLLMFKNETHNHPTEIEPFGGAATCLGGAIRDPLSGRAFVYQAMRVTGAADPLQSASCAIEGKLPQRKICRTAAAGYSSYGNQIGLATGHVHEIYHPGYAAKRMEIGAVIGAAPAENVIRNTPQPGDVVILLGGRTGRDGIGGATGSSKSHTSLSLETLGAEVQKGNAPEERKIQRLFRNPQAARLIKRCNDFGAGGVSVSVGELADGLLIDLDKVTKKYEGLDGTELAISESQERMSVVTAEKDAKKFIELADAENLEAVVIAEVTLEKRLVMKWNGKTIVNLSREFLNSNGAEKHAKARIVSVRVNNIKTEPDAQQLEKFSGGLNICSQKGLVDRFDSSVGMATVLAPYGGKFQLTPAQAMAAKIPVLNGETNTCSLMSWGFDPEISSLSPYHGAVFAVTFSLAKIIAAGGSRKRCRLSFQEYFERLRDDPLRWGKPVSALLGALDAQLGLEIAAIGGKDSMSGSFTLKNGGDIDVPPTLVSFAVSTAKTDKIVTPEFKRAGSHVYLFKPPRSVFEKQRFCRLARLF

SEQ ID NO: 89273 - protein, 430 aa, Unknown
  Obtained from environmental sample
  DOMAIN (261)...(423): AIR synthase related protein, N-terminal domain
  misc_feature (1)..(430): Xaa is any amino acid
MEVFSIYVEKKAEFAQEAEAVTADLRLALQIQIEKARIINRYFAEGISGGDFDAAKSAIFSEPPVDIVYEELPDLQGARVFAVEFLPGQFDQRADSCAQCVSLATGKERPLIHSSKIYALYGKINDTEFNKIKSWLINPVESREASLEKPKTLLQKYNKPEDVKTIERFISLSKDALDELRVTMNLAMDTQDILFCQNYFRDKEKRDPTVTEIRVLDTYWSDHCRHTTFLTELDEVKIEDGALRESYNNYLETRVFTGRDKKPVTLMDMATIGAKALKKLRFLTDLDESEEINACSVKIKADADGVEQDWLLMFKNETHNHPTEIEPFGGAATCLGGAIRDPLSGRAFVYQAMRVTGAADPLQSASCAIEGRLPQRKICRTAAAGYSSYGNQIGLATGHVHEIYHPGYAAKRMELGAVIGAAPAENVYAI

SEQ ID NO: 89274 - protein, 210 aa, Unknown
  Obtained from environmental sample
  DOMAIN (25)...(210): ScpA/B protein
  misc_feature (1)..(210): Xaa is any amino acid
MDEKIQAHRFKLSDFEGPLDLLLYMIRKNEINIYDIPVAQITDQYIEYLRYAETMDLEDITSFHAMAALLLYIKSRTLLPVEMDPDADEDPRAELVERLIEYQKYKKYSELLEEKQNENEWGIERRRLQHNLPFADDDQWERIDIWDLLKTFSALTVNIDAERIIDLYEEITVNEKTALLMEHLENKGECRFTELIVRSGALDIVCAFLA

SEQ ID NO: 89275 - protein, 245 aa, Unknown
  Obtained from environmental sample
  DOMAIN (53)...(130): OB-fold nucleic acid binding domain
  misc_feature (1)..(245): Xaa is any amino acid
MQTQNEFVKVRLGKLEKMREQGLNPYPYKFLVNCNSSELKEKAEEFIASNKEVSWAGRIVRYNRKGKMCFMHLKDACGRFQVLAVASELSEVEYEVVKSMDIGDWVGASGTVMKTNSGEYTLQAKKIEIISKAIYPLPIPKEKRDENGNVVIFDEFKDIETRYRERYIDLALNDNVREVFRKRMRIIQSIREYMLEKGFLEVETPTLQPIYGGANARPFETHHNAADMTLYLRIAPELYLKRCIV

SEQ ID NO: 89276 - protein, 192 aa, Unknown
  Obtained from environmental sample
  misc_feature (1)..(192): Xaa is any amino acid
MKHFLVFLILPALLFAQDYAWYNGKSSPYTISTAADLVGLRELLSSGTDSFDGKIILLGNDITLTGNWTPIGSEARPFKGTFNGQGKTVSGLAVDGGDYAGLFGYVGANGQIRNLNVVATEIKTATSFGNVMRYAGGLAAYYASTKPIENCGVKATSIIGSSYGNDCTGISGCVSYGGGLVGSSRVDLQACK

SEQ ID NO: 89277 - protein, 473 aa, Unknown
  Obtained from environmental sample
  misc_feature (1)..(473): Xaa is any amino acid
MSELGIVTNTNYFLMRRSHAIALYLEKINTALVVLLAVIALLGLIAVLSKKLRGKALLSAFCFAALAAFALEATAFNSWHYLKYFAGPPTSVAGVVDSGTNTLRTTDGTKVEVLGNGMRFKNLNRKVTSIFVNIEFDKIETAAMLVRWTDEGITQQYVKSLYKYLPHENYAILQPCGKVSDLQIAFDYPDITVLEAAINKPVPFYFSGLRILVVSFLLFSLSTLVNKTLRAKAAHYLFEYKFDPKNRKQTLAYACSAALLILFSWVCVFTSIKDWDEDKMKYHIYNKYLVDALIDGRTYLNVGHPELLLKAERPYDDTWRVANGFKGTNEEAFDWSWYKGKYYCYFGVVPAALLFVPYKLITGNYLPNHVGVFIFCAIAVVLLAWLWRYCVKKYMPDMRYALYWLSFITLFFTSGIFVILRYATFYAIVQAAGFMFTVAGILLLLKSVDNEKISRTKLFFACLCFALVFGCRP

SEQ ID NO: 89278 - protein, 546 aa, Unknown
  Obtained from environmental sample
  misc_feature (1)..(546): Xaa is any amino acid
GNVRVNGGEVKAEGKGTVTGGYVAAIYVVEGNVVVGNTAGNQNNKGAQTDPRTILTSDGSALAIYIDAPQLNYDSVGTLGIINVKGSNQNYGGIKTLNRVTTYFSGKLTVSTASSKAFSIDATTGDVFILPGARITSKEGIAVATAGGEININGGRTESTITEIMGDKGILVYAKKNPTYLRAGIVRVDGGEIYNKNGTGVKAEDSVMVGDRGTRYTRSDDTLTAMWPWIHTDTDTALTTGTAKEAGGVLIKGGRIQATGQHGKFAPVAVSSKRVYLANGAVLAGEARSSTDDDDRYIQSKATGILIRTGEGVGRLRINGGLVWAYGSDTGIVNKDTAVTVEIGYADLGQSSTGLETIYAGNDGTGIKSDGPINIQGEEDPEDSQKESSGEPVSYSVHIRTGNGPNAKAIYMPVLKGAKKKDLQLNRAVVEAGSDGSFGLDCDTNTTVKAWHSVVLVRHGSTGIRAQGGVHIIGTYVEVLNTNNNWTGTAITGRQIRIDGRDESVQENIKSEVHSKDIAVYDGKEGATVQVTGVVHMSGTVKTNMA

SEQ ID NO: 89279 - protein, 1643 aa, Unknown
  Obtained from environmental sample
  misc_feature (1)..(1643): Xaa is any amino acid
VTFKATQSYMTADKEYDMPAITNVQIGQASAMVTGFGGEVRTKHTVVGTWVYDDGAGTWGDVAGDNKVGIDNQVGIKIKVSPEAAYVVSPNTVSMATLAKSFVKGVDYKDAVILWGEEVSSKHTGVTDDGELEFIVPLGKATMPNFKVTSKATGYPYGTDADGALDDGALKIEFLEGGNPIANGVELEFTTDDTKYPASWSDVSTALGGTATVRVDNATNKKIAVLETFTGDFDKIPAGTHNIIAQITKLDGDNLSRVKSGSWQLLINKANLTPDEIDLTNAEVLDEDKLIGDNIVAPESMEEDEYTVDFAWGWRKLKAASSAAFTALSSGPIKVGEYELTITVKPTASYKFNTSTTAAAYAAMFVDPGSVQGGIKSAEFNNDRTVLKFKVNRSNVEQPEIEGDLEEGILSPFDWGSDDAFTVHPIWGDGESGIKNGVEVDIAFSGTGIPSGVKTSALIGLGSEEGETSISLPTAIAKSLNAGYYNVTMTITNSALEINMSKSGKLYIYSQPILFVDEEGTQIIPKLTVPKPTVGGDARSDAYTWATTGQNISPYFSVRNDWIGPTEDGKFKANEQYVAAVTFTAKQNYIFKAGLDQSEGYTVNNMFTSGDPSEGLLGTAVGTPAERANNSKTLTIKYIGGTSKKPLTPTRITFKNGADDFSVPVLGATATPSDFTSWKSTDGTDGNVNAKSPAEPASGSVPAVAAGAKWYVSAAEWYKSNEEGTWSAVSAGTDFGGTNRFKASNPIQYQYGIKVTVKAGNDYSFGSAKAIDLANAFKPATSVTTTVTNAEFNSEGNLDFIVVYPAIAAPVFTVEMAKNAATGEVIPYEYKTATQPNLTISFPWDTQKQGDPPASLTIALDGGDGVTLGATTFGSIASADAVGGKVTKTTTLASGAATLKAGTYTVKTTVTDGSGGTGVLLGNDGVDGSGFSLVVSPKKLNGVVISAVTGDAWPSGGSGINMTYSPNPVKPVVGAITPATTPVDFTTWSADLVGSNVTVQWENFESVSTPERPKNAKIWLSASGSGNYTGTSAKVDFTVVPAQVDADGEFVMTIKTPVGGDKYTPTANFSSNYEKVYGSDAFKSFFTAKLAWAQTTPTPTAAWDGSFVYTEGGANVYTATLTLTPNSNYKFDGGTYAWRNFLGNSVTPEPTAPTVTNGDLVITATFSPVKDAMTAAVSELASAMAGLKAEYEQSVVGTEAAARKIVEDLIVNAWGSLTNTSNVKASVEKKEYKEPDWETGLNGVYSFEVTLTSGGKTEVGYSGSFAIIGYPVSISAGDGVVRHYSGKRVGAIVGSTVQWATWEPGKVYGIDLPVVDVTDNKLYGNNNTYEVTSITYTAVSGAAATIGHSKSFLRKANDKFADPKGKSGDTTTLNGVMFAGEYSVVVKMEAKPGTLGFPSAGFSQEITFTVLPRDLKNAKMEISFLKEELVYDGKMKAYDRIKVTDGNNRVLQRMGDIGVEARDEAWDFDTQDEESLTNAGTAKIVIKGINNYTGTLTGTFKIEPMTIDFDPAATYTFTKPFDGKKNVVIEGSDPGIKFLDANKLPLTTITYGVEEGYTVSLSYNTATVGTDKTVSGTVELTEKSSNYKLKSKTFTATKQVITKGTPGPEHIVTTPALSVETPLDIKYDAKAKSVTATWGKDIP

SEQ ID NO: 89280 - protein, 58 aa, Unknown
  Obtained from environmental sample
  DOMAIN (6)...(39): Tetratricopeptide repeat
  misc_feature (1)..(58): Xaa is any amino acid
MKPNDADAYNNSGDAYFEKGEYDRAIADYDQAIRLNPKNAKAYFKRGNAYYQSKNDHS

SEQ ID NO: 89281 - protein, 279 aa, Unknown
  Obtained from environmental sample
  misc_feature (1)..(279): Xaa is any amino acid
ELCKKQQIRLLHEDYGLDEKVAAGVVDTLALVLRGEQESGALQVCANCGKELQKEWKVCPHCGTQVAKVSPAFSSAISSGSGSDGYGISLIAPGAEQEHIHALAEIRKRIAKYQNCISTGGSYSVGLKADGTVVAVGENNWGKCNTGSWRDIVAVSAGGSHTVGLKADGTVVAVGLNFNLQCYTWGFRDVVAVAAGGSHTVVLIADGTVGAAGIDNSQAPLCQCYTGSWLDIVAVAAGRAHTVGLKADGTVVAVGRNEDDQCNTKNWQGIGPVPEEQVL

SEQ ID NO: 89282 - protein, 794 aa, Unknown
  Obtained from environmental sample
  DOMAIN (696)...(779): Hpt domain
  misc_feature (1)..(794): Xaa is any amino acid
MFNKYNEITAAVDYSLVEKKVRLDELLGETGKELIRAAHELSKGESRSFNHDNKIFLVNSIPEMEWYMAVSYPLPGMFSLNRAMNTVFFCMLFLILFLFIVINIFIARLENAMAEHNLQLLEANRKAESASQAKSDFLAKMSHEIRTPMNAITGMAELLLREELSGEALDYAQDIKQAGNNLVSIINDILDFSKIEAGKLEIIPINYLLSSLINDTVNIIRTRLLEKPLRFFTNIDGTIPNSLIGDETRLRQILLNLLSNAVKYSEKGHVGLSITVDKRDEKQVWLRITVSDTGRGIKPEDKSKLFDEFVKVDIKKNQSIEGTGLGLAITKNLCIAMGGNISMESEYGKGSVFTAIIPQGIESEGSFAVVKDAEKKKVLVYEGRAVYAKSVCWTLDNMGVPHTMVANKDDFAAALYREEWFYVFSGYGLYEKIEPFMEKSDAVFCGGKKPSLALMIEWGTEAYIPNVRFVSIPVQSLSIANILNGMAENKGYIKNSGIIRFTFPRARLLVADDIVTNLKVVEGLLAPYLAEVDTCLNGLQAIELVKRNKYDIVFMDHMMPEMDGIEATTTIRALKGERFRTMTIIALTANAVAGMREMFIENGFNDFISKPIDVANLNEVINRWIGEDKREERKEEKEDVKEKREKRIEKKEERKVNEQPTVSNEQSAIRSIHLIPGLDTAKGISMTGGSQEAYKMVLEIYCKDIEDRMQIIQNIPEADTLPLFIINVHALKSSSASLGARDVSAQAKELEAAGKAEDMAYIRERLPVFLQMLMELKENIRDALQNNEAELDKT

SEQ ID NO: 89283 - protein, 1031 aa, Unknown
  Obtained from environmental sample
  DOMAIN (915)...(998): Hpt domain
  misc_feature (1)..(1031): Xaa is any amino acid
MITYLFRSFKKIVNKTFFIFSCVLFFIIALAAVVAYTISAHQINLSFIEQQLSIASETMMLRLATTVNSELALVLKMADTPVIRQYFMDPSDPALGLLAQTEFTLYQEHFNNKIVFWINDVDKLFYFTGNAPYVVNPDDPENYWYNLTLYETEKFNFNINYNPDLGEINLWVNVPVFTDAGSVKKPLGMLGTGINLTDFSNFVASSYLKFDTHITSYMFNKYNEITSAVDYNLVENKVCLDELLGETGKELIKVAHELSEGEERSFVCDKKIYLLDSIPEMEWYLTVSYPIPGFLALNKAMNTVFFSMLSLILFLFIVINVFIARLESAMAEHNLQLLEANKKAESASRAKSDFLAKMSHEIRTPMNAITGMAELLLREELSDDALGYAQDIKQAGNNLVSIINDILDFSKIEAGKLEIIPVNYMLSSLINDTVNIIRTRIMEKPIRFFTNIDGTIPNNLIGDEVRLRQILLNLLSNAVKYSEKGHIGLTITTDKRDDKQVWLRIAVSDTGKGIKPEDQEKLFDEFVKVDIKNNKGIEGTGLGLAITKNLCTAMGGNLKVESEYGKGSVFTALIPQGIEAETPFAVVDKPEEKKILVYEGRINYAKSVCWTLENMRVPYTMVTNQDDFAAALYREKWFYVFSSYGLYEKIEPIMRQDDAAFHGGKKPPLALMIEWGTETYMPGVRFVSIPVQSISIANVLNGREDDKGYIKTSGIIRFTFPNARILVVDDIATNLKVVEGLLAPYQVAVDTCLNGLQSIELVKRNEYDIVFMDHMMPEMDGIEATAVIRELEMSNEELGIKRKQIPIIALTANAVVGMREMFIENGFNDFLSKPIDISKLDEMLNHWIPKEKRELGMRNEELGIENKDNYSSLLTPNSSLNHSPVPSPQSLIPIPDVDVQKGIAMTGGTVAAYTKVLALFCKDVEERLPLLQKAPDADALSTLVTHVHALKSASASIGAQKISSIAAGLEAVGKAGDAAFVRESLPGFTRQLAELVKNIRTALEQSKPKDQDAPSSLFPVPRSLFPLPLSP

SEQ ID NO: 89284 - protein, 254 aa, Unknown
  Obtained from environmental sample
  DOMAIN (78)...(165): Hpt domain
  misc_feature (1)..(254): Xaa is any amino acid
RWIPKEKREQGTRQQSWRGNREQIRHSSDNDSASSLYPDSANRDSPLPTPHSLLPNIPGIDTAKGIVMTGGTVAAYTQVLSLFCTDAQDRLPLLQKTPEADAMNAFITQVHALKSASASIGAQGISSLSADLEAAGKAEDTAFIREHLPDFAQQLAELVKNIRDALESSNPEDNFVPDSRLPKATLSPPDSRVFHELADALKSQKISEIKRILNTLDQQMQDARLKEILERISNQVLMTEFDSALKIVKEVLRT

SEQ ID NO: 89285 - protein, 264 aa, Unknown
  Obtained from environmental sample
  DOMAIN (66)...(264): Binding-protein-dependent transport system inner membrane component
  misc_feature (1)..(264): Xaa is any amino acid
MSINNLKIGAVIGVIIVTMSLLSLIWVPYNYNQMDYLERLMPPSAGHILGTDNFGRDIFSRIMAGGRNSLLLAVCTVTGAAALGSLLGLLAGYIGGITGEIIMRFIDTLNSFPGIVLALLLVAVMDNSQFSLFLALLILFTPSYTRVMRTGALQYKSASFIQAEKILGAGFLRITFIHILPNLAPSLLSASVLGLSNAILAEAAMSYLGMGIQPPQPSWGRMLYESQAYFFTSPWCALAPGLLITFTVVAFHLLGVGLRRRFGE

SEQ ID NO: 89286 - protein, 303 aa, Unknown
  Obtained from environmental sample
  DOMAIN (71)...(292): Branched-chain amino acid transport system / permease component
  misc_feature (1)..(303): Xaa is any amino acid
VQVQKAGGPPEIQRQDRLTSALYSGLASQAGIIVIALIALLVLVALACVLSKTPGRTLFFFFIGPFRNVYSFGNMLNSAIPLIFGGLGVSIAMQAGSLNLGGEGQIYSGAFVATITALPLAFLGLPGGLISILAGAFFAGILAALSGFFKARWNTNELITSFLLSNAMILIVNYLVTGPFHDPDTNLQSTRKIAASLRLPLLLPPSNLNMSLVIALASTAAVYLFLKKARLGYEFRISRNKRGFCTIRRNQYTAEYGAGDVFKRRAVRPCRRALRLWLLLPDGEGIFSGAWLERPCGGACRGL

SEQ ID NO: 89287 - protein, 1028 aa, Unknown
  Obtained from environmental sample
  DOMAIN (91)...(350): BadF/BadG/BcrA/BcrD ATPase family
  misc_feature (1)..(1028): Xaa is any amino acid
GITLNRHIIRFIREKAPQIEFIIPETAPVFEALGAAVMAPQSGSPLPSVDKLLKTNEIRFGALGALRDWKDKVQFFDKGEGKVRADHRYILGVDGGSTTTKACLVDMETDEIVASHYGRTHGDPVKALKECLGIIQKKVIADTGDKKLDIGLVSTTGSSREILGVFLETPGVYNEIIAHSVGTTFFDKEVETIFEIGGQDAKYVLLKNGVPIDYAMNEACSAGTGSFLEESAAGDLSIHSAKDIGPIALNADAPLKFGEHCSAFINSDIRKAVQQGASRENITAGIVCSIVANYLNRVVGNRTIGGKVFLQGGVAKNPAVPLAFAMLLDKEILVPPSPELMGCFGVALLSKRKHVDGLLEERPVVIDDLLNREIGYERVFICQACENLCSIQVLSIASADKSVSHKYMFGGRCNKYTNMRKQVKDVPVFDYVEKRQKMIFEEYAAPSGEDKKRSFIVGIPRAFSTHTLYPLYSWFFHELGIKTFLSSDVAHEGVARAESTYCFPAEIAHGAVQDCLNKGADFVLLPHFRDMPSYEEKVHANFCPITQGLPYYIEKAFPDVDKKKWLPLVVSFKFGEEKALELFQVMNEKLGIGEEETKAAFEKALAKQNEYFSAAKKLGLAALEDARKADRPVIAVLGRPYNAFTPEANMGIPRKFTTRGYSIVPFDILPFEDEEIFSNMYWYYGQQDVKAASLLKNEDNVYITFVTNFSCAPDSFILHYIKWIMGQKPFLVLELDSHSADAGVDTRVEAFLDIIDGYRAKKSELEAERFDNGWRYVYDPSASSPEDQLRLDNVKSGEKVRIRNNKRVKILLSNMGAISTEYMGAAVRSSGINAEALPVATGKTIQIARAHASGKECVPSHLVLGSALQFFWSEKYRKDELYLLFVPITTGPCRTGQYYIFYENLFRDLRLENVVVFILSADNSYNELGPGFAREMWKGLVLSDYLKDIQNALLTVAEDPVSAAVVFEKSWRKVMHTVEHKPKDLWKELENVARDVKKIPLKKKVADCPKVLVVGEIYVRRDDFAVGE

SEQ ID NO: 89288 - protein, 637 aa, Unknown
  Obtained from environmental sample
  misc_feature (1)..(637): Xaa is any amino acid
VANYLNRVVGNRTIGGKIFLQGGVAKNPAVPLAFAMLLDKKILVPPSPELMGCFGVALLAKRKNADGLLSEQAVVIDEIINREIGYERVFTCQACENRCPIQVLNVNNHKYMFGGRCNKYTNMRKQVKDVPVFDYVEKRQKMLFEEYAAPMSNEQKKEGKRKFVIGIPRAFSVHTLYPLYSWFFHELRIKTFLSTEVAHEGVARAESTYCFPAEIAHGAVQDCLDKKADYVFLPHFRDMPSYETDIHANFCPITQGLPYYIEKAFPDIDKNRWLPLVVSFKFGEGKALELFCEMTKRLGIDEAETKTAFTVAMSKQQAYFDAIHAMGKEALEEARKADRPVIATLGRPYNAFTPEANMGIPRKFTTRGYSIIPFDILPFHDEVIFPNMYWYYGQQDLKAANLLKKEDNIYLSFITNFSCAPDSFILHYVKWMMGQKPFLVLELDSHSADAGVDTRVEAFLDIIDGYRAKKNELEAERFDNGWRFISEKQASGKFDLRIDNVKTGEKVPIVGNKRVKLLLSNMGAISTEYMGAAVRSQGINAEALPVATAKTIQIARAHASGKECVPSHLVLGSALEFFFSKKYRKDELYLLFVPITTGPCRTGQYYVFYENLFRDLRLENGGGFHPFGGQFLHRAGG

SEQ ID NO: 89289 - protein, 102 aa, Unknown
  Obtained from environmental sample
  misc_feature (1)..(102): Xaa is any amino acid
DSRRYGEQEAGGKEILSSIEKLNELTGLVKSGSEEMSVEGNEIVQKTYQLETITRGIENDMNEISNSADKILSAINDVNKISVENQRASSELSGEVSKFKVD

SEQ ID NO: 89290 - protein, 150 aa, Unknown
  Obtained from environmental sample
  misc_feature (1)..(150): Xaa is any amino acid
MTNYYEREFETLPREILERLQLERLQTLLGYVYEKCDFYHKKLDESGIKPADIKSLSDLKKLPFTTKQDLRDNYPYGMFSASMNDIVRVHASSGTTGKLTVAGYTQNDIDIWSAVMARSLTAGGCSDSSIINVAYGYGLFSRWAWRTLWQ

SEQ ID NO: 89291 - protein, 89 aa, Unknown
  Obtained from environmental sample
  DOMAIN (14)...(75): Exonuclease VII small subunit
  misc_feature (1)..(89): Xaa is any amino acid
MAKKTTPAKEGGKKSFEERLERLEALGEKIRKTDIPLDEALKAFEEGIRLARGLEGELEKIENRIEILMNSADAPLSESPELELFDDGE

SEQ ID NO: 89292 - protein, 353 aa, Unknown
  Obtained from environmental sample
  misc_feature (1)..(353): Xaa is any amino acid
AGFSLIQAMEYGAQGWFPNGVHPVGAVYVDIDPSLADFNIHPAKREVRFRDPGAIHHAISGGVKNFFHSYFLRTSRKETQAEECSAQREGEFLFTNKNFETKHNQDGHDNFTNNNSAPSRLRVNSFANNSLRESSFENNNSPSRLTDNFIAEAHESEARRLRENSFASEPAVVYGDMRYAGRVFGLFIMIEWGDKLYIIDQHAAHERILYNRFLEEPVPKQELLAPIPFTTQSADEDAFLETKKEELSRLGVEIVKDGDGWSIEALPAGWKMGDAATVKEILELSVAGEDMAEQWAATVCCRAAIKDGDYPDDETAFSLGREALKLPEPRCPHGRPIWTEISKKALFRAVRRE

SEQ ID NO: 89293 - protein, 268 aa, Unknown
  Obtained from environmental sample
  misc_feature (1)..(268): Xaa is any amino acid
MKKFSTFEGVFLPTILTIFGLVIFMRATFVTGHAGIYQALGILIAAKSITTLTGLSISAIATNTEVKGGGVYYLISRSLGPEFGGAIALTIFISQSLSIPFYLIGFAEATVLTFPELDLYFDLIAYAIFAATAMLSLRGAAVVVKAQYVVMAILTLSILAFLTGAVIHFDLKTFAENAGPLEGSKYTFWLLFAIYFPAVTGILSGVNMSGDLKNPARSIPRGTLIAIGVAFLVYAAEIILCGGAVQRSDLTDRPYESLLHLWDPVTAF

SEQ ID NO: 89294 - protein, 498 aa, Unknown
  Obtained from environmental sample
  DOMAIN (343)...(381): WD40-like Beta Propeller Repeat
  misc_feature (1)..(498): Xaa is any amino acid
EPIPEKGDGADLDLSYDPSAIKSLLARGQAAAADLRVVVVHGTLEEMKHLAEELEGNLDVIIAGSLDQRFDTPIKVGNTLIVSAGAENKFAGCLFVKFSDVKKKIKKGKATATQAPVQTPVRRGRAARPKERFTAENTLFPVGQDITPDLSVERITKIVHAAIVVDRTDGPEIRTRVRGVVAHLSDRGAGPQAFLKAAQSKSELQLSDSALYCRRPLLSSSGSRAAFIFGKPERKNGKLRMVDLEMSSGKTVSTGKNVIDAIFAPDDNFLYYIEADSGSDMGAVRKTRMYMNDALTVLEPAAATRRGDLHISSDGTTLLFASKYKDGKWDIYALDTSGKVAPVRLTDGKADHRRPRISPDGKYVAYISNRTGFGGRMDLWVYDRAAMEHRQLTFNTDVQDFTWSDDSESAYFSAGANLLEICRVDMKYGLIKNMIPHPQGGVKTWSESAPRFMRYNDEPMIVYTRVYPDGKRRIYWFDINNARDVKMYAVGEFDEWEE

SEQ ID NO: 89295 - protein, 641 aa, Unknown
  Obtained from environmental sample
  DOMAIN (507)...(629): Transketolase, C-terminal domain
  misc_feature (1)..(641): Xaa is any amino acid
MIYMSRQVDVRFKELFRKGLVKGTVILISGHEAASVGMAMPFRPGLDAVSLLHRNLAAHFTLGCPIRTALCQFMANAHSPTHGKEGNVHFGDAFARRFPMISHLGGMLAVAVGGTWAARHAGEEAFGLAMIGDGGSSTGQFHEALNMASVFKTPVLFFVENNGYAFSTPVSRQYNCKKLSDRAAGYGITGKNVNGLDAFEVYEAVMDSMELMAKEPQPVLIEAATVRLEGHAVYDNAEYVPDDVKAANWDKDPLKSARAAVIEHCGIDDERLSSIETSLLAQLDEAIRGEISVARPSFGTVSMDVFAPVKYPTLKPYSAKNVRNTHAVNAAQEHILAENKNAFLCGQDVGKYGSPFKTCKGLIDKFGEGRVIDVPICEAGTVGFCLGASQTGARPIMEFQFADFSTEAVSQLGLNAGTWYFRSDKPAPLLFRLPNGAGVTLGAFHSGEFEGLWSRFPGLKLFYPATPQESYEALMVGFYDDNPCVVFEHKLLYWGRPADIEFDGDLSKVCRPRQYTEGADITVIAMGAMVDQALRAVEEGKYSAEVWNPFVLNPLCFGPIAESIRKTGRLLVVQESGATAGLGSHFISLAARECFGELRRAPELVSAPDTPVPFAKELETAFLPDSGRIAAVIEKMIGDIS

SEQ ID NO: 89296 - protein, 110 aa, Unknown
  Obtained from environmental sample
  misc_feature (1)..(110): Xaa is any amino acid
MGITRSTVWVGQKPPKEVIKRIKEIAKKPIHYTEDCPESTPEALAEFAAMARARRQRKVKPMVALRVEPEALEKYKSLGDGYTGIMADVLNYVAENPDILSMASGTKATR

SEQ ID NO: 89297 - protein, 294 aa, Unknown
  Obtained from environmental sample
  DOMAIN (9)...(261): haloacid dehalogenase-like hydrolase
  misc_feature (1)..(294): Xaa is any amino acid
MRTFDPKKIKALAIDLDGTILLPNTTLGERTLWCIKKLISKGMEIIIATGRAIEAAERFRVAMGAEGPMVYFNGAEVVDMPSGKILHTNLIGKDVVDFGTDIARSLGIHFQVYLPAGISPETGKRDIKQKWEALLTEKDGPDVQMYKRHTGIEPVIRDLKNLAALPDLEGCIKGMFIADPSIHDEIRQKFNERFGGRISVMRSFPTFLEIINKGVSKGEGLKIAMDCMGLKPEEVIAFGDEENDVPMAGTAGFFAVPENARVNIQEAADLVYGSNAEEGLAVYLENTFLYSVLF

SEQ ID NO: 89298 - protein, 648 aa, Unknown
  Obtained from environmental sample
  misc_feature (1)..(648): Xaa is any amino acid
VSLRSGSRRGLQERFDGSVGAVSVLFPWGGGEQGTPECGMAALLPSMDKQSRTASIMTFGYDPNLMSLDPYIGAKGSVLEALAKFACLGGDPFTARLSLQEYFRRPETPETWGTPAAALLGALEAQLRLGIPAIGGKDSMSGNYRDESNGIDIAVPPTLVAFAAGTVAANKVRSGALSGKSGNAVMLLSQSPQSLLNSQDEWELFKASMKTLAALSAQGALKAAYPVGPGGVAATLALMAFGNMTGVEAYAASFCRVDSENYQGSVLAEIDETALPSGWEANWVLAARTLTEPVFRIVGTRSTGELNEDENPEALVAETPLEVLRRAYEYPLAQVYPQTSTGATVAEPGDESMILKLPAFSGSAASSIEARKHIRLPLQGAPLVTLPVFPGTNCEWDMERAFREAGARTQLVIFRNRSRQDIAESLDELAAAFGEAEIIAFSGGFSAGDEPDGSGKFIANVLRSPIIAAAVSEFLEKRGGLMLGICNGFQAFIKTGLVPYGRIIPSIDEMKTAPTLTFNAIGRHVSRMVRTRVMPNISPWLSLEEPGSVHVIPVSHGEGRIAIRNEEAVSLFAAGQVPFCYANADGKATMAEPDNPNGSAFAIEGLTSPDGRILGKMAHSERCGDFVHINIPGNKRQKIFEAGVRYFR

SEQ ID NO: 89299 - protein, 345 aa, Unknown
  Obtained from environmental sample
  misc_feature (1)..(345): Xaa is any amino acid
MAGNANTGDMDPELAALLGTAGGGSAPLPDFNDIFGGQNKDDFADVSASSGGDVDITASEFPQITKKLEEKGHVFFNDPNYYKTALTNEGDIAQRVHNILQKYLTAKDPKDRGVFRQQFISPYWEFLGGIARKSANRLPPPKKYLLRFGILHPTFLNPETRDFFSKIVDDNSLEQPVLYTDEWLNSIGVGKMRPSSTDEVKIAKGNNQSKVQALLEKAQGKLDGSRVLLKTREKERDEIEKIIRDRITSVFERIPLHEMTDVSDCMSESQKAAINEIQNLLKQLLKNDHELELSIKDFVSAQADVDHLGDKLEAEGGSGAVTVDTGAVDAEFDTIRQMAKMTVGR

SEQ ID NO: 89300 - protein, 400 aa, Unknown
  Obtained from environmental sample
  DOMAIN (191)...(280): Cyclic nucleotide-binding domain
  misc_feature (1)..(400): Xaa is any amino acid
LSSKRKISLAALDPETGEEIRDLVSPGEFFGVKSALGHFPREENAIAVADSAAMMFTVPEFEAFAISNPKIIIKMLKVFSNQLRRVHTQIAKFKANETVKPDEGLFGIGVKYLKLKRYAHAKYIFSRYLAHYPSGAKAALAVKNLQTAEKAIANAVVKIQQKEKAKEHREAISSTSKHEMDQDTGGFSRFTRTFQSDEIIFSEHEPGDTFYVIQSGRVKLLKNDGESERTLDILQPPDMFGEMAILEGSPRSATAIAMDEVKALEFNAQNFEMLMTKNPQIGINLLRIFAKRIYDSKRRFMILALQNPQAKVADVFLMLDETTANIDRRTDTREFQTTIEDIAHWAGISVAEARDILHTFVVQNRLEMYSTRMVVKNINDFTRIVTYKRRQTKNPIGTKT

SEQ ID NO: 89301 - protein, 248 aa, Unknown
  Obtained from environmental sample
  misc_feature (1)..(248): Xaa is any amino acid
MPKKPKEITIRSSAAEYLTYIAATGDNPQSIEMRYEDENIWLTQKMMAVLYDVGVNTINYHLKQIFEDAELPEGTTIRKFRIVQTEGERTIERNIDHYNLQAIIAVGFKVYNERAVQFRKWANKIVKDYTIQGWAMDEERLKHGGTIITEDYFEKQLEKIREIRLSERRFYQKITDIYSTALDYDKTAKTTRDFFAEVQNKLHFAVHGNTAAELIYNRANADKQYMGLTTLYRRILTWLNAAQGRVYQ

SEQ ID NO: 89302 - protein, 80 aa, Unknown
  Obtained from environmental sample
  misc_feature (1)..(80): Xaa is any amino acid
MTMSDWAHHLDLILQADGNELLTNAGKISAQIAEDHALSEFEKYRVIQDKLFGSDYDRFIASLKKLEKKSIGKKKKESNG

SEQ ID NO: 89303 - protein, 292 aa, Unknown
  Obtained from environmental sample
  misc_feature (1)..(292): Xaa is any amino acid
IVMDDFHCIEDTSVIRFVEEYVLRIIPPETTVFLVSRSTPRINIAGLIYRDQIFNISENELRFTENELIQYFNGLNISFQPDSIREIMQDTGGWAFAISLIARSIHKAPAYGGYVRDAMKTNIFQLMETEIWDGISGRLQNFLVRLSLIDHLSVDLIAQLAGDDKGLIDDLEKQSAYVRRDSYVNAYLIHPLFLEFLCKKQESIPEEQKRETYAIAGAWCGRNGFRIDALAYYEKIGDYQSIVNNFSELPSQIPDDIARFIAPIFDRIPGEAFDKVEFLAEMHIRAYMCQGH

SEQ ID NO: 89304 - protein, 637 aa, Unknown
  Obtained from environmental sample
  DOMAIN (492)...(637): Anticodon-binding domain
  misc_feature (1)..(637): Xaa is any amino acid
VTLYERDLLYKGNYLVNWCPSCGTALADDEVDHEDTPGKMYHLRYYFANAGGDSARKTAINGEAPSCASGGAHAGACVELATTRPETLLGDTAVAVHPEDERYAGLKGKTLRLPLAGRDIPVVFDAYVDRAFGTGVVKITPAHDPNDWEVAKRHGLPLINILNPDGTLNNEVPEKYRGLSVKKARDAVLEDLKAGGWYIKEENITHAVGHCYRCHTIIEPFLSEQWFVRMRPLADKALASWRRGELIFYPRKWEHTYQHWLENIRDWCISRQLWWGHRIPAWDCKDCGKTSVSRNDLSSCPHCGSSNIEQDPDVLDTWFSSWLWPFSTLGWEGTGSRVQGLGSGEVPNPEPRTPNPSSDFDLYYPTTALITAYDIIFFWVSRMIMAGLEFTGKAPFRDIYIHGLVRDKQGRKMSKSLGNGLDPLEVVDEYGADALKFTLAFMCAQGQDILVDKESFKMGSKFANKIWNASRYILMNLEGLNLVQNPGLLPVDKWIYSQLNAAAKKMEEAFLSYRYNDAAQTAYEYFWNDFCDWYVEATKLSMKTGDGANAAEKDRAVTVLLDVLSESLRLLHPLLPFVTEEIYGKLPNTDGLLITAPYPRFSEGRRYPAEEKDFAFLQEFVRMIRTMRSECTITQEK

SEQ ID NO: 89305 - protein, 269 aa, Unknown
  Obtained from environmental sample
  DOMAIN (2)...(268): NAD-dependent DNA ligase adenylation domain
  misc_feature (1)..(269): Xaa is any amino acid
MKNNSKRIEYLERIIREYQESYYGGEAEISDGEFDLLWDELKALAPNSPVIHKVGDNADNTDGFPKAKHLIPMGSQEKAANPQEFMEWAQKQRLPEFLAQYKLDGASLELQYDKGVLARAVTRGDGITGDDITANARRMAGVPEKLDLPFSGGVRGEVIMPRETWRKKYPSKANCRNAANGIMRRKDGGGCEDLKVITYDSSTSSATSVNDEGYFQDEVKNIEWLAKPGFEIVVTKICKDADAVISYRGKVAKTRDSLPFDIDGLVIKD

SEQ ID NO: 89306 - protein, 61 aa, Unknown
  Obtained from environmental sample
  misc_feature (1)..(61): Xaa is any amino acid
MASDWSDYADWSLSVLTDTDRMVNEYEGFALPQSWRPLTSFEKKGLDKKHEIKELFFRRRI

SEQ ID NO: 89307 - protein, 423 aa, Unknown
  Obtained from environmental sample
  DOMAIN (243)...(420): Alanine racemase, N-terminal domain
  misc_feature (1)..(423): Xaa is any amino acid
LETSEIFFIVFVGDSGDMCGISAINIQADDNPSSFDVVYKGQTFPCSLPAIGRHNVTNALFALFCGVKLGIDITDAIDEIKRYTVSSMRTETAYVKGITIIKDYYNASPDSARAALEVLANYPSSGKKIALLGEIFELGDFSAQEHINLAKTCNEKKIDYVFFIGADFECFKKELKNGECFSGHERDVFSKSLKNYISGGNLTKGDVILIKGSRGMKMEEFYEPLKSYINAAMSDSTHLPPSATKLYVDINAVKFNYSQIKKEVGIQVEIMPMVKANAYGCGTDIIANVFRHSKYLAVADIKEAALIRRILPEADIVIIYQPSAADIEEIVSGGYTVSVSNLDFAKKLDEEAGKHQKKIKIHIEIDTGAGRLGLNVSECPEFAQSIKVLNNIITEGVFMHYTCADSFDKSDLEFQKNRRIVKK

SEQ ID NO: 89308 - protein, 476 aa, Unknown
  Obtained from environmental sample
  DOMAIN (413)...(470): Bacterial regulatory proteins, luxR family
  misc_feature (1)..(476): Xaa is any amino acid
MPIQIPLDVCRYAIPMFENAQPQEFFSVEFLAEMHVRTCVCQGHWQKSLELVKYYEEKFLGLPENNNIKRRTLARLYICWAYLRRLMGIMDDVIDFDIYLGKAAECVSTSVDPGHLRSHCPSVWVISIGSTRKGALEEFIDVANRAQKHLMKSNLRGFMSGEAELMQGVLEFYRGSMGTAETFTTLALKKAREYKQFGTVHRALFLSLRIAAAQGNFAQAEQALKETKTLLDETEYHNRFADYDLTLSWYSCFLGLPERTSGWLQEDFSSYSHAGFLENFWNQIKARFCYATRNFAPLLAYIEEMKTRESFLLERIEMLAMEACIHYKMKNRGKAFAALLAAYTDALSNKIVMPFIELGKDMRTLTSALLKTAEGNNIPQSWLEDINRKSASYAKRRAHLITEYMQMNRITDNHAITPRETDILGDLSHGLSRTEIASSRSLSINTVKMVVNSLYYKLGAENLADVIRIAAKRKMI

SEQ ID NO: 89309 - protein, 845 aa, Unknown
  Obtained from environmental sample
  DOMAIN (782)...(839): Bacterial regulatory proteins, luxR family
  misc_feature (1)..(845): Xaa is any amino acid
MESSFQTHDSTASFYFVRPRLNDLYREAVKYPLVVVCAGAGYGKTSSVHDFLREYAVTTIWIQLSERDNVGARFWENVTHSVSKLNKTLAESISKIGFPDTKEKLRHYKALINEYAVVEKRALVIDDFHCIEDEAVLRFMEEGFFKNMLPGSTIFLISRSLSHLNVAGLFYRDQIFNVSETDLRFTENELSRYFRRVGVSFQPDSLREIMQDTEGWAFAINLIARSSQKAPGYGGYVRNAMKQNIFRLLETEIWDGFPEQMKNFLVRLSLIDHLSVDLIMELAAGNKGLISGMEKQSAYIRLDSYINAYLIHPLFLEFLTTKQTLLTEEQKHETYKIAGNWCERNGFRIDALSYYEKIRDYQAIINMFFYLPLQVPLDFSRSAGAILDHALPEEFYKVEFFAEMHLRTYMCQGPLQKSLELVKYYESKFLELPDDNPIKKRTLAWLYISWTFISGLMSLTDDVYDAEIYLKKAAECVSTSVDPGKLSPHCPAVWIICVGSSRKGALEEYIDAISRGEKYLSHTNLRSFMAGKSELARGVLEFYRGDMGQAEIFAALALKKARENKQFGLVHRALFYSMRIAAAQGNFARAEQALKEAKAQLDEAEYLNRFMDYDISLSWFFCFLDMPEKTSEWLQEDFLWYSHAGFNENFWNFIKARFYFATRNFPPLLAHIGEMKARESFLYERIEMLVMEACIHYKMKDKEKSFAALLAAYTDALSNNIVMPFIEMGKDMRTLTSALLKESGNVIPKPWLEDINRKSASYAKRRTHVIAEYAQANRISDSPAITPRETDILSDLSHGLSRAEIASSRDLSINTVKMVINSLYFQLDAQNVADLIRIATNQKMI

SEQ ID NO: 89310 - protein, 389 aa, Unknown
  Obtained from environmental sample
  misc_feature (1)..(389): Xaa is any amino acid
SESTLYARWTPNSITVTFNASGGTAPSPANKAVTIGSNYDTLPTVSRTGYKFDGWFTAATGGTKVDGNTKVSNAANHTLYARWTGNSVTVTFHRNGGTSASIPAITTVYNSRVTLPTPPTRPDYTFESWNTKADGTGTGFNANTPVTANIEVHAKWKAIIKAVTIKFDAAGGTPVPASKTLNTGSPFQLPPVTKPGYTLSGWFTAPNGGSKIEPSSKVTDHCTLYARWTVKNIRVSFNAAGGTPAPPFRDIPFGSAYGALPNVSRDKFTFGGWLNSRGEQVGTGTTVTDPNNHTLSARWTAIPQAPATPPKPAPAPAAKCVITFHRNGAPCNAIPQITATCNSRISLPSPPTWPGHAFAGWNTNEKGSGSAFTGSVPNASTFAVWAMWK

SEQ ID NO: 89311 - protein, 444 aa, Unknown
  Obtained from environmental sample
  misc_feature (1)..(444): Xaa is any amino acid
GYALEYVPEALITEALCLVAVQQAGGALKFVPDAQKTEAVCLAAVQKDMNVLQNIPDALKTEAVCLAAVQQDGWMLEHVPEALKTEAVCLVAVKNGRYDTALRFVPEAHKTKALCLAAVKRNGYALEYVPYALITEALCLVAVKQAGGALKFVPDALKTEAVCIAAVQQDGWMLEHVPEALKTEALCLIAVQQYGGRLTDVPDALKTKAVCLAAVQQSGRTLEFVPEALKTEALCLIAVQESSGALEYVPDALKTEAVCLAVVQKDDWALEYVPDVFRTEAVCLVAVQKRRDAFEYVPEALKTEAVYLAAVQKNGWALKYIPDALKTEALCLAAVNKTGRALEYVPEALKTEALCLAAVKQRSDALEFVPEAHKTEAVYLAAVKRNGYALQHIPEAQKTEALCLEAVRQYGWVLEYVPEAQKTEAFCFAAVQQAGGALKLSPKR

SEQ ID NO: 89312 - protein, 415 aa, Unknown
  Obtained from environmental sample
  DOMAIN (19)...(312): Putative modulator of DNA gyrase
  misc_feature (1)..(415): Xaa is any amino acid
MNPSTPKKILDFCLEAGADFAEIYEEETRKSHLAFKDNAIEGASASIIYGIGIRMLYGTEVLYGFTSDDSEEVLMNIARNLSLSKNKRGEANFQFGKEDSYVSYIKDSFKDPRKFGQQYKKDFLFAANSAARIDSEILQVEASIADAEQNINIWNSEGLQVCDNRARTRFSVNATAGENSERASAHEGPGALGGFEFLDKLPVKELAKSCAERALRMLKAPYIKGGQMPVIMGNAFGGVIFHEACGHPLETESVRRQASPFCGKIGEQVAQSVLTAIDDGTLKGVWGSLEIDDEGTPTQKTILIENGILKNFLSDRVGAKELGLPLTGSARRESYKYAPVSRMRNTFIAPGNSTLQDMLATVDDGLYAAKMAGGSVNPATGEFNFAVEEGYEIKNGKLGDAVRGATLIGLGHEIL

SEQ ID NO: 89313 - protein, 478 aa, Unknown
  Obtained from environmental sample
  DOMAIN (72)...(105): Tetratricopeptide repeat
  misc_feature (1)..(478): Xaa is any amino acid
MGDYTQAERYYLEATAIFEKALGKGHPNYAQSLNNLGALYHSMGDYSKVERYYLEATAIREKVLGKEHPDYAVSLNNLGGLYYFMGDYAKAERYYLEATAIREKALGKEHPDYAGSLGNLYLIYLSKKEFTKAFLYKQEQIKINTGIVNKNFSFQTEQQRDTYWNANSSSFEGSYSLSFFYPFPASNILNYNNALFSKGLLLRTTNAVRDAIYTSGNQALINQFEELGSLRQQISALRQSGGNEEYIKTLEDKAEALDKSLMQSSAAFRELKADLAITWQKVRDNLQKNEAAIEFVSFRIYDKKLTDTVQYAALVLKKDSKAPVWVLLCNESELKEILDKAEGRSSEQQARILYNANGLALFETVWKPLEQELKGVTTIYYSPSGLFHKIAFNALPIDDSYNKRLMDKYNLNLVSSTSEVVHVSRNKKERTQITSAVLYGGLDYNADATAMRAAAQSFKTEAVASAAASAPPQGVTPG

SEQ ID NO: 89314 - protein, 408 aa, Unknown
  Obtained from environmental sample
  DOMAIN (1)...(387): RecF/RecN/SMC N terminal domain
  misc_feature (1)..(408): Xaa is any amino acid
MIEELSVRNFALIDSLNLSFEKGFTVLSGETGAGKSIIVGSLSFLFGAKADSEIIRSGSEEASVSAVIAVDGKNRDALQWLNQREIETEDSRLVIRRSVKASGRNSIYIQNVPVTRNDLAEFMGFLFDLHGQHTHESLLRKETHRVYLDRFSGLEDEAAAFGRVFTELAEKRKTLESLNRSEKERGQRLELLNYAIEEITKAAPKNGEIKELETETQRLADFEKLSLHVIAVSSSLFEDEVSLLSLGRRLRASLENATSIDSSLSPMLKRLEDIYYEAEDLAGEFRNYRDRLTYDPAKLEEAEERLALLYKLKKKYRPAGQQESGGADSDEGGILAYKAEAEAEIEALSGAGENQDKLKAEIGRLEKDIASKAAALSAKRSEGAKRLGDGIQGFFPAGKCPGGFCSRR

SEQ ID NO: 89315 - protein, 138 aa, Unknown
  Obtained from environmental sample
  misc_feature (1)..(138): Xaa is any amino acid
MASGENKASKKSSIGEFSSLIPYFRKYSLSYTVGFFCLIVVDAAQVIIPQFIGQAVDIASSGVFEIKKVIIPCAIMVGLMGIVSLGRFLWRFFIHGASRRIETELREKLFEYLLSLSYDYYQKNKIGDLIARATNDLN

SEQ ID NO: 89316 - protein, 403 aa, Unknown
  Obtained from environmental sample
  DOMAIN (109)...(324): 7TM diverse intracellular signalling
  misc_feature (1)..(403): Xaa is any amino acid
MDSVAMAFLDGNISVVPGFFFAGIGESWEVYFNGKLILSEMHLDGKGRIRERRTWNDVSFPVDGALVRSGTNILALRIMGDPTYRGTGLYYSSAPIYMDNYKNIESGRFDYLYTFLCGFFAFTGIYYLMLFFSVKKKTEVFNLYFGIFSILIGTYIVSLQALINLLIPNSDISKRLEFGSLMLAIPIFGMFLEALGRGKTTRVSRSYLAFSFFLCLTQILFCAQYGEEVIRIWDIITMIYVTYLLVYEVIYFHLWNRQKGKFLGSDTGEARFLPIGNILVGMVICYLCGLFDTLYILIYGDSMSLFPYSVFVVYVGMVFVLSRRFSGMYKQLEQSNVVLETTVKERTLELEEQTAIAVQASRAKSEFLATMSHEIRTPLNAVIGLSEIELQGYQAGFQANRLP

SEQ ID NO: 89317 - protein, 487 aa, Unknown
  Obtained from environmental sample
  misc_feature (1)..(487): Xaa is any amino acid
LGVLFALANKLVQFQELSSLTGKIEATLGAKGILDPAHPEKISVNGNVNLQNIVAQTPMIPDAVSVNGAVKFSNTEISVEPAVQIGKSDVKVKASVKDYLAMVMPRLAAGKKTNVNINVSSANLELDRLLPPSDATKPPPPDEVPMEIYPELPDIVANVNVNLANTVFRYLTLSDFSLGINFANSKANVTSKGRLYAGGFNTNVAVDLSNRKSANVKLALNVDKVEANDFISNGRKNISGESEIAKQIQNLDNTVFGKLSMKLDVSTKGLPQNFVDNLTGPVSVQITNGSLKGSKILGSVGEGLSKFEIAGKKVLNSPVDGKGDMSFDDLKAEFEAKNGQLLVKNFDINAKSLGLLAFTGAVGFNGDLKLNLQNTLNPSISSNLNNMTKASPISLYQKDSKGNALLFFNIGGTFADPKVTLDASKNTNPLNDLKDMATAKLNEAKDKAVAKLNEEKAKLEAKKKELEDKAKAEADRVKAEADAKKKE

SEQ ID NO: 89318 - protein, 428 aa, Unknown
  Obtained from environmental sample
  DOMAIN (187)...(252): His Kinase A (phosphoacceptor) domain
  misc_feature (1)..(428): Xaa is any amino acid
MSDHLIRYVLMNCIIIFGCIILGVFVVLNLSLKQYFTAAVCCGMIVMGMAAFILARTKVKQIVTATLLMIFYALLCVLITWTGESDGANFLFIYVYPSLTIMLLGMSYGITMSVILGVIISLEMFIPGVARFNYYFNLSIRMLVTYGLVFFVMVVIESTRKTKDRLIEKQKHRLQELKGEAEAANRTKSNFLASMSHEIRTPMNAITGMAELLLRGDLSDESRGYAQDIKQAGNNLISIINDILDFSKIEAGKLEIIPVNYLLSSLVNDSVNIIRMRIGEKPLRFFTNIDGNIPNSLIGDEVRLRQIILNLLSNAVKYSEKGHIGLSITAQKSEAGQVWLKITVTDTGKGIKPEDQEKLFGDFVQVDMKKNRGIEGTGLGLAITRRLCLIMGGDITVESEYGKGSTFTVIIPQGIGSPEPFAAVEDAA

SEQ ID NO: 89319 - protein, 74 aa, Unknown
  Obtained from environmental sample
  misc_feature (1)..(74): Xaa is any amino acid
GRRQTHRPLVDRIIGQQQTVIKKLGEGVGKIDGVSGGAIMPDGKVSLIIDVAETVKLAMRSGSTIEDPEAVAAQ

SEQ ID NO: 89320 - protein, 328 aa, Unknown
  Obtained from environmental sample
  misc_feature (1)..(328): Xaa is any amino acid
MIVIKTTTEKIESKGGLYLAGTIAKKMGITGITSGVLPNAASVISSLFAGMIQGHTGFESVKTGCNDNFYSDSFGLAFNYSADTVRLYLDRLADEDRLGIIRQLRRTTVNLIEKARLTGIRIRKKTYFPVDIDTSPMDNSKTKKEGVSYTYKKFEGYHPIFAYIGREGYMIDNELRPGSQHCQEGTPEFLRLLLERLPDNLRGLPLLFRLDSGNDSIDTIKAIFNDANAKNRFLILKRNVRREKGEDWLKYAQEHGKANQAKAGKIVWTGHAYDINPDGFNKIHCVYEITERTIDEHGNPLLIHDIEANTWWTNLSYAAETIIGLYRD

SEQ ID NO: 89321 - protein, 698 aa, Unknown
  Obtained from environmental sample
  misc_feature (1)..(698): Xaa is any amino acid
MKMDYFPVASRGIAIERALSINGEVPFLGADRLSFQRVWGDSGSSRFDNQGNEIRASQIEKPRWESAWFMDSLGYITEPYSFYLRQGANTIRLTGVNEPVVIRSLEIKAPVQTQSYRDYISSINLDKFKNSRSNYSLKIQGEKAVRRSDPSLYPIYDRSSGATEPPSVARIRLNMIGGQSWRVAGQWIEWEFEVPENGLYRISIKGRQNYNRGFVSNRSVMINGELPVKELAAVPFNYSNKWNLSTLGNKSENFYFPLEAGTNTLRVQATLGGMGEMLNVMEESVFRLNSIYRKILVLTGLEPDIYRDYRVDVVYPEVITAMEHESRILYKLVDDLTRYSGERSAQAAVALTLARQLELFVRRPDKIPRTLVNFKTNISSLGDSLLALSQSQLDIDYIVVSASGAKLPKVNENFFVAASHEIRSFFASFFVDYNNLGDFHRKGSDVVNVWILAGRDQSTILKAMIDDTFTPLTGIKVNVKLVAADAVMPAVVAGTGPDMALTVPQGDPVNYAIRKAAVDISKFPDYEEAVKDLSESVIVPFTFQGGVYGLPETQYFHVMFYRKDIFEELKLPIPDTWDELINILPVIQKNNMNVGVPSVATSIQANIDFSNFLAHLFQRDGRMYNEDNSRTLLSDEIAIEAFDVYTKFFTHYKTPVVYDFVNRFRTGEMPLAFADYTNFNTLEVFAPELRGLWGFSRM

SEQ ID NO: 89322 - protein, 327 aa, Unknown
  Obtained from environmental sample
  misc_feature (1)..(327): Xaa is any amino acid
MLKRLEDIYYEAEDLAAEFRNYRGRLTYDPAKLEEAEERLALLYKLKKKYRPAENADASGQDEGGIFAYKSEAEAEIEALSGAGENQDKLRGEINRLERDLSAKAAVLSAKRNEGAKRLGEGITGILSRLGMPKAVFAANVKPKAREGGAGLVCGPWGSDEVEFMISANKGEPLKELARIASGGELSRVMLAIKTVLCEKEAKNAGAESLIFDEVDTGIGGEVALSVGEYLSRIGTSPTDKSPTDNRKQIFCVTHLASIAVRADNHLKVEKKVVGERTVTEVSLLKGLARRQEIARMLAGDSGEAALAHADELLAKYSGVKDGENYK

SEQ ID NO: 89323 - protein, 341 aa, Unknown
  Obtained from environmental sample
  DOMAIN (5)...(142): Semialdehyde dehydrogenase, NAD binding domain
  misc_feature (1)..(341): Xaa is any amino acid
MEKIPVGILGATGMVGQQYISLLNDHPWFEVLYVAASPRSAGKKYSEAIAGRWQLTKTYAPHVGAIMVEDANDVSRAAAAFKKGECSFVFSALEMGKDETRALEESYAAAGLPVISNASAHRWTEDVPVLVAEVNHHHADIIPAQRKKRGWDKGFIAVKPNCSIQSYTTALYALIRAGYEIRRLIVSTLQAVSGAGYPGVPSLDMIDNIVPYIGGEEEKSELEPLKILGSVEGGVFKNAVLPKISAHCNRVPVTDGHTACVSLEFGENKPSINEVKKIWADFTSLPQELNFPMAPVRPIIVREENDRPQPRKDRDAEKAMAVTIGRVRPCKVFDLRFVGLS

SEQ ID NO: 89324 - protein, 291 aa, Unknown
  Obtained from environmental sample
  misc_feature (1)..(291): Xaa is any amino acid
GNPQSRLEAYGLTVSSLQQMLAAQNMQVSAGTIIENGLSYILTTMGEYSSLDEIRNTVISYKGGGVSGGQVELPRQIFLRDIANVYEGYRDETSTVYVNGQPAVTLDVQKQSGKNSVQTAKDLRDRLTRITREIPPDIKITELYNTTDQIENSISQVGSTAISGAVLAVLILFLFLRSFKPTLIIGISIPVSIIITVMLMYFAKLTLNLMTLAGLVLGVGMLVDNSIVILENIYHYREKGAKLKTASVLGTHEMIVAITASTLTTICVFAPLVMFQGLLKMAGELFSGLAF

SEQ ID NO: 89325 - protein, 298 aa, Unknown
  Obtained from environmental sample
  misc_feature (1)..(298): Xaa is any amino acid
MRAKQVLFFLISVLALFAVTSCESIPERGAGSKSSVSQSPPEWINSPYSKYDSQRYVAATGSGKNSEEAKRSALANLVKYFGQTIQADQKIFTTYSEVVKRGATANWTESTVLEENINTYATNTLIGAGVPEIWPDGRNTWYAVAVMDKAKTEKIYTDLIRANQAMIGNLINMNQKEKTTIEGFSRYRFAAVTADINVTFANVLKVIGSPVPAGLKNSDEYWLEAANIARSIPVRVVVEKKADADRAGSIQNAFSRALSEIGFITTSDNALYTLEVNLRLTEADYPNRQSEFIRNEMT

SEQ ID NO: 89326 - protein, 300 aa, Unknown
  Obtained from environmental sample
  misc_feature (1)..(300): Xaa is any amino acid
LPALFDEKNNGQGRGGADNVLSRGGGSCGGKTGVYQSIACGRGDNQEQRGEKKQDCELVAGKRWLEAHAAEYAWLKPTLLGDDLYSNRPFCEKIVGEGWSFIFTCKEESHQWLMEEVTNSFMHEVKEEKWDSKKKKRVTYTWKYLNGVPIRYDERDPFMVNYFSLEIRAEGAKKPSYFNSWITNKTITDKNVAYLAECGRARWKIENEHHNVLKNRGYNLEHNFGHGSNHAADIFFLLNILSLQFHTILEYCDVEYQMTYSIFPVRVAFFEALRVLIRRRYFSSWPEFLQYVRGKDDGPL

SEQ ID NO: 89327 - protein, 201 aa, Unknown
  Obtained from environmental sample
  misc_feature (1)..(201): Xaa is any amino acid
MGKVMTVLSAAAIELTGCGSGTFTDSRDGQTYKTVKMPDGKVWMAQNLNYKPESGNSWCYNDDKSMGEKYGRLYDWNTAKTVCPKGWKLSSREDWDKLVATAGGKEMASKRLKSKSGWKNLDDGSSGNGTDDYGFSAMSGGYRNFNGTFHDVGYNGSWWTATEGSDANAYLRYMHYSSDYVHEGYGDENGGFSVRCVADNP

SEQ ID NO: 89328 - protein, 439 aa, Unknown
  Obtained from environmental sample
  misc_feature (1)..(439): Xaa is any amino acid
MAENLNYKAPSNSWCGEDKESNCDKYGRLYDWDAAKAVCPVGWHLSTAEEWDRLLTAVGGKKGGRMGDDWIGASKKLRAKSGWIKIEDDDYKEVSGNGTDDYGFAALPGGERYGSGKYEEPGKPDSRGYWWIAKENNGSSAYRREILNYDLVFDGTSFKESGYSVRCVSDDGYIVKAGERGAFSFTVTAGSGGTATATPRKDIYAGGERVTLTAVPDDGYVFAGWTGAHVTDSVSLITSAVMRSDMAVAANFRRIDYGTLADKRDGRTYRTVNIGGKTWMAENLNYEPEPSAGKSSCLGGRNGNCAKYGRLYDFRTATEVCPSGWHLPSLNDWDELAICVGGLDVAGRKLKAAKGWVGESGYRGTGTDDYGFSALPGGGEPNSFENDDIFGAWWTTTKMYDVAPINARITLYKDELSGLAAEKSDMCSVRCVMDEKVER

SEQ ID NO: 89329 - protein, 255 aa, Unknown
  Obtained from environmental sample
  misc_feature (1)..(255): Xaa is any amino acid
MKHVFVFDPKAFFGQQWKMDGILDHIGQFFRTQDKPDFTIHMSRYRRNAIGIIGEEAEKAKPGDVIRIYAVGGEEILFDCVNAAAHFPNMQVAAVPHGESNDFLNIFGDGKEESFRDIPSLVLAEALDTDLIRWGVNYVLNSCYIGLKSAMAAKVRALKSSMSKGSFYLFSKISNFFNYMFMAFNKELTSQNYIITVDDVDYSGKYSLIHVANGPYYAGKKTGLFDATPNDGLLDIALIRSGGALKTLFSLRKYS

SEQ ID NO: 89330 - protein, 336 aa, Unknown
  Obtained from environmental sample
  DOMAIN (282)...(315): Tetratricopeptide repeat
  misc_feature (1)..(336): Xaa is any amino acid
MYIEDDWSDLPELLERVQEFLELGLIDDARDLLDKYRTVFQDYWEYHYLYSRVYAEQNMPRKAVSCLIAGLRLERDNVDCLLGLFYAFAMMNMVRRGGHFLLEAHRLHPDNEPVYSTLIWYYTEINEPEKAVACFERAKALNSENPDTYRNGGLAFDRLGRFEEAAACYKAALQISPNFEEARDLYADHLIFTGKTDKAVALFEEALRASPKNVRYMSKLIYCLSQCGDFNKAEALAKHAIALYPNSATGYLDLAYVNLNTGRINEALENADRAISVAPIDAEGYRVKAIACSERGDHEAAEALFEKAVALDPGNADAMRDYYQHLRTARKHEQMI

SEQ ID NO: 89331 - protein, 297 aa, Unknown
  Obtained from environmental sample
  DOMAIN (113)...(272): ATPase family associated with various cellular activities (AAA)
  misc_feature (1)..(297): Xaa is any amino acid
ARWFKTYLKLIENEAKKLVPTYNGNTNLFTYDTTAGFAPQHENLLRIIDSGKVQVHNAYPKVLRLYEQFLKRKSHTPPTHTKESYGRENFLDDVFMVEEDYDSLIGLLDRKKNLILQGAPGVGKTFIAKRLAYALIGEKTSERVRFVQFHQSYGYEDFVMGYRPDGSDFKLQYGAFYTFCKKAAADPDKGWYFIIDEINRGNISKIFGELLMLIESDKRNNDYAVHLQGTEEPFCVPDNVYIIGMMNTADRSIALIDYALRRRFAFYTIEPAFKNELFLDYLEEKNSKNLCDVIGQI

SEQ ID NO: 89332 - protein, 213 aa, Unknown
  Obtained from environmental sample
  misc_feature (1)..(213): Xaa is any amino acid
MNFIKNKIVILIPFIGILSVILYFLHVILGEIFYEGYNPLAQAVSDLTASNSPSKNIARPFSAFYGLFSVTFSIGFFVYLKNKTNKAVTASSFIFCIMNTISFFGYTFFPLSEPGYAGAFQDKMHMIVTVSVVLLTIASLVLFSIGFLRAKEHKWLGIISICTLLILMTGAMLINILPKEYFGVAERINVYSIILYTGVLSLWMKKNIKNNGV

SEQ ID NO: 89333 - protein, 395 aa, Unknown
  Obtained from environmental sample
  misc_feature (1)..(395): Xaa is any amino acid
MNKKPHIFIILLLFFISSSLFAKGENLTLKVAVMGPGDELYFWWGHIALVIEDSNTGTSRFFDYGLFSFDNENFFYNFAFGRLLYCCGVSSTNRNIEIYEETNRDIVFYTLNIPPENRVKVRDYAQMNVLPENRDYYYHHFKDNCSTRIRDIIDLATDGQFKELYGNAPGRYTFRQHVRRHTWFMPPADWILNFWMGQVIDTPTTIWEEMFLPSEVGKRIDDFWYTGANGEMQKLVTSAETVYKSHGRPIVLDVPRKQWPRELAFSLVLSVIFGFFFFLQKKNFRAGKILAGISMSLAGFVFGVAGLLLYFMNLFTNHDYTFQNYNMLFGTPLLLAAVPLGICYAFTKMRDKLILYDALLRLVWLLAALGIFISMAIKLLPQFYQQNLTDQMLML

SEQ ID NO: 89334 - protein, 263 aa, Unknown
  Obtained from environmental sample
  DOMAIN (84)...(249): GGDEF domain
  misc_feature (1)..(263): Xaa is any amino acid
MFINPPQFNLCLTLGAIIVFTISTIYVKSPYFNPDVKSPDNWILDLINTFLTGVITLYFTWYIGKLRLGLELSTTMLEDERDSYFDQSIIDELTQLKNRRDFQQTFRRYLTNYRTSDNWLCVAIIDIDFFKFYNDHYGHPGGDECLRAVGRVLNSLKDSHDVYAARVGGEEFALLWFETEVSHVDIIVSHLQEQIKKLKIRHEKSKVSPYLTISIGVFIQQCGSSADTQTVYDMADKALYNAKEGGRNCAVIFGNTIEQYKLK

SEQ ID NO: 89335 - protein, 73 aa, Unknown
  Obtained from environmental sample
  misc_feature (1)..(73): Xaa is any amino acid
LIQAHRGASTCHPENTLEAFSTAIKQGADGIELDVHLSKDGEIVVAHDARLERVSNGTGYINDHTLEELKAMD

SEQ ID NO: 89336 - protein, 273 aa, Unknown
  Obtained from environmental sample
  misc_feature (1)..(273): Xaa is any amino acid
MIGDVVGDPGMEALERRLPALIRENSADFVVVNGENAAGGFGLTADFLERIITAGADLVTSGNHVWEKREFWPTLESEERVLRPLNYPEGSLGLKTAGKGWVKLEKLSPWGPITWLTVNLQGREFMKAIDCPFMVFDVFEYEINNPDPNADELPVENPIILVDFHAESTREKESLAYYLDGRVSLIAGTHTHIQTADERLLPKGSAYITDLGMTGTLDGIIGMDTKICLDRARNQVLYRMEVAGASQEGRTAVQGIIAEIDAESRKALSIRRL

SEQ ID NO: 89337 - protein, 282 aa, Unknown
  Obtained from environmental sample
  misc_feature (1)..(282): Xaa is any amino acid
AATAMLNLTFAPSADILAPLTKDRILGAWRDPFDPPTVVVPNPAVGKWLSVRLAEDPSVGCVANARMLTLERFLWDALGADPDMALIDAEHLSQIICALLDEGTLGDDLYKPLSDYLYVDGNLTSGVNRSIDPIKRVQLSAHIARQFLEYEYNRPSVWSEEAARWGRHGIDAKWLLGKGYFEGREHEDWQMDLYRRARERLSKSVPPRYTTLPHLYRRKREECAKEKRPWCDVGSNHQIILFGVSKISHFHRNTLVEISQSDGIDMHVLLTNPCAEFWEDVD

SEQ ID NO: 89338 - protein, 330 aa, Unknown
  Obtained from environmental sample
  DOMAIN (61)...(243): D-isomer specific 2-hydroxyacid dehydrogenase, NAD binding domain
  misc_feature (1)..(330): Xaa is any amino acid
VCAALDSLGVQVFAWHGATAQEYHDHQVKALEFCPDIIIDDGSDLVTLLHDEKPEYAKNLLGGCEETTTGIHRLRARSEAGKLKFPMFAVNDAKCKYLFDNYHGTGQTAWEAILYATNNMLSGRTVVIAGYGHCSSGIAARAKGLGANVIITEIDPFKALKALMDGFRVMPMMEAAKLGDVFVTATSCNKVITTEHFMVMKNNVLLANAGHFDVEVDKAALEKLCVKKERRKPFIDGYRLPNGKVLNLLAEGRLVNIVAGNGHPADIMDLSFGIQLLGVLHVAKNAKQLKPMLYNIPQEIDDEICRIKLEALGINIDAHTAEQLAYLKHM

SEQ ID NO: 89339 - protein, 60 aa, Unknown
  Obtained from environmental sample
  misc_feature (1)..(60): Xaa is any amino acid
MEKLFKRPILIVGIIALITVFLGLQLPRAELDNNNIRFLPNKNPAKLISEYIDETFGGQV

SEQ ID NO: 89340 - protein, 529 aa, Unknown
  Obtained from environmental sample
  misc_feature (1)..(529): Xaa is any amino acid
GNKPQTIKDAANPSAIGGNIVKGGLYNDGTSRAMVRSGFIDPRGNSTALAPKNGVYYKETGWSDSQLINGTEPPASSLKVEGDAVPATGNDKVSGKVILRGFAWDDQLIDEIRISIGGGAASTILKLTNGKMAAYSAGLRTIDGKPVTSDNPLVPVAFAEETLHWKTGHSVEWAYIWDTTLTHPAPSTTPVQIQVSVKDLKGSNNTGLNSASITVAEETTNPAASKKFHNTVSVDVVPYITGFERSAKFETKRSLQGWYSFYRGETDIKVKGYNFGTTAATITIGGENMTNTGTETARQRTFNIPDLTSVKSGEILMTTSVAAYNNNSSTTGKSWNREFSAYTPGSDLWINHHYAHIWRSNAAPGDGSISDAGAGTYFAAAGTSEGLDSPGMSLQYTGTYAGRLHGVWTNYSRESLFYAQNHNVKGSASGVQVTNNANVNITESSAASRVTYGEGNFGRDGALLLVKSGEPYSAGDIDYFNGGTDLNSYLNNTSVVAAYQRDGEPWLTLKPRTSSIVFNNADSNPRDGG

SEQ ID NO: 89341 - protein, 690 aa, Unknown
  Obtained from environmental sample
  DOMAIN (606)...(685): Transglycosylase SLT domain
  misc_feature (1)..(690): Xaa is any amino acid
LFDKLLVNKINLVNITIIKRIRTLSSPFAPLRSLRPLRPLRENLGIKCALAPARASLLILLVICISSCQAQQLRHSSADFYEGLKKNQAEAKTEAAAFFEKALDSPNIHIVSAAALELMSLNYSGTAIQPEIISKIRKKAPAMLASKASGSWAMALDALGTGSRGDNVPVGDPGPDRKKILALALNNESRSPDEAIQYLLLELRASNSDNIIIFSNAENAAIAGRIAVSRSRYREALIFFRMVIEEAPDLFFQYPELLSDLGRSFQYTASGREGIDLFLQWEKKFDEKKINADGNLAKLIRFRLLFYAARIARQRGLLENIELFERAMRWALFLPPEIKGEQVDACVWYILSSSLARDSGRTIRYLENYIQNWQDDGYYSDVVDKLVRGLLLKRQWADLIHIFTLVKNRPGVIGAKFAWIIGRAIQAELLPPKEMELARAALGGEFTGETQAGYPLDSLAEAYIRIAYNNALLSDGKALYYRSLSAAALGEPFLMLPTATPLPEPEAKPVATKPAGERSDPAIIEFLLGFFKNGTAKFAPRYIRMMESDLSPEDLLRLAEALGNGGAPNCAGQYQESMRLASIAVRRASEPEKRYLELIYPRPFAEQVSQYARETGIGEAKLFGLIRSESAFNPDAISRSGAIGLTQLMPATAEEMAARILRRGGPDYTRRSDKDTAATGGAAIASDKFQ

SEQ ID NO: 89342 - protein, 493 aa, Unknown
  Obtained from environmental sample
  misc_feature (1)..(493): Xaa is any amino acid
MALSKEQEEWLGSIGSEPENVDEVPKELLTEEFCIAAVRQDGLALEYVPEELKTEAVCLAAVQEHGWALEYVPEALKTEAVCLAAVQQDCWALKFVPEAQKTDAMCLAAVQKNSQVLQYVPDAQKTEAMCLAAVQKDSQVLQYVPDTQKTEAMCLAAVQQNGRVLECVPEARKTEAVCLAAVQKEGHVLEYVPEARKTEAVCLAAVQKSGFALQFVPEARKTEAVCLAAVQKEGYALQYVPDAQKTVAMCLAAVQQDGNALRYVPDTLKTEALCIEAMRHSRSSFNNFGHMGPSYYTHPLQLVPEELKTEAVCFAAVLKDCRALKFVPESLKTEAFYIAVMQQDGCALEYVPEDQKTEAMCLTAVQQNGYRLDCVPEALKTEAVCIAAVRQFSYAIQYVPKDKIDAVKAAQYFMSGSGGSGYGIGLIGNIRAVISSGSGISGYGIELISGKDTASSKEQAEEFLFELVRKDGSMLQFFPEEWKTEAICLAAVQ

SEQ ID NO: 89343 - protein, 55 aa, Unknown
  Obtained from environmental sample
  DOMAIN (5)...(35): Flagella basal body rod protein
  misc_feature (1)..(55): Xaa is any amino acid
MLRSLNSGVSGLLNHQVRMDSVGNNIANVNTTGYKARRTTFSESFSQLVKGASRS

SEQ ID NO: 89344 - protein, 154 aa, Unknown
  Obtained from environmental sample
  misc_feature (1)..(154): Xaa is any amino acid
MQIGLGVAVGSVDMIMGQGNLQNTGRLLDIGIEGNAFFGVSDGVGTYYTRCGAFQLDAQGYIVLPTNGMVLQGKMADSMGNFPPGTAIGNLQIPLNQQSPARATTEVTLARNLNMDGDAKGSVTYTQRLLHAADGERSYGANGLNDNGRGKHDT

SEQ ID NO: 89345 - protein, 226 aa, Unknown
  Obtained from environmental sample
  DOMAIN (15)...(224): Binding-protein-dependent transport system inner membrane component
  misc_feature (1)..(226): Xaa is any amino acid
MLATIQRMISWIPSLLNGAKITISLTILAVSAGLVLSLFIALGKMSSNVIVNKLCSAYVFFFRGTPLLMQLYFIYYALPSVSRLFLIQTGQAGVDRFIYAFIAFTMNSAAYCAEIIRAAIQSIDKGQFEASRALGLSYGQTMRLVVIPQSIRRLIPPVGNEFIMMLKDASLVSMIALVDITKATRNIEGSTRSALVYIPAMILYLIITAVFSFFFHKLEKKYSLYE

SEQ ID NO: 89346 - protein, 160 aa, Unknown
  Obtained from environmental sample
  DOMAIN (22)...(80): Hemerythrin HHE cation binding domain
  misc_feature (1)..(160): Xaa is any amino acid
MPVNTSPQNQNHVTWSESYSMGIKVIDDQHKGLLDFVNDLFSHSTGNEKEEMEYFKKVIQQAVKYIKEHFSTEEKLMLATKFPGYAEHKKIHDEFTLTVVNSVKDFEGGKRLVLEKFAYFLKDWVLSHVAVMDKQYALYFKKIATRNEDGKLTISSANIA

SEQ ID NO: 89347 - protein, 95 aa, Unknown
  Obtained from environmental sample
  DOMAIN (5)...(95): Ribosomal protein L23
  misc_feature (1)..(95): Xaa is any amino acid
MIPYEDILIEPVLSEKANLMREQGKYVFKVSQSANKIQIKEAVRRIFNVHPVSCTVMVVGGKPKRLRNRAGYTATWKKAIVRLPKDEKIGVFEGV

SEQ ID NO: 89348 - protein, 276 aa, Unknown
  Obtained from environmental sample
  DOMAIN (43)...(119): Ribosomal Proteins L2, RNA binding domain
  misc_feature (1)..(276): Xaa is any amino acid
MGIKSYKPITPGMRQWTSLDFSDLTSGKKPEKKLTSGKPANAGRDSNGRISVRHKGGGHKRRYREIDFKRDKTGIPGKVASIEYDPNRSANIALIFYKDGEKRYIIAPKGLVVGNTIVSGPNAPIETGNALPLENIPLGFTICNIELTLGKGAQMARSAGAGALIVAKEGDYVTVKLPSGEVRMVFKKCYATIGSIGNEDHMNTSLGKAGRKRWLGVRPTVRGMAMNPVDHPHGGGEGRSKGIHPVTPWGQPTKGYKTRKKHKPSSRFIVSRGKKK

SEQ ID NO: 89349 - protein, 282 aa, Unknown
  Obtained from environmental sample
  DOMAIN (159)...(271): Response regulator receiver domain
  misc_feature (1)..(282): Xaa is any amino acid
MMHFLIKNKNVAFDIDMKGNIPRYLYGDNARLRQILLNILSNSAKFTEKGYVRLSVSVSDNDICFTVTDTGMGIKKEDIIDLFDAFKQADTVMNRDYKGTGLGLTITKALVEMMNGKIEVESVLGQGTKVRVKIPKVMGDEAQVQRYISTKKLLCSSDTNILAVDDNAINLNVICGLLRQCGATVFAAASGKEAIEMLSMDQYNLIFMDHMMPEMDGIETTKKIREMKVNTPVIALTANAVTNAREMLLASGMDDYLSKPIVKEQLYEVLAKWVPDSKYIDT

SEQ ID NO: 89350 - protein, 854 aa, Unknown
  Obtained from environmental sample
  misc_feature (1)..(854): Xaa is any amino acid
DIPGGDGTPPLDMPAGGAVSALDDFLKDINSGSSEPAATAPDDSGVDDFLNSFQNDAAPEKTSAPSDDSSADDFLSSFQNDVTPDETTAPGDFGADDFSSLMGDSQDEAAPADTGADDFSSLMGGTQDESPSLENEGAIPDDLLSGFSDEMESAPTDSGLPDFSKEDFNADAGQDDTEDLGAIDLGGESQDGTLSSSTGPDTGFDADDSSLDSTAFDTAAFDTGATDNQSADTSDLNEGFDLGGESADFTPKTADDDFSSDTLPDIDFPGGDDSGFNTDLSGGDDSGQDAGFDSTLPDIDFSSADSTAGTDATAGDSGAVHDYGDLGADFSSDSVELDTSDGGSELAAQEQHDMGFSSEAFGDDSFSLSGLDDILNKSKASEPKPPPPKKGFFGRKKPIIEEEKKEEENIDEISLSQENVDSLLHTLSSYPLNLKVICEELIAEQVLLPEQLSKLIRLLVNGASVKETAALAEQITGKPIVIPRSFEKSTGADFEAEQSSFAYIFVHNLLPVIRLFAFIIAMAGSIIYLSYKFIYIPIKAESLYKRGYERIPAGEYQRANELFHDAFVKHRKKKWFYAYAEAFRDQRRYMLAENKYDELLRYYPRDKKGVLDYAALNTYYLMNYEKANKLLQRELLDYAPDDFEGLLAAGDNFLDWADSNPAKFYDRYEDARFSYARLIEKYGWLPPVIERMLKYFIRTDNLKETLQLRAWFENDPKQRKLSTPTLAELGGYLLDKQLIKKPGVPDPYIESIESVRDMLLQAVMEDQYLPEPHYHLARYYHSLGNTHEERLTLENAIRAFDLAKQESVKRRLYRVDTHYRYANLLINNKEFFPADEQAVRGIELFEDFYHRNLI

SEQ ID NO: 89351 - protein, 232 aa, Unknown
  Obtained from environmental sample
  DOMAIN (1)...(232): TatD related DNase
  misc_feature (1)..(232): Xaa is any amino acid
MQYFDTHAHLGLIVDDPIEQLIVIQEARQASVNRIVSICNSLHDFGHVYENLKSAANVYHAVGVSPSEVQNPGKDWLQHIEQSVQYERVVAIGEIGLDYYRKFGDKKSQIELFITQLDLAAKLGKPVIIHNRDAGHDVLDILRDRLPPKGGVLHCYSEDAAYAEKALELNLYFSFAGNLTYKNAKNLHETLSVLPVDRILIESESPFMVPADYRGKRNMPKYMPLTARFMAN

SEQ ID NO: 89352 - protein, 92 aa, Unknown
  Obtained from environmental sample
  misc_feature (1)..(92): Xaa is any amino acid
ARQTGNREYRSKAMVLYAESSRAWDAITRNPETMTRSRMTESSGAPSINLGYLNANNALRPTSGYRPQIFVRIDKDALEPSRWEELAPLGGL

SEQ ID NO: 89353 - protein, 377 aa, Unknown
  Obtained from environmental sample
  DOMAIN (98)...(375): Domain of unknown function (DUF323)
  misc_feature (1)..(377): Xaa is any amino acid
MFSTSPGTTAADGDNGRNSPFAEAFLKYMDSDEILPVMAGLVTRETMRLTGGKQRPYQNGSIVSELYYSLSSGASAPAPAPAPAREPPVGNPPSVAVPSPVMAAIPAGNFYMGSPVIELDRDPLGETRHRVNMSAFYIASKELSVGEFRRFAEDSNYVTTAEADGGAFAYDDAKGESGFRADVTWRNPGFRQGDDHPVVCVSWFDAVQYCNWLSVKEGLKPAYTITGQTVNWDRSANGYRLPTDAEWEYACRAGTSTPFFTGERISTSQANYNGNFPYGIGNKGLFRKITVSSGSFPPNAWGIYDMHGNVWEWCWDYYNLPNAGPVSDPIGPASGAHRINRGGGWTSPGKSLRSALRSSDLPETAGSSLGFRIAQNK

SEQ ID NO: 89354 - protein, 282 aa, Unknown
  Obtained from environmental sample
  DOMAIN (1)...(281): LytB protein
  misc_feature (1)..(282): Xaa is any amino acid
MGVRRAVEIAERASLDAGRTGLYTLGPLIHNSGVLENLKKRGVICLDENEIQSLPADSTVIIRAHGVSPAIERELLKKGIRILDATCPRVKQSQSKARSFVESGYRLFIAGEENHGEIAGLKGYAEDGCRKGISSAVKPCFVLGNAEEALAAAEELCRREPEAKTALIAQTTIRADEYRIIGDTIQRFFKSLEIVNSICMATVDRQKALRELENTDAIIVAGSRESANTQRLLSLAKEMGKPAWLVEAVSDIPPEIAAYETVGLSAGASTPDELIAEIEEVL

SEQ ID NO: 89355 - protein, 232 aa, Unknown
  Obtained from environmental sample
  DOMAIN (32)...(218): Protein export membrane protein
  misc_feature (1)..(232): Xaa is any amino acid
VLDDRVKSIATIRSAIRESVQLEGFGVDEANNIALMLRTAALPVELEVINQQSIGASMGEDTIRQGFFALLGGVIAVLVFMVFYYKASGINAVIAQILNFYIMFSVLSAFNFTLTLPSIAGFILTIGMAVDASVIIFERMKEELRDGKGRRAAIDAGFDKAFWAIMDSNITTFIAALFLSQLGSGPIKGFAVALAIGIFSSVFTALFVSRLIFDFGTDVFGSKKLSVSWRIK

SEQ ID NO: 89356 - protein, 49 aa, Unknown
  Obtained from environmental sample
  misc_feature (1)..(49): Xaa is any amino acid
ISKYVTISVGMASVVPDENNSQTQLLDEADKALYDAKHSGRNRAVINLQ

SEQ ID NO: 89357 - protein, 416 aa, Unknown
  Obtained from environmental sample
  DOMAIN (121)...(380): BadF/BadG/BcrA/BcrD ATPase family
  misc_feature (1)..(416): Xaa is any amino acid
VLSLSDVMAVKVIDFLKRAKVTSGRVVLTGGITLNRHIIRFIREKAPEIEFIIPETAPVFEALGAAVLATTSGSPLPPVEKLLKPNEIRFAPLGALRDWIPKVRTFDKLGGKVISGRKYILGVDGGSTTTKACLVDMETDEIVASHYGRTHGDPVKALKECLAIIQDKVVADTGNKAIDIRLVSTTGSSREILGVFLETPGVYNEIIAHSVGTTYFDSGVETIFEIGGQDAKYVLLKNGVPIDYAMNEACSAGTGSFLEESAAGDLSIHSAKDIGPIALNADAPLKFGEHCSAFINSDIRKAVQQGASRENITAGIVCSIVANYLNRVVGNRTIGGKIFLQGGVAKNPAVPLAFAMLLDKEILVPPSPELMGCFGVALLSKRKHLDGLLEERPGGNRRSAKPRDRLRTGLHLPGMR

SEQ ID NO: 89358 - protein, 341 aa, Unknown
  Obtained from environmental sample
  DOMAIN (60)...(338): Periplasmic binding proteins and sugar binding domain of the LacI family
  misc_feature (1)..(341): Xaa is any amino acid
MVTIKEIARLAKVSTATVSNVLNGKSGAASEAKAREITEMARSLHYTPNTLAKSLQRQRTNTIGIITEDLTVFNAPEIVDGIDACCEENGYETILENMRLFKRYNNDFTDTPKHHELLDSMLRNMIAKQVEGIVYVGYHCREIAYLPSRVQVPFVYAYCYPKEEIYPSVMYDDEKAARDVTKLLIAKGHSRIGVICGPASSYHTQARLKGHYAALLEHGVAPDQQLVVYGDWERPSGYHLAAFLLDQKVSAIFSFNDLMASGVYERASERRLQIGKDISLFGFDNRDISQGYIPALSTVEPPLNEIGRRSAGIIFNQIKNHKTGKKRVYLPCTILERNSAV

SEQ ID NO: 89359 - protein, 266 aa, Unknown
  Obtained from environmental sample
  misc_feature (1)..(266): Xaa is any amino acid
LRKKFSYIVLAAALIMPAVVSCSFLGKQKLYIYNWTYYTPDSIIQKFESEFNTRIIYDEFASNEDMFAKLKSSRSKRGSYDIVFPSKDFVPIMIRQNMLEKIDSTKIPNLKNIDPDLLKRANYDPNMEYSVPYFYGAAGIIVNTAKVPVYENSWSIFARQDLRGRMTMLDDMREVFGGALAYLGYSVNTVEPARVTAAINIINNSWKPNLVKFDSEAFAKGYANGDFWVVHAFPEAVFEEIENNEQLLKDTVFFIPREGGPSYIDS

SEQ ID NO: 89360 - protein, 502 aa, Unknown
  Obtained from environmental sample
  DOMAIN (233)...(422): Adenylate and Guanylate cyclase catalytic domain
  misc_feature (1)..(502): Xaa is any amino acid
AFEHSGAADTLWLAARENFLNSCEELLNGNYEETILADVGDDKETADFVREVFSACRDQFNRMTVIRKEAYVLKDSFCVIGSDATSMTDNGLITFQENYPNVGTYAVAANMMLSNEFITDTPRFVPAIIALIYSLLLGFLLSRFDTRLSIITGISGLLLLTGAFAVFFMISKIYIGFAVPLSATALTFIMMITVKFLTASREKAFLHNAFSRYLAPEVITELINDPDKLNLGGEKREMTAIFTDIQGFSTISEKLDPVRLVQLLNRYLTAMSNIIMENLGTIDKYEGDAIIAFFGAPVFRENHPSLACRSALAMKAAEEELNKTVLEEKLSPSPIFTRIGINTGDMVVGNMGAENKMDYTIMGNAVNLAARLEGVNKQYHTGGILISEYTRNKLGDEFLLRRLDRVRVVGIHTPLRLYELLANNSEQITNNNEQIKTVKEMIEKWEMAIDLYEKKQFKEAAKIFTSIKQQNPNDKVAELYAERCVKYETNPPPENWDAVNNL

SEQ ID NO: 89361 - protein, 264 aa, Unknown
  Obtained from environmental sample
  DOMAIN (4)...(125): 1-deoxy-D-xylulose 5-phosphate reductoisomerase
  misc_feature (1)..(264): Xaa is any amino acid
VKKAAVLGATGSIGKSSLDVLRGGDFQPVLFTAHTDRDGLLKLKDEFPHTLLALSGEETAFPPHLGIEYSGRQGLLDSIANCNADIIINGITGAAGLEPSIAAIAALNTGALFCLANKETMVMAGPLVLALAKEKKVKIIPVDSEHTAIFFLIEAHGRENIEEIILTASGGPFRNYPLERLAKVTPQEALEHPTWNMGPKITVDSATLANKGLEVIEAARLFDFPREKIRVLIHPQSIVHSMVRVKDGAVYAQLSKPDMRHPIH

SEQ ID NO: 89362 - protein, 285 aa, Unknown
  Obtained from environmental sample
  DOMAIN (5)...(282): Cytidylyltransferase family
  misc_feature (1)..(285): Xaa is any amino acid
MKKTLQRLLIFFVGIPVLITLVVLLPGYNHLCLNLLTVLVSSLGAMEFQNILKQKKFFIPPPEAAILGGLIPALATAVVSLNFSKLGIAMIFMLGISWFFLSRILSSKEEQELFINRIAAGFSIIIYPGLFLSWLIPMALLPKPDMSIVLYFLIVFLNDSAAWAAGMLFGKGNRGIIPASPNKSIVGFVTGILASVATGVLGVHFFPGAFNSPLFSPLAAGALLGFCTGFAATVGDLGESVLKRSAEVKDSGVIIPGRGGILDSIDSLALAAPVFYLAFRFLFVS

SEQ ID NO: 89363 - protein, 227 aa, Unknown
  Obtained from environmental sample
  DOMAIN (1)...(221): Putative undecaprenyl diphosphate synthase
  misc_feature (1)..(227): Xaa is any amino acid
MDGNGRWAAKRGKIRTQGHLEGLNAAKRIVKAASGLGVSYLTLYTFSTENWKRSTEETGFIMALVKQYLRGELNFYRENSIRIRHAGSREGLPQDILRELDWACEETRGFSGLQVILALNYGGRDEIVRAIKRMVRNEALGPDSVSGLTEDSVSKYMDNPDVPDPDLIIRTAGEFRISNFLLWEGAYSEYYISDKLWPDWEAGDLLRAINDYGSRNRRFGGLGEKVQ

SEQ ID NO: 89364 - protein, 60 aa, Unknown
  Obtained from environmental sample
  misc_feature (1)..(60): Xaa is any amino acid
VAMRNIRRDGNDELKKLLKDGKLTEDEESKVSEELQKLTDGYIVKVNQTLEKKEKEIMEV

SEQ ID NO: 89365 - protein, 342 aa, Unknown
  Obtained from environmental sample
  DOMAIN (10)...(64): HTH domain
  misc_feature (1)..(342): Xaa is any amino acid
MREKKDSLSSKARLLLLLREKQGTPVSGSVLAKDLGFSRVAVWKTVQYLLEAGYSIETGEAGYSLDPKKEKDFLYPWEFGEKENLFFYYKNTGSTMDRARESAVRGAESGSVFTAEKQSAGRGRNGRTWVSRQGGLFFTVLERPRLTIADYTQLSLMMQIAVVRSLSSICGKKAFLRWPNDIYIDHRKIAGLSTEVCGEGDLITWLSGGIGVNVNNPVPTGRAASCTEITKRQVSRREVLIKILDKFDKIKKTFVSTAAYSQGNRPLASEWNSLADCIGAKAAVFEPLPARASDDDDSAYKRGKILAHGVFQGIDPAGRCIIKTDDSTLFFNHGSASLAFLS

SEQ ID NO: 89366 - protein, 289 aa, Unknown
  Obtained from environmental sample
  misc_feature (1)..(289): Xaa is any amino acid
VKSEKKIWLIEQFAHKIWTVSLSLAQEATRAGQHGKGYAVVAHEARILADKLFEYTAEVKFEGADDAMLKGIVDFVVELKFLSVNAAIEIQRVADISMDFNIPKSMAVFAEELRRIASGLNELIGKSVWQKSFTMPELASPSGSDARDCFFFYSISSYPLIENMKNIEELCYPRKADIEENTLFLRGLKIPIINCFRYFNLPCTSFDADRQTVVIISPEGKIYGGVNEIYAVPIDDLDINAIFYSRIGCAVPPKKGQVFSDFARECWDVSGGDQVIFADWKKLIKAMHI

SEQ ID NO: 89367 - protein, 362 aa, Unknown
  Obtained from environmental sample
  DOMAIN (175)...(312): HD domain
  misc_feature (1)..(362): Xaa is any amino acid
LPDMPSPALQTVLVVDDVDINVMMLEEILKDDYNVLTANNGKQALETLSLAKVLPKIILLDVQMPEMTGKEMFEILKADEAFKRIPVIFITAANDSESELLAAGAVDFINKPFTPEIVKLRVRNQISLKNYSDSLEEMVAQKTAEVIKKTEEANKTLDNALQGLANVIEHRDLESGEHVKRTQLYVGTLADYLIKSRSPYADALIEMQPDIIVKSMALHDVGKIAIPDRILLKPGKLDPEEYEIMKTHTTRGKEIIGEFGDVNTSIYLKHCEDICFGHHERWDGKGYPRQLKEDEIPLTARLAAVADVYDALVCSRVYKDPIPYDKAVDIMASGKGTQFDPILTDVMLQIQDQFKEISQEYK

SEQ ID NO: 89368 - protein, 419 aa, Unknown
  Obtained from environmental sample
  DOMAIN (146)...(270): CBS domain pair
  misc_feature (1)..(419): Xaa is any amino acid
NAIVDKKAFLDSIEHYRKQNYGIAIDDVGSGYSGLNVINDIKPDIIKLDMNLIRNIDKDETKQFLCKAMIDFGKNAEIKIIAEGIETEEELQMLIKLGVDFGQGYFLGIPRKSFEDIAPEKICIIEKYHSKKYVEKFKNSIYPSIGYLSRKGYCLSPNEKSEDVYEMLRLNPTITEFTIVEHEVAVGFMTRLALNELFSGRYGYSLYSKKRILELVNNNFLKVNHNMPIDYVSRIAMQRPFERLYNPIVVEQEGKYLGIVTIKDLLDSITRIEIDMAIHSNPLTGLPGNILIEKEITSRIFGSNPYCITYYDLDNFKAYNDAYGFQNGDIMLALVADILKSLATKNEFVGHIGGDDFIVICDYDEGEEFCQAVINEFSSKIKSLYREEDVKNGYIMSKNRHGVPENFPLASLSIARCFQ

SEQ ID NO: 89369 - protein, 506 aa, Unknown
  Obtained from environmental sample
  misc_feature (1)..(506): Xaa is any amino acid
MIEYSKQISERWGLPHDLADLLCAAYERGDSPYYLAEYNPYLANATDIAAIREAYAFLADMEEISVKRKRVANAYKKVGKLTPALEKRINIVSDTHVLDDILIPLRPNPKSKGQLAAKKGIDDLADLIAAQTEEKQPIEAMAEAYIGKDPSLKSAADVVQAAKDLLAERFAYDDTVRAMAREFMRDDGFFEIIPKNRKDERFGRYADKLIPVNEFTNEELLTLFAAEDEKTIKFKLNVQLFRMTELFRQHFITNPDSTSFYCICEIIDDMWQRLLQPSIEQDVKEGIREQAESWAKKEIESGLSKRFADEQAAPTVFVVDMSAKKDYIVVAVSASGSLLGATTEKKPGDGRTFLTERLRQFFNRHRPARILCKEGAAEIPENFIKQANDCLTNLVEVTKVKAAPANCDPCASEYMKQREFAILDSRTKALYGLAISFLQPVSLITRLGLSFYTVHPLQKTLRPGKFTEAVDSVVEYAQLLAGTSIKDVADSPIAKFRCVTKDLLAA

SEQ ID NO: 89370 - protein, 428 aa, Unknown
  Obtained from environmental sample
  DOMAIN (1)...(425): V-type ATPase 116kDa subunit family
  misc_feature (1)..(428): Xaa is any amino acid
VNAQLYDITLASYEKNAPDVPHIVLSTDKKNNFVRLLAFDSIPNERPYVLPERPLSLVVERNKIRKAEMAKIEAELTALSPLIKQIEDKKKSLLADIEFETASIGMEHIENDVAASDVSISWISGYAPAPDIGLLKRAASENGWAFCAADPAEDDVEVPTKLKNNKFVELLYPLTGFLEMSPGYREVDVSGWFLLFFTLFFGMIFGDAAYGTILCLISIICVLKTSKKGTPLVFKFMLLMSISNIIWGVLTCAWFGFDVSAVPQVLQNISLPLIVNTSGEAGWLAAYNANNYWIRSGLVAAYDSVDAMGKGITTNLMLFCFSVALAQLGVAHIKGIFKYIKSPKVMAEFGQLGMLVGMYFVVLSLVVFNTGFGGVKTWQFGCLVGGFALNFVFGNYEGSVIKSFLTSCANILTNVLGITNVFLRHHVL

SEQ ID NO: 89371 - protein, 188 aa, Unknown
  Obtained from environmental sample
  misc_feature (1)..(188): Xaa is any amino acid
LTLPLTLTEVRGFSPRTIYERARLRALSSKNEFDFKDFKDFDFYSKQCIFYPHTALKGDPMLRPMILDCLKGYNRKQLLTDLTAGLIVGILTIPLSIAFAIASGVSPEKGLVTAFIGGFVLSLLGGSRVQICGPTGAFVIILFGIVQKYGVDGLATATLMAGIILAVMGVSGLGSVIKFIPYPVTVGF

SEQ ID NO: 89372 - protein, 171 aa, Unknown
  Obtained from environmental sample
  misc_feature (1)..(171): Xaa is any amino acid
MENVNRNHKNSVFSSLFSTPDVLRELYSAIEGIPIPPDIPIDINTLSNVLFMKQINDVSFLLDKRLVVLIEHQSTINENLPYRLLEYVTHIYERITDREKKYQKNLVRIPRPEFIVLYNGTDDYPDYKELKLSDAFMDIEGLKMAGNDKIPLELVVQVYNINQGHNPEILK

SEQ ID NO: 89373 - protein, 170 aa, Unknown
  Obtained from environmental sample
  misc_feature (1)..(170): Xaa is any amino acid
VKDILLTTINAKWIHPSLALRLLKANLGALEDRCEILEFALRQPLCEKVQPILAAAQHVANLRILGVSVSIWNHTATLELLRELEKFWAGQKPVIVLGGPEVSHLPQEAEIFRYANFVIRGEGEDAFRMLCEKIIADGHEHGETSQQAAAQQAASQQAAAQQAAARLKNF

SEQ ID NO: 89374 - protein, 399 aa, Unknown
  Obtained from environmental sample
  DOMAIN (172)...(396): Alpha amylase, catalytic domain
  misc_feature (1)..(399): Xaa is any amino acid
ASRHIVAENGKALPLGAELVGDGVNFAVFSRNASAITLILFESADPGSKWIEIPLDKRGNKTGNIWHCFIKGLKAGTCYLYRADGPYYPEKGLRFNKNKTLIDPYAKALTDISGWDYGKCAGYDFEKPGHDLTYSYVDNIDSQPRSIVIDDKFDWQGDTPVNYPLRFSVIYEAHVKGLTAHHSSKVKHPGTYRGVIEKIPYLKDLGITSIEFLPVQEFNEKEILRFNPDTGERLSNFWGYSTASFFAPKGSYASDKTPGGQVKEFKEMVRELHKAGIEVILDIVFNHTAEGNEMGPTISFRGLDNSIYYILNENRRYYQNYSGCGNTMNCNHPVVRTFIMDCLRYWVMEMHVDGFRFDLGSILGRDQQGRIMENPPMLERIAEDPILSSTKIIAEAWDA

SEQ ID NO: 89375 - protein, 378 aa, Unknown
  Obtained from environmental sample
  DOMAIN (86)...(170): Surface antigen variable number repeat
  misc_feature (1)..(378): Xaa is any amino acid
LRSSPLVDKIEFSGNKKIKKKELEEKKLLRFYAPLSDAQLHNSKQTILDMYAEKGYLLAEVNAQVIPTSVPGNAIVKYDIKEGPRVRIKSIVFHGNHDVTTRWLSRRFKTKENRWWRSGDFNYDLYRSHLDTLVMQYNDRGLLDAAIERDTVWFSEDKRDIFIDITINEGRKYFAGDIAFSGNNIIDSDTLASNVALTKGRPFRKSQFDITRYMLETAYRERGYLWVRVEDRRSYRGENADTVDLLFEITEGRPAIVRKIDIRGNSKTWEKVIRREIALMPGQRYRQSLMAASQQNIMRLNYFQSAMPDILPNDDGTIDLIFDITEKDNIGQLSVGAAYSDQDKLTGTFSTAIPNFRGAGQELKLDVQYGSYRRLGMI

SEQ ID NO: 89376 - protein, 196 aa, Unknown
  Obtained from environmental sample
  DOMAIN (4)...(196): Peptidase C26
  misc_feature (1)..(196): Xaa is any amino acid
MEQPIIGVIPLWDEKKDSIWMLPGYMQGLEEAGAVPVILNLTISETALKRSACSFDGFLFTGGHDVNPELYGQKKTDYCEEICGIRDQMEAYIFREAVLNQNKPALGICRGIQLFNVLLGGSLYQDIPAEFSGAVNHVKGPPYDIPAHNVRLLPESPLRKLTGKECLEVNSYHHQGINKLAEGLEIMALAERWSVE

SEQ ID NO: 89377 - protein, 613 aa, Unknown
  Obtained from environmental sample
  DOMAIN (1)...(237): Iron only hydrogenase large subunit, C-terminal domain
  misc_feature (1)..(613): Xaa is any amino acid
MIAVAAPAVASFFPNQFLNLNGWLHSLGIEAFFDVSLGAELTVITYLDYIKEKAPRTVISQPCPALVTYIEIHHPKLIPYLAPADSPILHTIKMIREYYPQYNNHKIAVISPCIAKRREYDETGLGDYNVTMIALKNFMDDKRINLSSFPKVEYTGVSAERAAGFPIPGGLLDTAERFMPGIRRNTLKIEGVHSIYPYLKEIENLLHTTTELPLLIDCLNCEKGCIGGPGTGNAHQPLAMLENPVRKRMIELERKQKPQPGKNAYKKYHNILKKYWKKGLYNRRYLDLSGNNTIKHPSKSEITEIFHSMKKYEKEDIYNCTCCGYGSCEAMATAIFNKLNKPENCAHYILALLTEKTNTEELNRQLQERIAQASTLIDGINKLINKLNAAISSQAETIAQSSTATEKMIDSLRETSEISRNKQVAIKGLIEDTALSQTSMRETILSIEGISKSVEGISQAIKIISAIAANTNLLSMNAAIESAHAGEAGRGFSVVAGEIRKLSESTRENSVNISKTLKSIIDGVVVTEKKSDDTGTRITAMAKEIDSFAETMSGIINTFSELSAQSGEITNALDDLQSQSEMVKSDYAEILSMTEKLSKAMLNLTMLSNKNSS

SEQ ID NO: 89378 - protein, 659 aa, Unknown
  Obtained from environmental sample
  DOMAIN (8)...(31): 4Fe-4S binding domain
  misc_feature (1)..(659): Xaa is any amino acid
MNGSAEKLQINHNICIGCGNCINACTHKARTLIDDTGRFMDDLKQGKRIIAVAAPAVASFFSDKFLNLNGWLKSLGVQAFFDVSLGAELTVMSYIDYIKEKNPRMVISQPCPAIVTFIEINYPELLPYLAPADSPILHIIKLIKEFYPEYKDHKVAVISPCIAKRREYDETGLGDYNVTMLALKNLLDKQKIDLSSFPKVEYMGVSAERAAGFPIPGGLLDTAERFEPGIRRSTLKIEGVHAIYPYLKELHELLDTRVKLPLLVDCLNCEKGCIGGPGTGNDNKPLALLEDPVRKRMTELEKKQNSSIGKNAYKKYHNVLKKYWKKNLYNRSYVDLSNNNMIKHPNESEMTEIFHNMKKFKKEDIYNCTCCGYGSCEAMATAIYNDLNKAENCAHYILALLLEKTDSEENNRLQLQEHIGRATGLIDGINHLITKLNAAISTQAETIAESTVATEKMITSLKDTSEMSRKKQESIKGLIEDATKGQESMRSTIKSVEDISQSMDGIAQAIKIISAIAANTNLLSMNAAIESAHAGEAGRGFAVVAGEIRRLSDSTRENSDNISITLKNIVNGITITSKQSGETDSRIIQMSKEINGFAQTMSSFINTFNELSAKSADITDSLESLKEQSSAVKTSYAQMIEMTQKLTTAMKELSDLSKG

SEQ ID NO: 89379 - protein, 279 aa, Unknown
  Obtained from environmental sample
  DOMAIN (249)...(279): Sel1 repeat
  misc_feature (1)..(279): Xaa is any amino acid
ARRSQDEKTAEQWYRKAAQGLPKLAEQGDGIAQYNLGNLYRRGMIVAKDEKKAAEWFSKAAAGLPKLAEQGNADAQYKLGLMYNTGRGVAKDEKKAAEWYRKAAEQGRADAQFNLGLMHYKGEGVAKDEKQAAEWIRKAAEQGHADAQKLLGMMDAAGEDPKQAAGRIRKAAEQGDAKAQMRLGVMYYKGEGVAKDEKQAVEWFRKAAEQGQAKAQYLLGTMYADGEGVAKDEKQAAEWYRKAAEQGDAAAQFNLGLMHYKGEGVAKDEKQTAEWFRKA

SEQ ID NO: 89380 - protein, 83 aa, Unknown
  Obtained from environmental sample
  DOMAIN (1)...(83): RelB antitoxin
  misc_feature (1)..(83): Xaa is any amino acid
MANLQIRIDERLRDQAQAVAQGMGLDLTAAVRLFLTQMVRENGLPFQPKSDPFYSAKNQAHLAQVAKDLDNGVQCSARSLIEE

SEQ ID NO: 89381 - protein, 389 aa, Unknown
  Obtained from environmental sample
  DOMAIN (159)...(358): Glutamine amidotransferases class-II
  misc_feature (1)..(389): Xaa is any amino acid
MQCEGQAQAHSGSPHSGSVRLDSPPVRLNEGLVRIPSGCAISGIINKSGRRMSGEAIIKSISVMHDRSNGLGGGFAAYGIYPEYKDYYALHLFYESVSARKECEEFLEGHFDIINLSKIPTRKIKEITDEPLIWRYFVTPLPTKLSESQLDEREFTAKCVFKVNTKIEGAYVFSSGKNMGVFKAVGFPEDVGRFYKLEEYEGWCFTSHGRYPTNTPGWWGGAHPFALLDYSVVHNGEISSYDTNRRAIEMYGYKCTLQTDTEVITYIIDYLHRKQKLNFDEIASVIAASFWQTIEKQTPKEREIHEYLRVMFSAQLVTGPFSILVGFEGGLMALNDRLKLRSMVVGEKDDLVYIASEEAAIRIIQPDLDNVWAPRGGQPVIVSVNRGKM

SEQ ID NO: 89382 - protein, 90 aa, Unknown
  Obtained from environmental sample
  DOMAIN (1)...(71): DnaJ C terminal region
  misc_feature (1)..(90): Xaa is any amino acid
ATLGAEIQVTTLDGKTIKIKVPAATQNGKMLRIRDEGVPSGGHRGNLYIKFIVHIPEKLSRRGKELLEELARTEGQNDNPGPIPLSQLGQ

SEQ ID NO: 89383 - protein, 339 aa, Unknown
  Obtained from environmental sample
  misc_feature (1)..(339): Xaa is any amino acid
WQQLKFSDGDYFFVPKNFEFKYEYEKGFSVNELFTIKSSGVKTHDDANLVDFLPFDEHNQQYTYRPFDIRYINYDLKKVKRHRNDVMKHFLNSENVGICLMRSLIDMTDFKSVFICKNMMDINFYRFQSFIFPLYLYPESDNLLAGAHRNHNLNQAIITELSKRTSLRFTVEEEEDSKIFAPINLLDYIYAVLHSPTYREKYKEFLKIDFPRIPYPENVAQFRALSKLGGKLRGLHLLDGVEPQEGTADYPVPGNDEVEKIQYDEADRKVFINKKQYFRNVPPEAWEFYIGGYQPAQKWLKDRKGRVLSYDDTLHYRRIIMVLLKTIEIMEEINDVSNI

SEQ ID NO: 89384 - protein, 422 aa, Unknown
  Obtained from environmental sample
  DOMAIN (210)...(394): ABC transporter
  misc_feature (1)..(422): Xaa is any amino acid
MYKVDPHLATVTVIGLPLLAIFIWTIKPAQRRAWQAVSNKGSNINAYIQESIDGVRVTQAFDRQKINLEIMNELANERNRVWMKAIYISNTVWFSTESISQLVWSFVYIMGVFWMNPMASFGMLLVMGNYAWRFWQPIINLANIYNTFITAMAYLDRIFDTIAEPITIQDVPNAVEFPFVRGHVEFKDVSFSYDGNRKVLNNVSFNGHPGESIAIVGPTGAGKTTIVNLLSRFYNIEEGQVLIDGQDIMKVTLHSLRSQMGIMLQDNFLFTGTIADNIRYGKLDAADEEIRAAASLIGANHFIEKLPDGYNTQITERGSGISAGERQLLAFTRTLISNPRILILDEATSSIDTGTEQLVQQGIQTLMKGRTSFIIAHRLSTIRNCTQIMFVSDGQIIESGTHEELMAKRGRYYELCLAQYQQ

SEQ ID NO: 89385 - protein, 476 aa, Unknown
  Obtained from environmental sample
  DOMAIN (256)...(324): PET112 family, C terminal region
  misc_feature (1)..(476): Xaa is any amino acid
MEYEMVIGLEVHAQLLTKTKLFCGCTTPFGDPPNSHGCPVCLGLPGALPALNRAAVEMAVRMGLALGCGINTKSIFARKHYFYPDLPKGYQISQLDIPICVSGTLPIVVDGRESSIRVNRVHMEEDAGKLVHDQDVDSLFDANRCGSPLIEIVSEPDMRSPQEAYAYLMGLKQILEYLGVCDCNMEEGSLRCDANISLRPKGESKLGTKTEIKNMNSFRNLEKALDYEARRQEEVLRSGGHVVQQTFLWNPSENRSVPMRTKEDADDYRYFPDPDLMPLVVGDDLVDNMRKSLPELPAPRRRRFESGYKVTPYAAEVLTGSRPLADYFERCVSNCNDAKSAANWVMTDIMRMMNDAKIESPFELKTKPERLGELIKLINNGGVSAKAAKRVLDLMESEDKEPGAVIKEQGLEQVSDTSALEAVVKSVVDAYPAEVQRYKDGDKKLSSFFMGQVMKASKGAANPKEAMAILDRLILG

SEQ ID NO: 89386 - protein, 476 aa, Unknown
  Obtained from environmental sample
  DOMAIN (256)...(324): PET112 family, C terminal region
  misc_feature (1)..(476): Xaa is any amino acid
MEYEMVIGLEVHAQLLTKTKLFCGCTTPFGDPSNTHGCPVCAGHPGALPALNRAAVEMAVRMGLSLGCAVNTKSIFARKHYFYPDLPKGYQISQLDIPICVSGTLPIVVDGRESSIRVNRVHMEEDAGKLVHDQDADSLFDVNRCGSPLIEIVSEPDMRSPQEAYAYLMGLKQILEYLGVCDCNMEEGSLRCDANISLRPKGESKLGTKTEIKNMNSFRNLEKALDYEARRQEEALRSGGRVIQQTFLWNPNENRSVPMRTKEDADDYRYFPDPDLMPLVVEAAWVDSVRETLPELPAPRRRRFESTYKITPYAAEVLTNSRPLADYFERCVSNCDDAKSAANWVMTDVMRMMNDAKIENPFELKTKPERLGELIKQINSGGVSAKAAKRVLDLMESEDKEPGTVIREQGLEQVSDTSALEAVVKGVVDAHPAEVQRYKGGDKKLASFFMGQVMKASKGAANPKEAMTILDKLILG

SEQ ID NO: 89387 - protein, 204 aa, Unknown
  Obtained from environmental sample
  DOMAIN (30)...(181): Thiamine pyrophosphate enzyme, C-terminal TPP binding domain
  misc_feature (1)..(204): Xaa is any amino acid
LRSPRTPFTPRFIIEETAKALGPETIAVTDVGQHQMWAAQFFPAEKPRSFISSGGLGTMGFGLGAACGVKVANPKRPVVLFTGDGSFRMNCAEMATLSNNKIPILIIVFNNGVLGMVRQWQSFFYEKRYSQTTLGAFPDFLKLCEAYGIKGFRAENRESFKKALHAAGEELSAGRAALIEADIDRDENVLPMVPSGKPIDEQIL

SEQ ID NO: 89388 - protein, 260 aa, Unknown
  Obtained from environmental sample
  DOMAIN (13)...(168): DEAD/DEAH box helicase
  misc_feature (1)..(260): Xaa is any amino acid
MRPFEVVSPFEPAGDQREAIAALADGIKAGDKFQVLQGVTGSGKTFTMAKIIEAVQMPTLIVSHNKTLSAQLFREFRGFFPHNAVEYFVSYYDYYQPEAYVASRDLYIEKDASINDEIERLRLSATRSLMEREDVIIVATVSCIYGLATPEVYKKMTATFSLGDTIDVDALIRRFVELQYERNDAILERGRFRRRGDTVEIYPAYLEEAYRVDLDWDKVERIRRINPISGATIEELDRALIYPAKQFVMPADMVQNALGA

SEQ ID NO: 89389 - protein, 1394 aa, Unknown
  Obtained from environmental sample
  misc_feature (1)..(1394): Xaa is any amino acid
ALPYNSNGVSIAARTDAVTPARTRYYFTYAINSKTLTNSNTFAAIPNNVDWANTGGTITVQVRMKDNSSPPNEAEQSIQVKVDNFAPLADINSYGNRIVAGSNVDFQGRVYDYANPRSPAQAGPPPDLPDSMNTDYTPRKLARVYAWFTKGNSVTSTDYVNMTNGTTSTSPGLRDINAFPRNARDAVVTYQGGTINSDNVTNITLKNRGGAATNIRVPGQADYFKEISETTAVSGSRMMWAPVNSAVYDVRWSFTLDSTNLPDGDITLHYIVMDEAGNASYYCQPTITVKNKYPVIDRVTLFTDNNGQGAAYTQDDTVEYVINDYRSKIENNLATDPNTTGYLNSGFISKNKFIGFKVETRLGNGPLNFRLQHVTRERKVLTLATLTEMETTRNANNRTEINLYTIRALGDYSSARWKALGVPIEGSTLPTVGTHFVFNPPADFNKADYVSNTAEVWKYKLVVGKGNDVTINRAQGDLSTVTIGGQGDTNQFEFKEPTSGGNTIFDYLTPATKIGDYNGSHPDADDGASDDPTKTAFFLIRVWDSVGVPVPTPQTETWINDQLYDAVVVGMNVYLRDTIKPTARLYDLNPYTEIAVTGNNFGTDNQNATIKNAATPEAVGSNIVRGGLFNTNTERDLVKSGYIDPRNGSFALNPKNSDGLPLVGDNPLKIDTDQTTTGGDTRDKVSGRVILRGLAQDDQLVGEIQIQIGTDAKKTILKLTNGKMVAQGTNQAYAVETLHWKTGHTVEWAYVWDTEKEPSGRSGGGPLSNVPIQVSVADEKGPPNTSDPRGTDTNAAPYKNGFSVDIVPYVTGFERETPKFSTKRSLQGWYSFFKGEQNVAVRGYNLGQSAGNVTVSISSSANGSTPMTGLAYNGTTFENTKNRFYFTIPTSADSGRLNVRVGTTDAYNHTSSHADKSWNREANSYTPGSTLWINKPYAHIWRSTDDNGTPRTYIGTTSSSIGLNHPGMALEYQGGGSGTLHGTWQVYGNANSYYGTNTNNSYPLHTPTPGEPFSTPDISIYQGNGAANIGYTYQGDGRARILIRSNVTTAQGSNANTGTILLLDSPADGSTQRWQNIRLSKAAANNADSETNVGRIYMTAFNADTKGLWFGTRGTPPNDTSANANMFIDGGRFSNNSVPAITAAGEGVAGNAGQYSAVDYDNLGPIVAYYDGSNDTVRVALGTGSTTSGWTRRYLLPETGMGSELRRGSGKYISIKVDKDNHIHLSFYNSVYNTVVYYYAASRTNIGTAPNGTTVKCHTIDNVITGGTWTDISVDNNGNPWIVYGDSSRTGSYDGARMAYQSSAQTGIRFTGELFCPVTGADITGWEALTMPANYTVGNDRLNIEAWPPTGRGGTPGTAPGWNAAIGYTSDLFRVGYFFYPAWKGYGSNTVNAP

SEQ ID NO: 89390 - protein, 414 aa, Unknown
  Obtained from environmental sample
  misc_feature (1)..(414): Xaa is any amino acid
IEIYASDIYGVRSETTSRVIRVSTAPPRTDVLSPPITRYNRKAIVVKGYSSDANDIEEVFLSMDNANTYQKVKLAADGNWELALNTADYTDGIYSALIHTIDKYGVSSYSNAMINIDNTAPELFITAPVDGQHVGTEMRLTGRVTDNLSMKSLTYQVISAANPRQRQTINAQPRLVLFDKIDLTGFPQGEYVIRVVATDLAGNETLVSRKFIYDADDKAAEIAIYNPLPGEVHSGPLHIVGIVTGAFQPAEVQLMMNDQPLALVPVERYGIFRYEVPKEMLVEEKAYKISAYYNSETNKKISSPDHTVYYSYFGPVLQVESHGDGDAITGRPWLSGRAWLTFPEPGEEDPPLTRAQIAQQKTEQRIKRITVSHDNGRTFKSTRGGGEKWKVRMETSELPRGPQPILVKDGICQR

SEQ ID NO: 89391 - protein, 287 aa, Unknown
  Obtained from environmental sample
  DOMAIN (4)...(266): ATP-NAD kinase
  misc_feature (1)..(287): Xaa is any amino acid
MKGRAILLVNPQKGHARKLGNDISEELLSMNIEADIYSIKEKSFVSPDKKYIVAIVLGGDGTVLSAARAVSPLGIPIFPVNLGTFGFIAEVQPLKWRMVFDRWMAGKEAVSRRLMLDVSVERDGCKIFRECCLNDVIISSSGIAKIINLRLFYDEEKMKTEIKLGSYRSDGLIIATPTGSTAYSAAVGGPVVDPELEAFILSPICPFILTNRPLVLPATGTVIVEVANEQQSGILLTLDGQVKEKIKKGDRIFIEKAPYYCSLIASCRSGFYSALRKKLSWAGEGEV

SEQ ID NO: 89392 - protein, 164 aa, Unknown
  Obtained from environmental sample
  DOMAIN (1)...(164): L-rhamnose isomerase (RhaA)
  misc_feature (1)..(164): Xaa is any amino acid
MVKDGLTLSSPDEKIRRFWIEHCKATRRIANNIGMVLKDKVLHNIWIPDGFKDVPADRLGPRLRLKTALDEIFTESFPNVIDSVESKVFAIGVESYTVGSNEFYMSYAASRPGVYNLLDNGHFHPTELVSDKIPALLPFFDKIPLHVTRSVRWDSDHVILYDDE

SEQ ID NO: 89393 - protein, 511 aa, Unknown
  Obtained from environmental sample
  DOMAIN (91)...(128): Sigma-70 factor, region 1.2
  misc_feature (1)..(511): Xaa is any amino acid
MTTTTRKNDAPPPEAPPVDRAALRLRKLANLQGFVTEAQMEDAVDAADDIERIREMLERERITINTFVGERRALPRGERKQERTPAHAHYTDPTLAYLNTVGKVPLLSKGQEAEYAMRMEAAQGKLFEMAFRSQYAIDSLTRLGQKLENGEVGCADVLCIEEAQGEDAEPIDLDEKRTEFLRTLSVVKSKYAAITDMRRTGVEGKELDELWDETIRICRGMGLNAKHVEDILDRYKEELVSEGREADIEKFAKLSEIRNQAKCAVIEANVRLVVSIAKKYMMRGMEIIDLIQEGNRGLIKAVENFDYRKGYKFSTYATWWIRQAILRAINDKSKAIRIPSNTMELVNKVLRVTRKWVIEYGYEPSYQEIALTLGCPEAKVQQAMEYSLDPISLDMQISGDSGATVGEYIEDSTVVDPTQKISLLHLREQINSVLSSLAPKEKEILMMRFGLDDGRIKTLKEIGEIFNISRERVRQIETKALSKLKHPSRVRLLSAWREERPETLADVPYEE

SEQ ID NO: 89394 - protein, 71 aa, Unknown
  Obtained from environmental sample
  misc_feature (1)..(71): Xaa is any amino acid
MTTKTTTIGILGAGQLARMLALAGHPLGLRFVVLDPAPDACAAAVAAHVVGKYDDRETLRRFAGMADVVTY

SEQ ID NO: 89395 - protein, 238 aa, Unknown
  Obtained from environmental sample
  DOMAIN (1)...(145): ATP-grasp domain
  misc_feature (1)..(238): Xaa is any amino acid
VYEIGLPALLKTRTLGYDGKGQSVIKSNGNIEEAWARAGGAPCILEAFVPFTREISVVAVRDRAGEARFYPVGENTHTGGILRHTICRLNDPMQSVAEGLASRLLEHFNYVGVLALELFEAEGKLMANEMAPRVHNTGHWSIEGAQTSQFENHVRAVAGLPLGATEAVCNSAMVNFIGTMPDAAEVLRINGAHLHNYGKAPRPGRKLGHATVCGDGGDTVISGLGRLFDLTGKRQYGQ

SEQ ID NO: 89396 - protein, 480 aa, Unknown
  Obtained from environmental sample
  DOMAIN (314)...(475): Type III restriction enzyme, res subunit
  misc_feature (1)..(480): Xaa is any amino acid
MGNSDRGKVAASQLDFLSPLTFIPKLGPKRVAALGAAGIKNVGDLLCYYPVRYIDRSKVTDIRDINNINNVNNTDNNVIAGNNNIGIDNSADNINGINNANGVDNSGINSIGINKDDVITVIGAVDGVRAEYYGRPKFRVTIKGDGGGALDAFWYIRGMKIGVGERLMLTGKVAVSKGGRPVMIHPVLEKLADGVAHRPILAVYAVREPMREAGVNQKLLRYAIEWTLGKVGSYPQLLPEIIEKGKGFPPLCDCLRKVHLPDDLTGLDEYKARLKYEELYRLALNLRWSRRKFALPGYAMSPGDLADRLRAALPFKLTESQEAAVRVLHGDSARPARMHRLLQGDVGSGKTVTALFAALPALNSGKQVAWMAPTEVLARQTKSVAEKCLGDLGIRVGYVGAGDAPEKRRTLGDLASGALRFAVGTHALFMPSVRFRNLGMVIIDEQHKFGAAQRLQLQEKGPASDFLLMSATPIPQTWRK

SEQ ID NO: 89397 - protein, 155 aa, Unknown
  Obtained from environmental sample
  misc_feature (1)..(155): Xaa is any amino acid
MALKGGAIMPDCKNCKSKTILKNGTARGKQRYKCKSCGYNFVAGDGRANDRTAAKKAMCVIMYSLGKASYNMLAHVFDTWPSLVYRWIAEAGAKMPGPEAPSGVREIEFDEMWHFVGSKKTSFGSSRPLIAAHGEPWPGCSAIVMLLPSGDSTKR

SEQ ID NO: 89398 - protein, 63 aa, Unknown
  Obtained from environmental sample
  DOMAIN (3)...(63): Ribosomal L28 family
  misc_feature (1)..(63): Xaa is any amino acid
MSRTCDICGKHTITGNKVSHAKNRTRRTWKPNLVKVKTVEGGKASTKKVCARCLKSDLITKKV

SEQ ID NO: 89399 - protein, 86 aa, Unknown
  Obtained from environmental sample
  misc_feature (1)..(86): Xaa is any amino acid
MCILKGARNIDLAHKFIDFIHRAEMYAEFVDNFGLPATVNVPARKYKRGVPLYSEADLLHTQLVDDLGESLELYTNAWFNSIRVGD

SEQ ID NO: 89400 - protein, 254 aa, Unknown
  Obtained from environmental sample
  misc_feature (1)..(254): Xaa is any amino acid
MADLICSQCQTPISDPLGVCDKCGNHSRLGWQQRLGITADKGSFNEFDSGMKSGNPIEFPDYEKKINELQKNCGTGEAVVTGRCTIKGYPCVIGIMDSRFMMASMGSVVGEKITRAIEYASANKLPAIIFSASGGARMQEGIISLMQMAKTSGAVAKHTNAGQLYISVITDPTTGGVTASFAMLGDIILAEPGVTLGFAGKRVIQDTIGAVLPDRFQTSEFVHEHGFVDAVYHRRDLPDMIAKIIALHGYKGGQ

SEQ ID NO: 89401 - protein, 85 aa, Unknown
  Obtained from environmental sample
  misc_feature (1)..(85): Xaa is any amino acid
MDEVVNAPHGTGRRAAVHGVKVGGKTGSAENPHGDKTHAWFAAVAPLEAPEIAISVVLENAGGGGAMAAPIAQKILDAYFYPEVK

SEQ ID NO: 89402 - protein, 383 aa, Unknown
  Obtained from environmental sample
  DOMAIN (5)...(381): Cell cycle protein
  misc_feature (1)..(383): Xaa is any amino acid
MKRLDWLFMFSLFALIGIGLALVYSATSNSDLIWYKTDWFKQVIHFTAGSLIAGIIVFMPATFWRNIAWIAYVVAIIALVIVAGSGHISKGAGRWLDVAGFRLQPSEFSKIAYLLANSLWLSKNRISIEQPKTLIVPGLLFIVPFLLVLKQPNLSTALVFTAMTIVQFYWAGFRLVDLFLLISPIASVIFSAISPLYWNLLIISAFFVSIKFKFPLWIIIFVMALDIGAGYASQMAWNSMKDHQRSRILTFLDPMRDPKGEGYQVIQSQVAIGSGGMFGKGFGEGSQVNLSFLPEEHTDFIFSVLGEQFGFVGTFVVLVLFFLLLWRGIMICRLYENRFVNLVVAGACTILFFHTFVNVAMTVGLMPVTGLPLPFLSYGGSFV

SEQ ID NO: 89403 - protein, 275 aa, Unknown
  Obtained from environmental sample
  misc_feature (1)..(275): Xaa is any amino acid
AGCKPIDFAKIKENPKLRILQEASPQETVALGLVIMDEAKKNGFVLNPKMGTLSQDLPKCREFIAKYQKCIAASDSYTIGRKTNGTVVVANNGKYGRSDTGNWRDIVTVAGSDSYIVGLKADGTALVFRFGIFFGFGQDTVTWQDITAITVNFFCTVGLKKGCTAVVVGNKEFGSDNSIDNWRNIAAIAVSGNRTAVGLKKDGTVVAIGYNIDGQCDTGSWLDIVAIAAGDHHTVGLKADGTVEAVGRNYDGQCDTGDWRDIVAITAPCSNHTVG

SEQ ID NO: 89404 - protein, 461 aa, Unknown
  Obtained from environmental sample
  DOMAIN (180)...(374): Trypsin
  misc_feature (1)..(461): Xaa is any amino acid
SPPRSRTQSGLDDIKKLIPNEPVKAIDLIGIYREAYRIEVGDGAAATLEELEKEATQGLKDLLDKAIEEKRWDDAASYSRSLSCIEPQYQAAESDYTLAHAKKKLEENDNLSAFLAAVHAHELRPLSFEDAALFLDRAVQAKQRRAAAYFFTAAQKAGSAAKIPALLTEYARGSDSVAAMINGVATVMVDRGIKIERGMGYVDRVLGSAFFIDSTGLLITNYHVIASEVDPKYEGHSRMSIRMGDSSSPPIPAKVIGYDKALDLALIKTKIEYKSEFVFSVVDRVIPQVGDTVIAIGSPVGLERTVTSGIVSSLSRRFLQIGDVYQIDAAVNPGNSGGPVVDTSGRLVGIVFAGADQFQGLNFAIPAQRLAAALPAMIKGGKAQRPWLGITLIESSGSAEIIYTAPNTPASMHRVTEGSKVAALNGSKITAPQSMLIPAMQDAIFQSRPGELVALETQDSD

SEQ ID NO: 89405 - protein, 294 aa, Unknown
  Obtained from environmental sample
  DOMAIN (53)...(176): HD domain
  misc_feature (1)..(294): Xaa is any amino acid
MNTVLVGISNNAHITGREQIINEISVPLLLAVKSMRKQLIGFILGGEVKGFEMAKSSVNTAILSALCALEINLPELRIVSIINGALLHDAGMLRLPKEITEKRGGLSEAERQHILSHPALAHKIVIKELHFQDDVGNIVLQHHERWDGTGYPHQMAGDYIDIGARIVSIADAFEAMVSPKPYRNSITGNQAVKNLLSDNSRRFDPTILKAFVLIMGIYPIGSIVRLNNGAVARISEVRAIAPLRPKVQIIVDQTNQIYRNEQGAFLDLLTEKSLYIAKAMDTKEFLEQYAQNNT

SEQ ID NO: 89406 - protein, 554 aa, Unknown
  Obtained from environmental sample
  DOMAIN (92)...(235): GAF domain
  misc_feature (1)..(554): Xaa is any amino acid
KAIEVIKRAINGEKQVFDWVHRSSLGELIPFEVTLERMMNNGKYVVIAFQYDLRNIKKMEKNIREQGEQLKIRLEQQVLISELSRGFISSGDSQALVKEAVAKLGRYHKVSLVFVFAIDYERKDTRLAYHWCADGASLRTAIANLYDYLVDIFPGTLPDCATLPIVVCDDTAVNSDAVFQALYAINVMAVIGAPLYVDGRLWGVICVEQNYTARKWTQNEKEFVAMTASTIAGVIMRDIYTIKLKDALHKAMEASKAKSEFLSNMSHEMRTPLNAITGMTTIGRSAKDMERKDYALDKIEVASTHLLGVINDVLDMSKIEANMLELSPVEFIFDKMLQKIVTVVNFRIDEKQQKLSIHIDKAIPKTFIADDQRLAQVITNLLINAVKFTPEKGSISFNADFIGEDDDLCTVKISVSDTGIGISKEQQTRLFSSFQQAESSTTRKFGGSGLGLAISKSIVEMMGGKIWIESELDKGSTFIFTVKMKRGTDKEQGFLSPGLNLNNVRIMAIDDDPDVLDYFEEIMQGLGLSCKTAKNGDEALRLVEQNGAYHIYFV

SEQ ID NO: 89407 - protein, 311 aa, Unknown
  Obtained from environmental sample
  misc_feature (1)..(311): Xaa is any amino acid
MDSKGITRLRKAIIDGPYPLAIAPEGQITYSADTVSRLEAGIFRIGFQAVQQMADKNINCPVEILPVSIHFRFGIVGKRSKERLLRKIENYCGLPKRTKNLPIDERLRLCRDHIIETNEKRYNINNDDSLSFNERLERIVNAALETAERMLGIKNEGDSFTRMHKIRQICWDRIYLPGIDNLDHLSYIQRNIIDLRAGEAWYIGRHQELVDFCLFFRSPPPTEESSLHSKIEYIQNLWNFASRTMGGGVEDRNNIFIRKVIIQPGPVINLSNYLSDYNKDKKATVSTVMSKLEKAFLDCIAEADMTEKDRY

SEQ ID NO: 89408 - protein, 882 aa, Unknown
  Obtained from environmental sample
  DOMAIN (64)...(244): ATP-grasp domain
  misc_feature (1)..(882): Xaa is any amino acid
YIEPLTLTTIKRIIEKERPDSILSGLGGQTGLTLCMQLARAGFLKKMDVRLLGSSPETIDKAEDRKLFKETMQGIGQPVIPSVVANDVGTAVKFANEIGYPLIVRPAFTLGGSGGGIATDEASLREIAANGIALSPIRQILVEQSVAGWKEIEFEVMRDRAGNVITVCSMENFDPVGVHTGDSIVIAPAVTLADKEYQMLRTASLNIIKALGVEGGCNVQLALHPDSFDYAVIEVNPRVSRSSALASKATGYPIAKVSTKIALGYTLDEITNAVTGTTFAAFEPALDYVAVKFPKWPFDKFVYAHKELGTQMKATGEVMAIADTFEEALLKAVRGAEIGLSNLNLPRLAAKSDSEISDMLKTVTDERLFILYEAIKRGVSVDELYQITKVDRWFLHGLVNIHKGLFDDNPQSIPNRDGSKLIYKMVDTCGGEFEAKTPYFYSIQNGAENEALPFIQKSGKQRIVVLGSGPIRIGQGIEFDYACVHCVWTLRKMGYEVIVINNNPETVSTDFDTADRLYFEPLYIDDVMSIIEIEKPIGVIVAFGGGTAIKLTKKLYERGVNIIGTSAESIDICEDRERFDKLLEQLQVKRPKGFGVMTEAQALEAAEKLGYPVLMRPSYVLGGQNMIIAFSPEDIREYMEIILRSKQENPVLIDKYLSGREIEVDAICDGVDMLIPGIMEHIERTGIHSGDSIAVYPALNIDDNLAGKIFEITKKLCMALNVRGLVNIQYVFYKNDIYVIEVNPRASRTVPYISKVTGVQMCEIATKVSVGQTLASLGYSSGIAKMPPYIAVKVPVFSFEKLTGLDTHLGPEMKSTGEVLGLGKNLEEALFKGLVAAGYKIKRGGGVLITVRDGDEGEIAGVAEKFVKCGFSLHATRRTARF

SEQ ID NO: 89409 - protein, 85 aa, Unknown
  Obtained from environmental sample
  misc_feature (1)..(85): Xaa is any amino acid
KQGGYMLAKDPAKCTVGQVLRITEGSLAPVVCLDNDVNMCDRIEVCKTLSMWTGLNKVITDYLNGVTLQDLLEQHQYQGADHYII

SEQ ID NO: 89410 - protein, 561 aa, Unknown
  Obtained from environmental sample
  DOMAIN (100)...(133): Tetratricopeptide repeat
  misc_feature (1)..(561): Xaa is any amino acid
MNQYDMPGKMFELIYERYANDPKTPQALYNAGLIFEKGKHYHNAINVYETMASRYPSSEFAAEAFFSIGLCWEKLEEFGKMANSFSDYAEKYTTDRYKQVQALVKAGNAYFNMQNFTDSKNNYDKAVKIYEQYSKTSDIDVANVAEAYFRVGEIFYKKFEDIKLTAKNEKEMVAVVKQKTKALEEPAKYFAKAIELGVEEWTMRATYMIGKGFYDMAEAVANQTLFGNEEERMGGKIKILSSLDKYYDKAMDYFKQNIIRAKKRNLKGEYIELSKQTIMEIAYKKGANLEKAGLLLKYAPMPKELAKEDTSTFRRELEAKYLKSQDAAVPMYENGMKLAMTLGIVESPWIDRIRKRLSELNPASQWIDVQIVEQGVEQEFEQEIEREEKQSKNLGQLNSSSREAKTPQKRREAAGLRLGIGPVYSLDADYRGAVGKSNGVEISFSYNFIADDGDEFSNPGAYELFGAFEWRGFITKNGGLSWYVGPCLNLGIYESRYGSIFGIGFGGQIGIELDFSAFTMADNKNGNGLDDLEYTLDIRPIYMSGGRGLISSIGFGFRYTF

SEQ ID NO: 89411 - protein, 158 aa, Unknown
  Obtained from environmental sample
  DOMAIN (16)...(158): Tryptophan synthase alpha chain
  misc_feature (1)..(158): Xaa is any amino acid
MSNIAKAFDNNNGKALDNDKGKAFIGFVTGGDPSVEKTKEFILEMFRAGSDLVEIGIPFSDPIAEGPVIQEANIRALRAGATVEKLFALVEDVRKTTDSPLVFLTYLNPVFHYGYDAFFKRCEAVGLDGIIIPDLPFEEQADVRETSSKYGVDLISLM

SEQ ID NO: 89412 - protein, 317 aa, Unknown
  Obtained from environmental sample
  DOMAIN (207)...(309): GTPase of unknown function
  misc_feature (1)..(317): Xaa is any amino acid
MFVNLEDYGFTQNEFIAYQNLKTDKDTVNSIPGRIIEARREQFSVVCEYGEVSAELKGSFYHNLEEGDLFPAAGDFVLINYNSAGASLITAVLPRRSEFSRVDFMGHAAGYVKNVKEQVLAANFDYVFILSSLNFDLNLNRLARYLTASLQSGGFPVFILTKADLCTHYREKEAEVRKFAREVPVIPVSSKTGIGLDELAPFLEPAKTAVFLGSSGVGKSSLLNRLAGRRLMDVKDIREDDSKGRHTTTHRQLFRLSPDDDLLPDGLPVMFPGALIIDTPGIREVGLWDSREGISLAFASIEELFSKCRFSDCSHQT

SEQ ID NO: 89413 - protein, 306 aa, Unknown
  Obtained from environmental sample
  misc_feature (1)..(306): Xaa is any amino acid
LHRDIDAVIEFLGRGSFMHLTAENSGQELPEKAASRHIQENLEKLSSASTWLGVSLPAEPWESSSFPGEAEERLTDTITNAVSSLIRAENEQREEKRKIEEALNEAKAFANLNAPFSDLDQLSYLTLRVGRLDGQRHEELRENLEGRAVVIPLGSGDRVLAAASRKGRFALDSELKKMNFVPIDIPEGYNGIPPELLLGLEERLKGTAKKLEEINESKNKLRDEYELSLQALTASYLMAGITEKLKACLRATKNVYLLSGWVPADMVHTLVTELEKLTEGRIAVRSYNPDELERGKRRQGKSSRFP

SEQ ID NO: 89414 - protein, 578 aa, Unknown
  Obtained from environmental sample
  DOMAIN (130)...(408): Penicillin binding protein transpeptidase domain
  misc_feature (1)..(578): Xaa is any amino acid
MLSPAQIFCLAVIPRRPNLYNPLENPEACVKAAAELQAVFSKNKKLKNAWPLLAEINDEDWKFAASSVRRFAYPFALPHLIRHINAGLTPNRNPPRGEIHLSIDLALQRYIEGLIAGNVDRYYSSRLTNGAAIVIDNENGEILAWVGSADFNNSEAAGQIDGVMALNQPGSGMKPFLYAMAMENGFKPIDVIADIPVNFGESELYIPRNFNNRFNGPILFRAALASSLNIPAVYLLYRLGVQNYSNLLFSLGFDSLEQSAEDAGLGLALGNAPVSLMELVRAFSVFPRDGVYMPLTWELGGTEQWNRVTARREVAQKRIFSADTARLICSFLSDSNARVMAFGRARNFQTPFTSMFKTGTANQYQSIVALGATPKYTAGVWMGNFTGETVIGKTGSSIPAAIARDALVFLQSGPRGAAPDFSAPENRQLQRVCALSGMAPTDACLSLISEYRYHGEEGEPCTWHRTVNGRSEAVYPAEYQAWFTASSREGSLDYGSRPLEIISPREGFVYLSSPGIGRDEIPAEVIGGSGDELRVTFNGNTFSVGRPFVFSLPREPGSYTLRVQNGDEEEEVSFTVEP

SEQ ID NO: 89415 - protein, 291 aa, Unknown
  Obtained from environmental sample
  DOMAIN (9)...(225): Ribosomal protein S2
  misc_feature (1)..(291): Xaa is any amino acid
LAVVTMKSLLESGVHFGHQVKRWDPRMKKFIFAERNGIHIIDLQKTIQAIKDAYDVVRKVTSSGKSVLFVGTKKQAQQAIQKEAERCGMFYVNNRWLGGMLTNFVTIKKSLLRLKKLEKMEIDGTFENLTKKEIAALGKERAKLQKNLGGIKEMKEPPGILFIIDTRVEAIAVAEAKRMGIPIVAVVDTNCNPDGIDYPIPGNDDAIRAITLFTQIIANAVVEADNEVGLKIIENLEQDEEEEMMTDASIREEDREIDITTYTEVPSAPKEEQEAEEDDLPVDIDKAYGEE

SEQ ID NO: 89416 - protein, 435 aa, Unknown
  Obtained from environmental sample
  DOMAIN (1)...(119): AIR synthase related protein, C-terminal domain
  misc_feature (1)..(435): Xaa is any amino acid
MGGSIACEVFNQIGDEVPDADAEILKQFFNAVQTLNAENKILAYHDRSDGGLFTTLTEMAFAGHVGVELEWKTFEFLFNEELGAVLQIRENDLEAACKLFPFEKIGKLTNGFCLQIGNYRKNLFKLRKIWSRTSFEITKLRDNPTCAKQEYEWKCSKQGKGIKHKIKTIYRIPQIPNPKKPLIAILREQGVNGEVEMAAAFDRAGFKAIDVHTGDIINGKIDLSEFSGLVACGGFSYGDVLGAGEGWAKSILFNERARDVFQKFFERKDTFSLGVCNGCQMLSNLKSIIPGATHWPKFKQNLSERFEARFVSVKIEKSPSVLLTGMENLVIPIPVAHGEGRAEFTSQDDLEKSLVSIRYVDNEHNATEMYPLNPNGSPQGITGLTTEDGRVLILMPHPERAFRMLQNTWAKPREGEGYWMQMFRNAREFFLNSPK

SEQ ID NO: 89417 - protein, 210 aa, Unknown
  Obtained from environmental sample
  misc_feature (1)..(210): Xaa is any amino acid
VCENNIKFIVDLLDTLNPGLFLDMRDARLFFAKHCADRDVLNLFAYTCSFALYARKHKAAKAVNVDISKKSLNKGKENYLLNEIEPNKGEFFCGSAEEYIDWVIKKGKKFGAIAIDPPSFAKNSKETFSIAKDFDNLAEKAVKILENNGIILLATNYSKWSYETLLKTAESAFAANGKTFKLLQKGTQGVDFPGSGESKESCMNWVILFC

SEQ ID NO: 89418 - protein, 974 aa, Unknown
  Obtained from environmental sample
  DOMAIN (1)...(134): AIR synthase related protein, N-terminal domain
  misc_feature (1)..(974): Xaa is any amino acid
REHVHILMKVETHNHPTAISPFPGAATGSGGEIRDEGATGIGSKPKAGLCGFSVSNLKIPGYIQPWERDFGKPGRIESPLQIMIDGPLGAAAFNNEFGRPNICGYFRTYEQEVNGKIRGYHKPIMLAGGIGNIKARHVQKGSLKEGDLLIVLGGPAMLIGLGGGAASSMATGSGGEDLDFASVQRGNAEMQRRCQEVIDRCWALEEKNPIAFIHDVGAGGLSNALPELVKDAGFGGKFRLRDIPSEERGMSPLEIWCNEAQERYVLAISKESLPTFKELCERERCPFAVAGEAITEQNLILSDEHFKNNPIDIPIELLLGNPPKMMRRDKKIIENNKSQISNLKFPINEIAQRVLSHPAVADKGFLITIGDRSVTGMVVREQMVGPWQVPVADCAVTTSTLDSTTGEAFSIGERTPLASLNSAAAARMAVAEAITNIAAAKISDISKIRLSANWMANPATAGEGAALYEAVQAIGMDFCPKLGIAIPVGKDSMSMSTIWEEQGEKKVVTSPVSLIVSAFAPCEDVCKSLTPELQKVENSILILADLGQGKNRMGGSIACEAFNQIGGDVPDADAEILKLFFNAVQTLNSENKIIAYHDRSDGGLFTTLVEMAFAGHTGIELEQKTIEFLFNEELGAVLQIKESDFEATCKLFPFEKIGKLTDDFCLSIGEYRENLSELRRIWSRTSFEIAKLRDNPACAKQEYDWKCSKQDKGINTIQNYQLSTVNYQLKRPLIAVLREQGVNGEVEMAAAFDKAGFKAIDVHTGDIINGKIDLSEFSGLVACGGFSYGDVLGAGEGWAKSILFNERARDVFQKFFERKDTFSLGVCNGCQMLSNLKSIIPGAARWPKFKQNLSERFEARFVSVKIEKSPSVLLKGMENWIIPIPVAHGEGRAEFASQEDLEKSLVSIRYVDNDHKPTEMYPLNPNGSSQGITGLTTEDGRVLILMPHPERAFRILQNTWAKQVDGERLLDADV

SEQ ID NO: 89419 - protein, 448 aa, Unknown
  Obtained from environmental sample
  DOMAIN (118)...(238): MutS domain II
  misc_feature (1)..(448): Xaa is any amino acid
MKQYYDVKAAHPGCVLFFRMGDFYELFENDAVVASKILGITLTSRNNGGAKEQALCGFPYHAAERYVPKMLSAGYRVAICEQMEDPKLAKGIVKREVVEVISAGTSFSENNLEAKQSAYIMAFFPNTALAIADISTGYFAVGESSITNIESEIARRNPKEILVPSGAEISANIQALINHDKIMLTELPRKQFEAEFCNSVLEKHFRTQNELSNLSISASGALLFYLLEQKKSGLSHIIKIESIPWSDYMALDPATQRNLELTAPLHPEDSNSTLLSVMDFTKTAMGGRTLREWISHPLISIEHILGRLSCVEELVDNPMSIDEIGEALKPIPDMERAMGRVGSSRANARDVQSLGKSLLQAEQIARMLKKLKGKKFSEIASKLELAKGKGQEICALLKDELPLTIREGNLIREGASDEIEDFRQEIKSKKNWLANLESKEKERLESLL

SEQ ID NO: 89420 - protein, 508 aa, Unknown
  Obtained from environmental sample
  DOMAIN (489)...(508): SEC-C motif
  misc_feature (1)..(508): Xaa is any amino acid
DVVVIPTNVPVARIDEDDLVYLNESDKFKALCDEIASAHSIGQPMLVGTVSIEKSEKLSSLLTRRGIRHEILNAKNHAREALIIAEAGAKGSVTIATNMAGRGTDIKLGGNAEHRARRRAGTNATKEQYDAIYSEELEKWKKDYEEVKASGGLYVIGTERHESRRIDNQLRGRSGRQGDPGRSKFFISMDDELMRLFGGEKMKNIMSRIGMDSGEPIFHPMLNRSIENAQKKVEERNFEIRKHLLEYDDVLNQQRKYIYEQRDAILMDQDLKKRVNDSTAAMVGDLIDEYVGNYKHSVNTAIKQLAEQLKTKFGWQLALEPNSPEMKAPELLEKHITTELEQELNDKEALIGSAYLNMIIRENYLHAVDRKWLDHLENMEALREAVYLRHYAQKNPLTEYKLEGYRIFEDMIEEIRQEIASRMHLIRIQVAEGGGQRPVSRSIGTVHSASHNSMASFGGVSQAADSSPMSRASRPDNVTVIRTQPKVGRNDPCPCGSGKKYKFCHGAQ

SEQ ID NO: 89421 - protein, 398 aa, Unknown
  Obtained from environmental sample
  misc_feature (1)..(398): Xaa is any amino acid
MWKGKTVLQGSDGLNSTNIENMNYNLWNFIDASGHTQRTNTPQPPNVPYGYVIGDSGQDIGKLIVAVFNIYLEAQRYKEATTDTTITVPNDYTMPRALTISAPGTAGITLTIKGATSAVKIIRETQDATASNGLFIVGSGVRLVFENIVIDGDKGRHTKNTASLVRVNAGGTFTMNAGSVLQNNRATEGGGVYADSRSTFTMNGGEISGNTGQGVYVVAGDSNNNRSTFTMNTGSKIINNTGAGMYTSSGNSSTSYITFAMNGGEISGNSGGVSFSTLSNGIFTMSGGEISGNSGRGVTVRCAFTMSGGEISGNSGGGVSLTGETFTMNGGEIKNHTITGSGAGVSVSGGGFIMDSGTISGNTANGTNNNGGGVYVSDGTFSMYGGDISGNRAGGNGG

SEQ ID NO: 89422 - protein, 344 aa, Unknown
  Obtained from environmental sample
  misc_feature (1)..(344): Xaa is any amino acid
ESKVQALLEKAQGKLDGTRVLLKTREKERDEIERIIRDRMTNIFERVPLHELTDVSDCMSEAQKAAINEIQNLLKQLLKNDHELELSIKDFVSAQADVDHLGDKLEAEGGSGAITVDTGAVDAEFDTLRQMAKMTVGRQGNHFPVLTSEYFHCGPNDVATRENVISMLARIESIDAEAYCRIYKNKLNRIAPFVLLIPTYGDMGFCWEPFDRYNRATSRGRIIVPMYPKNLYIAILTAIADLRWQVAKEKASFYWMEEGLTGHYYQWFQAQKLKGDIKEYFIKDYIMWITKESEGIQKLEKDVRGTFWRYMPFTREVKEKLKTRNLIYQELYQRDVNRSMSDGY

SEQ ID NO: 89423 - protein, 245 aa, Unknown
  Obtained from environmental sample
  DOMAIN (3)...(74): RNA 2'-O ribose methyltransferase substrate binding
  misc_feature (1)..(245): Xaa is any amino acid
MIFLTGFHAIEERLKSGKDCGPLLLAKAGPRARELVTLAGNCKVRVDRVGTFELDRLAPDNRGIALQVEKVEESGSVIDLEEFLGELGDRADVLALILDDITDPHNYGAILRSCDQFGVDLVISRNRRNAKHADVISKTSAGTVSWVPQADVPNLVRAAGQLKEAGFWLYGADMQGEPVYAKDLRGRVALVLGGEGSGISRLLRECCDSLVGIPSTGKIDSLNVSVAAGVLLYEVRRQLVINNKR

SEQ ID NO: 89424 - protein, 214 aa, Unknown
  Obtained from environmental sample
  misc_feature (1)..(214): Xaa is any amino acid
MAHNDLYIVDNSNPEHSVKKYLNDWCGISRQMDIATGYFEVGGLLELDGKWQSLEKIRIILGSEITKRTREIIEETKNYFLKSINKSIEDEKEKNEFLSGVPAVLDALKSRKIECRVFDKNKFHAKAFITYFREDYHKQFPPSMNVPSGYALVGSSNFTSAGLTKNIELDVQIAHNVEALQEWFNKHWGEAADITEAVLSTIENHCREYSPYQV

SEQ ID NO: 89425 - protein, 315 aa, Unknown
  Obtained from environmental sample
  DOMAIN (53)...(309): Methyl-accepting chemotaxis protein (MCP) signaling domain
  misc_feature (1)..(315): Xaa is any amino acid
NASDMVDSIAHISTAAEQVLVKTKGQMDSVNTSSRAVQQISNQIKSLEKSIFTQTSSIREASSAVEEMIGNISSIGLVTEKMTDQFKTVGEASTEGGRIQKESGERIREIVEQSRALQEANKIIATIAANTNLLSMNAAIEAAHAGELGRGFAVVADEIRKLAVNSAAESKKIGIELKQIADTIGRIVHDAAVSENAFTEVSHRIDETGKLVLEVSNAIREQKNGAAEVVKSLHIMNELSMKVKDGSREMSQGSEVMVNEINALQNSAREIETRMEEISGGIRNINSGAQEVSGLAERTQSSIEKISVIADEFEV

SEQ ID NO: 89426 - protein, 561 aa, Unknown
  Obtained from environmental sample
  misc_feature (1)..(561): Xaa is any amino acid
MRDAKAKLGSLAEIVKAEGYARIYINYTLGKVMRSDLASLKTYDSAVTKECMTYTNHTASRIREDVYSRHYLGRTALEERKKYLSGEAERIEKELTVAEREEREARNREDCCNRVIRSLPELKYLFPSIADAESFAEQLVAAEEELNKIDTQSFKELENKRGELEQQLNLLKEDNNRLQKTWGGLNTKLSNCRENLDQFTQSQEEKEEAIKNFGNEYPLMLGECEEYAQDKLSKNSIADLTNTYESTLKSFKTRTETCKKEYEKLVRDYDQEFHHLLGMEPSDNAEAETLLKRLETSELPQYREKIAKAYQDAEKEFKEHFISRLNEHIEEARESFNEINDILRDLLFGRDQYWFHLEELSERKGQIEVIKQAAKIPTADEGLFSQLIDPAERKAAEELFNRILNSPLDSKELKAICDYRTYFHYDIRIKETDNLDETGNPVTLSLSRVLKEKSGGESQTPYYVAIAASFYRFYKTSPETTVRLVIFDEAFNRMDDERIGKILSFYNNLNLQIITSVPPEKIEAIAPYMDRINIISRFGSAVKVRDCHIDAIDSSDINISV

SEQ ID NO: 89427 - protein, 374 aa, Unknown
  Obtained from environmental sample
  DOMAIN (40)...(366): Cellulase (glycosyl hydrolase family 5)
  misc_feature (1)..(374): Xaa is any amino acid
MRIKDNLILDDEGRTLILRGVNLGGDSKIPYTAPGGEISPDFLDRKKEVSFVGRPFPLEEAETHFRRLKKAGMTFLRFLVTWEAVEHEGPGIYDEAYLAYLRKILQAAEQEGINVFIDPHQDVWSRWTGGDGAPAWTMERLGFDLDLLDRCGAAITKQRYTVYHNKPYPKMVWPGNYNRYAAATMFSLFFAGNTYAPDLRIDGENIQEWLQGRYIAAFKHVRRRLKNCANITGWGSMNEPHFGFIGQKDLNAAEDPMIPVGLRPTPWLTIRAASGYQVEVPVYSMISFGKRISHYETFNAEKISLFKEGFSCPWKQAGVWDNEGGEPKLLKSNHFSQYQNRTAAFTDDFLKPFIIKYINAMKESYEQNFFFIEG

SEQ ID NO: 89428 - protein, 60 aa, Unknown
  Obtained from environmental sample
  misc_feature (1)..(60): Xaa is any amino acid
MVGQITTILAGASINIADLINHHRDDYAYNIIDTEQKISDSVMEQIRKVNGIIRVRTIAK

SEQ ID NO: 89429 - protein, 301 aa, Unknown
  Obtained from environmental sample
  DOMAIN (138)...(252): Transglycosylase SLT domain
  misc_feature (1)..(301): Xaa is any amino acid
MELSELEQLQNEHSKNEHSKNEHSKNENSKNEHPPVKIERRMNFRNVKMEIVAPLFFGLIGSLLLCAVVSADTAIFSKDYGAIRIRGELGEDIEDSDFFLAVSERAPDPIIEYYRRSEYKDWVIDFFTDICSSKEISQVILMNADEFEVPAALAFALSWEESRFNPRAVSRPNRDGSIDRGLFQLNNKSFPDLDPLAYFNIRYNTRVGIGHLRYCLDTGGSEISALAMYNAGAGRISSMGAPKVTLNYISRILENKSKIESRFHAMLMKEEEKRYSEKEQSSNPLQFNPTLSITSLLNPSL

SEQ ID NO: 89430 - protein, 97 aa, Unknown
  Obtained from environmental sample
  misc_feature (1)..(97): Xaa is any amino acid
VPVSHGEGRIVIRHDEGEALFKNGQVPFCYAGADGQPALYEPDNPNGSDFAIEGLCSPDGRILGKMGHSERRGEYVHINIPGNKRQNIFEAGVRYFK

SEQ ID NO: 89431 - protein, 276 aa, Unknown
  Obtained from environmental sample
  misc_feature (1)..(276): Xaa is any amino acid
MSVFKFLQTLLRVNYLRLRFQDCPCIIIEIIVEKYMNNILVCGLINIETTIKIDSFPIKYSPVEYNFFGVNSSVSGVGYNIAKALKTLGDAPIFFSIIGNDMYKEIISRELKKDKINSNYVLPLLERTVQSGILYDGNNRKILLDLKNIQEINFPMDLLKDVINKIDLGIVCNINFSRGFLQVLKENRKIIATDVHVLNDINDNYNNDYIKYSDILFLSNEGIIGNENDMIIQLSQKYNHEIIVITMGENGLLMYVKKKCETKHFHAIKTREVVNT

SEQ ID NO: 89432 - protein, 728 aa, Unknown
  Obtained from environmental sample
  misc_feature (1)..(728): Xaa is any amino acid
FETADKQFAAKQEGTAAQAGWTTARKRGKRINISAVVEKGAVYTLRIWSEDRVDDVAAVEIRVTAAIPLSFKDARSGVVGQAANDDGNMVFYRIDGMDAAPGHYELIATENEITRVSGMNAPEDEAVKKGQSWTEIIRTPGESVASGIFEEDEGMIIANAGLRLFVGATFKSSDKFRFALAPVLLSDAAETADKPRGSKTKSAEREVLPIVIRYGGDKVFAIDAPAQKFGVVTLSMPAGQPIVGLSAPTQTAEFVRNGIPVMGGQYISRGISKTVVIPGDTGRVIGWNAQTGGSAATGVNAVFTMRNYGMEKTDTLKTGRTAWTAKQSAKEYRLSQSSGNPVITIKLSPRTGVAYVSPEGLRDMYYGGDDGAQYTLTPTGGRFFLFGDNGGVELEMYASPTQAEKKSDAQKDALTAGSESVKLQPVDAREAFRVKNSGKQALCLFKSGSIESVDWVSKSGAMTQNVKDGGKITGESGVLLVNYGAGAGKLKLCKDDGNVNACRWGEPAGKKEGIPVIKEISRVTMAHGVNLYAIELAEPSHVSLSAPTPAAVMASTDDKIGNYQEFWETLRWDIPLPAGKHIVGIKPLASGSLSGIPLTVGFYPIPQLTEEKPLRMQLMASQNRLVKFELQKKSNIGLGLSTQGQAVEAALLDAKCREIASGSQIFKELDKGAYYVLLSVPSGATQNGVSVTVRLFGQAPPPVDPPAERIKRIIKDDRDESLDSRASR

SEQ ID NO: 89433 - protein, 69 aa, Unknown
  Obtained from environmental sample
  misc_feature (1)..(69): Xaa is any amino acid
GGAVELMNWVKNNSVDVKKARVGNMTAEELHGKLLIGEFKNTVESEYTDEYQKIVDRFSKPEVTDANRT

SEQ ID NO: 89434 - protein, 53 aa, Unknown
  Obtained from environmental sample
  misc_feature (1)..(53): Xaa is any amino acid
LSEAGNVTEAAANFFDCLHELDSLGLDFIRAEEAPDCGLGEAINDRLRRAASN

SEQ ID NO: 89435 - protein, 264 aa, Unknown
  Obtained from environmental sample
  DOMAIN (2)...(264): Amidohydrolase
  misc_feature (1)..(264): Xaa is any amino acid
MTDAHCHPCDLLDYEKTAEENRRETGTAAAASAWNREQFEYHEGLAKKAREDGAPPIFRCFALHPQLSVEKKFTLSRGIELLYSLAVEARLDAVGETGFDLYDKKFKAAESIQDEMFTSHLDVALHWDLPVILHLRRAMHKIFPFVRQLKKLPAVVFHSWPGTRGEAEVIIKKGINAYFSFGTAVLKNHKEAIASASILPADRILLETDAPYQPLRGKEFSTWQDLGQICSCIADLRKEAGSPCANTKELEAQTTENFYRVFGG

SEQ ID NO: 89436 - protein, 287 aa, Unknown
  Obtained from environmental sample
  misc_feature (1)..(287): Xaa is any amino acid
MRKFLIACSLGAVATFGLFSCGQHFFDQDPENRMVEALQEALVLGSKTAASNLGDTSCTTIKCASGYLGNELVEILVPDTVETVLKKINSFTTTIAPLKNLLSALGMSSNSLNALSGLDRYRDSIKVALNRGAERAAPKSINVFKNAIFGMSFSDARETLLGDSVAATTYLHTTTYDDLKDAFYPIIEEPLKLLKLDRFWTPIASNYNSFAREYLRIKNTQFGSSALAQYDLPYNDLPDSISTYLSKYATGKALDGLFLMVGKQETKLRADPWGTVKALGGFITDTV

SEQ ID NO: 89437 - protein, 289 aa, Unknown
  Obtained from environmental sample
  DOMAIN (39)...(250): RNA polymerase Rpb1, domain 5
  misc_feature (1)..(289): Xaa is any amino acid
DIVEPLSDRIIGRYTIEPVKHPFTGEMIVDVNEEITEEIAKKITAAEVNSVRIRTVLTCEAKHGVCRMCYGRNLATNRTVDIGEAVGTIAAQSIGQPGTQLTMRTFHIGGTATKISEENRIFLKYPVYISDVIGTHVVLEDGRWLFTRRGHAIVSKVMHEYPIEDGDQIMVESGQRVNPDIVIIRRGSTEIKAPDSTYVQILNNSDTVGPHSRTLYLVGKEQKIEIRNGSDFLVKKERWSIRKKPSPLLILSPILSSPSTAERLSMRTLFPEPPLRKKWTRLPGISKSA

SEQ ID NO: 89438 - protein, 563 aa, Unknown
  Obtained from environmental sample
  DOMAIN (334)...(476): RNA polymerase Rpb1, domain 2
  misc_feature (1)..(563): Xaa is any amino acid
MRDIQDFDSIMIRLASPDMIRNWSYGEVKKPETINYRTLRPEKDGLFCERIFGTTKEWECYCGKFKSIRYKGVTCDRCGVEVTHFKVRRERMGHIELAAPVSHIWYYRSVPSRMGLLLDMTMTALRSVLYYEKYVVIDPADTELKKGQMLSEDEYFEEQERYGYGSFTAGMGAEAIRTLLENVNLDEEAAKLREKMIEKGAKSDRKLLKRIEIIEAFRNSQNKPEWMILDVIPVIPPELRPMVQLDGGRFATSDLNDLYRRVINRNNRLKRLQTLNAPDIIIRNEKRMLQEAVDALFDNSKKKKVVKGSSNRPLKSISDMLKGKQGRFRQNLLGKRVDYSGRSVITVGPDLKMWQCGLPTKMAIELFKPFIMKKLVDKDVVYNIKKAKMLLEAESAEIFAILDEVVKEHPVLLNRAPTLHRLGIQAFEPVLVEGKAIKLHPLVCHAFNADFDGDQMAVHVPLTQAAQMECWTLMLSARNLLNPANGRTIVFPSQDMVLGINFLTRIKPNGKRPESLNPEAKSRPPYYSSPEEALMAVENKFLDWGSLIRVKPVKFPIWDKIDH

SEQ ID NO: 89439 - protein, 310 aa, Unknown
  Obtained from environmental sample
  DOMAIN (4)...(300): Aldehyde dehydrogenase family
  misc_feature (1)..(310): Xaa is any amino acid
GYYLRIASNVTVDCAALAYKAGCSILLRGSSSALESNRALVAAIKTGLETGGGIPDAVELSDNAQAKPGSHEDVDEILAARGWIDVVLPRGGRELIQRVVQNARIPVIETGEGNCHIYVEPSANMDNAVEIIANAKLQKPGACNAVETLLVHRGTLGPLMLRLVSRLAGAVEFRCDSESRAAIREEALVNLKLKDAVEEDWGTEFLDAVLAIKTVGSCQEAIEHINRYGTKHSEAILTNDLNSARQFRNRVDAACVYVNASTRFTDGGVFGFGAELGISTQKFHTRGPMGLEALTSYKYLVSGSGQVRIH

SEQ ID NO: 89440 - protein, 536 aa, Unknown
  Obtained from environmental sample
  DOMAIN (162)...(296): ATPase family associated with various cellular activities (AAA)
  misc_feature (1)..(536): Xaa is any amino acid
MNITYSEFNRFIDENQVESVTIYDDRIVDVFLKTPAIGGALQLKTRIPNLSDPNIMLNLQSKGINITSSPTKITFMRIILDMLPWIIGLTIMMLIFRNMQGVGMKNFQFGKSKAKRYTDEGKKVSFSDVAGQKDAKYELEEVVEFLKNPQKFTKMGARIPKGVLLVGMPGTGKTLMARSVAGEAGVAFFHMSGSDFVEMFVGVGASRVRDLFDQGRKSAPCIIFIDELDAVGRTRGAGYGGGHDEREQTLNQLLVEMDGFDSKDGVIILAATNRPDVLDPALLRPGRFDRQVVVAMPDIKEREAILQIHSAKIPLGKDVDLTRVARATPGMSGADIANLVNEAALHAARKDKPDVEMHDFEEARDKVLMGVARSTLVVSEKERRMTAIHEAGHALLHYFLKNADPLHKVTIVPHGRALGMALSLPEEDSYSRTRGWIEDRIAICYGGWIAEKLIFNETTTGTKQDIQQATEMARHMVCEWGMAEEMGPVAYGQEEEPIFLGKEIARHKDYSEETARRIDKAVKEILDIARVGAERI

SEQ ID NO: 89441 - protein, 460 aa, Unknown
  Obtained from environmental sample
  misc_feature (1)..(460): Xaa is any amino acid
AYLWRQAVGGAVIGRPTVQAQSVVMALDGGNIKAYSSSGRPLWNFSAKGKLSPFVTRSREGTSYICRTNGVFIAVNRVGRELWRTNIGQALAGPVVLGWDGRVFIPITKKIFCYTASGNLLWVRELAGKISAGPWLDQAGGILLALETGDAVRLDPYGAARIRRLSSVPRILLSIGRSVAPNAAAPAPVIMALYRDGNIQLIDPALPNTAPLDLPRLPSPPLAAASRGSNAAAALANGQIILLSGLDGKIFWTADTHVRMEDDTAVIYDERGIYVLSASGAAGFTADGERLWFAVLKNASGIPAFDDEGVLYSGGTDWILYAWKLENRALNQKRNLYGPEPEGSYGLPLSSLKVSSGFNDEIQIKSRLETIRREIMAGRVGQNEREWLGYLMETAGNSLRQGTFSYNRPRSLIESRILALQLLSHIGSSEVISWLARFFKNENEPLVKAAVARAIGDIGV

SEQ ID NO: 89442 - protein, 203 aa, Unknown
  Obtained from environmental sample
  misc_feature (1)..(203): Xaa is any amino acid
RGLPKGSLALRGLFCGFGRGCFEEAAALALRVNVDLLDEPVHKAVVYLEPEEFRTTWLGNKAVYRTRMAMADNGELLIIAPGLERFGEDMGIDALIRKHGYRPSKLIKEKVSKDAELANSLSAAAHLIHGSSEGRFTVRYCPDKGISRQEIESVGFEWGDIGEATARYDVHKLTTGWNSDSNGEKFFFVPNPALGLWALRKNF

SEQ ID NO: 89443 - protein, 397 aa, Unknown
  Obtained from environmental sample
  misc_feature (1)..(397): Xaa is any amino acid
GDLPDLGEQPAADSSFDTGDLPDFGEQPAADSAFDTGDLPDFGEGPASDSPISEESGEDSIDMGGETLHTNDAYNTSDENPFGDFGADPLPDFGEPSHEDSGEDSIDMGGETLEPGAGSDFESPLPDTDFPSTDFDSPLPDTDFGSPLPDTDFGSSLPDTDLGSDFDSPLPDTDFSPDSIHSNDDLGGADSQELGDFGSDFASESIELENELGTPDAGLGSEGFRDADLGGDDFALPGLEEIFEKSKADTTPKPAPKKGLFKRKKAKTEELPEAEAGIDEIRLSQNDLDKLLKTLAAYPLNLRIVCEEMIAEQVLLPQQLSKLVRMLVNGASVREMAALAQEITGKPVVIPKSFEKMTGAAFEAEQSSFAYIFIHNFLPVLRLFAVIAALGASIFYL

SEQ ID NO: 89444 - protein, 349 aa, Unknown
  Obtained from environmental sample
  misc_feature (1)..(349): Xaa is any amino acid
QRQAILRATGQYGNIWVIDSSITDTQAQTLAEKFDLIYPIETNLLGFEYGGGPGGDGGRDGDPKIQILVYDFGGTSSGRFGNEFYDTDGLNFGELLEIHAGAVNYFPDHAYSVLVHEFQHMINYNVKVEKQGKSTQPWYSEMLSMLAEDVISPLIGIGPADSNHPINSRIPGFLNIYNQAGITEWGYSGDTIVSYAIDYGFGAYLLRNYGGAELLKEILSNDSTNIESITAALRKVNANNGLSFEEAIRRFGEALVFSGTNMPADVQSFDKTVEKTIGGYTYTATKFNIWGDFGSTKPKIFGVNEQLEMRPYSITVHQAASGWTGLSGNKSITLQKPNNTNVEFYLMVK

SEQ ID NO: 89445 - protein, 166 aa, Unknown
  Obtained from environmental sample
  DOMAIN (48)...(166): RNA pseudouridylate synthase
  misc_feature (1)..(166): Xaa is any amino acid
VNGEPALKNGLTLKVGDVLECDLPDLVPPAAHMEPEDLALPTLFEDDRLWIINKPAGMVVHPGPGHRSGTVLNALLTRLGRSAPVGERCEDDEEGEGEAETAKGWPGLVHRLDRYTSGCLAMAKDEEAKSFLQAQFKARTVEKTYLALARHSRRLPELGSLLVDAQ

SEQ ID NO: 89446 - protein, 251 aa, Unknown
  Obtained from environmental sample
  misc_feature (1)..(251): Xaa is any amino acid
MRIGISCYSTFGGSGVVATEVGKSLALRGHEVHILSPSLPPRLIGFEDHVTFHEVSASPYPLFEVDPFPIALASKMADVADRHRLEVIHAHYAIPHASSALLARMAVDNRIKVVTTLHGTDITVVGSDHSYLPMVKLAIRESDEVTVVSDYLRRETIKTFGIERRIDVIHNFVCIPQVDEHALGCRAWLSPDRVPVLTHISNFRPVKRVMDVMRTFEAVRRERPCRLVMVGDGPDRFEAEEFARQRLQGED

SEQ ID NO: 89447 - protein, 159 aa, Unknown
  Obtained from environmental sample
  misc_feature (1)..(159): Xaa is any amino acid
MEMGKRKQKTLKAASLELGINYRQGKRVYQNYLGGGDRTLILGNKVKPSNRREDQTLVQRELDLYAEKYSDFGPTLAQEKLRERDGLDIGVSTLRRELSTAKLWMPKRNGREYRALRTAREHFGELVQFFEEETMFGAMIVLKMWIETYGIPESLYSER

SEQ ID NO: 89448 - protein, 177 aa, Unknown
  Obtained from environmental sample
  misc_feature (1)..(177): Xaa is any amino acid
VLTRDPTDSELLAGITQPKSHFGKACGKLGVQVIAANSPQAKGRVERNHGVDQDHLVKELRLAGISSVEKANAFLLETYLPYMNSKFSRPPQNADDAHVKPGTAVLDDILCMEHDRKVSKDYIVRFECRLFQILPEAKVKPRPGDAVLVRIKMDSSVCILWKNKALLVKEIKTMFDE

SEQ ID NO: 89449 - protein, 526 aa, Unknown
  Obtained from environmental sample
  DOMAIN (362)...(437): Hpt domain
  misc_feature (1)..(526): Xaa is any amino acid
ASLLNDIITLVITRLGEKPIRFRLNIKDDLPNKLNGDDLRVKQIFTNLLTNAVKYTQEGSIELSVNCAREGGTVWMDVAVSDTGMGIPKDDIKSLFLDYYQVIANATRNIEGTGLGLPITKRLVEMMDGQISVESEQGKGSTFRFRIKQGFASDMTLGAEVSEKLRTFCYSDDKRIVSRKLSRVNLSYARVLVVDDMQTNLDVASGILRKYQMQVDVLNNGPAAIDRIREGKPVYNAIFMDHMMPGMDGIETVDNIRALDTEYAKKIPIIALTANAIQGTDKMFFAHDFQAFITKPIDIMEMDSILRKWVYDSKRADESVSNGPVTGDSSEDENENIVIEIPGVDTKKGLDLYAGETDIYLPLLRSYAANTPAALNKLSSVSAQNLSDYVITVHGLKGTSAGIGADQIRAAALELENISRTGNLQGVLAKNDKLIADTKIIVSGIKEWLDKNDIHEAKPRLKAPDKELLKRLREYCENFDIDGIEEVMSELEKADYEEDADLVKWIREKIDISKMGEVAQRLGETA

SEQ ID NO: 89450 - protein, 497 aa, Unknown
  Obtained from environmental sample
  misc_feature (1)..(497): Xaa is any amino acid
MDNIRLKSILLDQAIINAHIAENGDANWNIMKPGEEKKPAEEAPDDKSASEKTSSLKIALNKFEIRDAKLSFQDDKNKMTAAADDLDFILQGDMALDNVDLKMKLDITDINFLMGGIHMLTNAHVGFVSEVDADIKNMVFTLKDNKFNLNEIILKFAGSARIPGDIIVDMTFATETIDFKNVLRLVPSVFMKGFESIKTTGSFALSGDIKGTYNNKQMPNANVNFSIDNAMFKYPDLPKSVDNINIKLKAFYDGAVFDNTTLDLDKLHFEMAGNPFDAELHVKTPESDLQAIAKFLGKVDFNSLLDIVPLDNITLKGLLECDFSLAGRMSTIEKKQYEDFDAKGMVKLSGLDFKSPDFPQAVKINNTQLNLSPRRVDLADFDAVIGKTDINMNGTLENFIPYVFKGSTVSGNLNLKSNNIDLNEFMGPKDPDKKPDEKPAEKSEDSSQMSVIEVPKNIDFAMKINIGNLLFDKLKITNTIGSILVRDGKVQMQNLGM

SEQ ID NO: 89451 - protein, 367 aa, Unknown
  Obtained from environmental sample
  DOMAIN (101)...(366): Domain of unknown function (DUF323)
  misc_feature (1)..(367): Xaa is any amino acid
ANWNAATGLSAGTLTIDAAIPAADDYNISGTGVFLYDGNARTVTVTPKTGKSTGAITVKYNGSTTAPSAVGTYTVTFDVAVATNWNSAMGLRAGGLMIGPGAVEMVNVPGGSFQMGTASGGESNERPVHTVTLTGFYMGKYPVTQAQYQAVMGSNPSSFSSNPASGEVQGNRPVEGVSWYDAIVFCNRLSMAEGLTPAYRINNSTDPDAWGTVPTSFHNDTWNAAEIVTGSTGYRLPTEAQWEYAAKGGNGTPGNYTYSGSNTVGDVAWYRDNSGSKTHEVGKKAPNGLGIYDMSGNVQEWCWDWYGSYTSGAQTDPQGAASGDSRVQRGGCWNDNDSHFASVRSVSPNGNYPHDYYIGLGFRLVRP

SEQ ID NO: 89452 - protein, 218 aa, Unknown
  Obtained from environmental sample
  misc_feature (1)..(218): Xaa is any amino acid
MSYDWVGMSPFASALWAGITLGVTQIAVEFKDGFSPYGFSVYDAMAGTLGGFYAMGKRFVPAMQYVDYKWTYCPNYSGYWDAVRQRGGEMMGGKLTGGDGVFVDDYYGGNQTHWLSFKVAKMLPESAKTNYPRWLAFAFGWGIDEGYYIAERGRSSYEYYASLDYDLEAVFNPQKTWSKNLVKMLNFVKFPAPAVRFGGRNGTKFFPLHPWHGFYVIF

SEQ ID NO: 89453 - protein, 441 aa, Unknown
  Obtained from environmental sample
  DOMAIN (24)...(137): PAS fold
  misc_feature (1)..(441): Xaa is any amino acid
MSDESTNNVLEQLPDTGELAQIMLDTVPLGITLWDMNGVMVDCNMEAARVVGIQSKREYFEKFADLAPVYQSDGQKTADKLMNTLTTALREGSCRVDWEHKTVDGELIPFDITAVRLRYKERDFVVSYARDMREINAANAKMREADERAQILLGAAPVSCTLFDENNRAIDCNAEALKMLNVLDKDDYLNNHLKYSTEYQLDGTLSAEKAVALAQKAMETGYLRFEWTHLDADEQVVPCEVTLVRVRYKGQFVIAGYERDLREFKAMVKEMQRAEIAEESNKSKSRFLAAMSHEIRTPMNVILGVTEIQLQDESLPPHLREAFMQVYNSSDLLLGIINDILDFSKIEAGRMEFTPVKYGLASLINDAVHLNMMRNSKPIAFELDVAEQMPAHLFGDELRIKQILNNLLSNAYKFTDEGRIKLSVSAEESAGDGITLLLTVS

SEQ ID NO: 89454 - protein, 596 aa, Unknown
  Obtained from environmental sample
  misc_feature (1)..(596): Xaa is any amino acid
TTGIVETDDAVDTTGIVETDDVVDTTGIVETDDAVDIASIVGTDDAVDTTGIVETDDVVDIAGIVGTDDAVDTTGIVETDDAVDIAGIVGTDDVVDTTGIVETDDAVDIAGIVGTDDAVDTTGIVETDDVVDIAGIVGTDDAVDTTGIVETDDAVDIAGIVGTDDAVDTTGIVETDDAIDTTGIVETDDAVDTTGIVETDNAVDIAGIVGTDDAVDTTGIVEVETDDAAINVNANDVLDTETVIDGNDIIGTEEPPMIDIVDTIDLINVNEMLGTGDVVTMMDMDDEIRAAMRAAAEATAAASAAHKFMDMDDEIRAAMRADVSVQPVSDPIVSAPLNDRFASADEVVEQTDEAAVGQMDMDDEIRAAMRAAAGNVSLPVDSDAVVSDTVISDTVISDPVDSDPVDSDTVISDTVVSDLVDSDTVISDTVVSDPVINNLVDIDTPSPAAAPVAADDDAIVEERLRQLLIDEGPDPDLPLGSLDVDDDVIDPALVPAAASAAASAAASATPPPPPPPMPVGAGSAAAEGTTVIAPPDDRDTPFDLPDHVLTSTLADIYYQQGQPQLALHIYERVVLRDPADRRLLAKVEEYKGGFAR

SEQ ID NO: 89455 - protein, 56 aa, Unknown
  Obtained from environmental sample
  misc_feature (1)..(56): Xaa is any amino acid
ENNGQKANHIVSAVDNGGFCIGEVLVDDKSNEITAIPELLKQLNVQGTIVTTDAAD

SEQ ID NO: 89456 - protein, 261 aa, Unknown
  Obtained from environmental sample
  DOMAIN (10)...(85): RNA 2'-O ribose methyltransferase substrate binding
  misc_feature (1)..(261): Xaa is any amino acid
MRNKLTDELAICGMNAVLAAAECHPQKINRLFLREDRLKSFTGICKQLAERKRPYKICEDEELERVCKSVHHQGVVAMIEEPVIEPLSEEDLELWANEKKTGVILNSIGNDHNLGAIARAAAFFDVSFLILNEKDEAFNGEETRPLAKHALTTSAYRVAEGGFEHLTVRKIKNTAAFLKDASKKLLTIGTDTRARRRIGDLNGILKNRQGVVLVLGNEETGLPKEVKDKCSCLLRIPGTGNIDSLNVSQAATLFLNAIYNF

SEQ ID NO: 89457 - protein, 285 aa, Unknown
  Obtained from environmental sample
  misc_feature (1)..(285): Xaa is any amino acid
MEINNTEEFWIKAVKQDKAAFQYVPKEFKTKELCLEAVKQNYKTLRGIPREFKTKDLCFEAVKHDANALEYVPEELKTPELCIEAVKQNVNAFEYVPDRHKTVKMCLEVVKQNHNMLQFVPEELRTAEIWVEAFKQGDKWIKEIPEELRTAEMWLEALKHEGNWIREIPKGFKTAEMCIEAVKQNVSAFEYVPKEHRTAKLYLEAVKHHNFSILNIPNELRTAELCFEAAKQDSFAFLEIPEKIRTMEFCLEMLKRNHELFKRYIPPELQKVEFWLGAVKIDENA

SEQ ID NO: 89458 - protein, 607 aa, Unknown
  Obtained from environmental sample
  DOMAIN (79)...(342): Glycosyl hydrolases family 38 N-terminal domain
  misc_feature (1)..(607): Xaa is any amino acid
LERRRAIHSLFYDIRALYETTKIADSNSLRKAQILKTLSLALNGISLSADGDELEKQAAAAAKMLAPLLAMKNSPSTPNIHLIGHAHIDHAWLWPIAETERKVARTFANMARFAKEYPEFIFIQSQPCQLEIIKNEYPDIFASIKEAYKNGNWEPNGGMWVEADTNIISGESLIRQFLVGMKANKEMLGHVADTLWLPDVFGYAAALPQIMAGCRIKYFVTSKINWNDTTRFPYETFIWRGIDGTGVKTHFLSTIGPGAGYNGRVVPEELSAVWNAVQHKEVQSACVKSIGEGDGGGGTLRADLEMARRLGDLEGTPRAAWKTVSAALAEIFESGEFPEWRGELYLELHRGTYTTQARTKRNNRLLEFALRRAEFFCSLAVIGNQGEYPHEILLDCWKHTLTYQFHDIIPGSSIGRVYKEAEADSAEMLTKLAQTCEIGKHRLVKAMYTSKETAVFVFNDLSWERETVVTISEDLAEKAAALQSADGEVYPVQRYIDYDGNKRGVFSPKMPSLGWTRLAVLNENKEEKTPFIWKKNILESPFYIITFDMVGRITSLVDKRQSREMVMPGGAFNALITAEDVPVFWDAWDIDADWTKHIRQETRLVST

SEQ ID NO: 89459 - protein, 402 aa, Unknown
  Obtained from environmental sample
  DOMAIN (31)...(219): ABC transporter
  misc_feature (1)..(402): Xaa is any amino acid
MSEYILEIENLTKEFPGVKALDKVNLRVKKGEIHSLCGENGAGKSTLMSCISGVYPNGDYEGKVFFKGRETNYNSVKDSEKEGLAIIHQELALSPYLSIYENIFLGHMETSFGVINWDKYIKESKKYLNTVGLYEPPETVVSKLGVGKQQLIEIARALSKKTELLILDEPTSSLNDDESEKLLNLILEFKKQGITLLMISHKLKEVLKVADTVTILRDGRSISAYDVKADNLTEEIIIKDMVGRDLTHRFPERRSSPGETVMEVKNWTVYHPDYHDIKVVDDVSFYLRKGEILAFCGPMGAGRTELMMSLFGRSYGSRSTGELCITGKTCTFNSARAAINSGLGYISEDRKGLGLVLIQDVKTNIGHASLDKLSRFGIIDNQKEIQAAERYRKELNIRTPSI

SEQ ID NO: 89460 - protein, 286 aa, Unknown
  Obtained from environmental sample
  DOMAIN (48)...(285): Branched-chain amino acid transport system / permease component
  misc_feature (1)..(286): Xaa is any amino acid
MSDKVIHTSDTKTLIKNNIRNYSMFIMLALIMLIFAPLTNGNNWNPRNFTNIFFQNSYVLILAIGMVQVIIVQGIDLSVGSVCAFVGALSAMIYNTGVGMPVALLAALAMGVGIGAFQGAWVAYAKMPAFIVTLAGMLLFRGLTYIVTKVNPIGLKDTGYSHLSTGTLDEMFRTSRIGPYFPMALVIAVLVLIVFFIAEIFGRRKKIANEFEVSSMPVFIGKLVIISLLVLGLADRFARYRGLPIVVLVLGIAVFAFHFILNNTVLGRYIYAVGGNPRSAKLSGIN

SEQ ID NO: 89461 - protein, 439 aa, Unknown
  Obtained from environmental sample
  misc_feature (1)..(439): Xaa is any amino acid
MCFELLLEHAISVILALTALAHVRGQANKTDPPKDKSPKPAQVQQTKKTLDQTPAQKPTQAVPPKQAQVTAPKAPQVAAPKPAQAVAPKAAKDPAKPDQAPAPKPTKAPAQGAQAGASKPAQTAAPKPTQSPTQADKASVPKTQDPKPAQKPDKDKAQTTEDGAKKPAKQPVQKPLPKPAQKPTPKPVPKPAHKPAPKPMPKPTHKPAPKHGHVPAHLAHLPAFLDNPDVIDFIGRMVVSYGFDADTLKEQFSMIEPNIRALTLFRPVWPPPVQQPQPRQTQPKGTSVQSWKHYSAPFLNSNRVAGGVTFWRENAATIEKASDQYGVPPEIIVAIIGVETLYGRHKGGFRVMEALASLAFHDPKRGDFFREELENFLLLARENGFDPLKTQGSYAGAIGIPQFMPKSWRRFAVDYDGDGRIDLDNNVADSIGSVANYMK

SEQ ID NO: 89462 - protein, 81 aa, Unknown
  Obtained from environmental sample
  misc_feature (1)..(81): Xaa is any amino acid
MDTITVCMGSSCFGKGNSSNADFITRFIEEHNLQNSVEVSGCLCSNACARGPNIKINDKLISGVSEQTIADVIVKELGLQL

SEQ ID NO: 89463 - protein, 358 aa, Unknown
  Obtained from environmental sample
  DOMAIN (69)...(342): Iron only hydrogenase large subunit, C-terminal domain
  misc_feature (1)..(358): Xaa is any amino acid
MSAALGATKAPVYTELAECHDCYKCIRKCPVKSIKVEKGQASILFDRCIYCGRCVMSCPAHAKHYRNDVEKVKRLLADGRKVMVSLAPSFVSEFPDWKQEELIAALKKLGFTGVSETALGADFLSARSALDLASLTERSAAAGSTPAGSSSSPLMISSACPVIVDYIKLYKPLLAPYISPHASPLLTHARFLRSRYGGESGAETAVVFIGPCIAKKHEADLYSKEIDAAITFAELREWLEKERVTPRTISSSHPAPADCAFEPRRSAKGAFFPLEGGEITAFSAYIAEAAAKEGTRINTISASGFHAVGSLLEGFDPAALKEPLFLELLSCPGGCPHGPGMTGAAPGAIRHMRLKNYA

SEQ ID NO: 89464 - protein, 77 aa, Unknown
  Obtained from environmental sample
  DOMAIN (1)...(62): Global regulator protein family
  misc_feature (1)..(77): Xaa is any amino acid
MLILSRKTNEKIMIGDDISVSIIEIRGDQVRIGVDAPKSVKVFRQEVFDAIKAENKAAAQSAPVLPVLTIDAKREQV

SEQ ID NO: 89465 - protein, 149 aa, Unknown
  Obtained from environmental sample
  DOMAIN (17)...(140): Uncharacterized BCR, COG1699
  misc_feature (1)..(149): Xaa is any amino acid
VKVLTKAYGTIEVNERQKITFPSGLFGFESLKDYVLLDAAQQPFYWLQSMDEENTAFILIDPFIFRPDYEMDISNEELLPIGISESEKAVIFSIVTIPPDNSPMTANLQGPLVINRESRLGIQAVLTDSRWKTKHDIMAELASLKREGR

SEQ ID NO: 89466 - protein, 289 aa, Unknown
  Obtained from environmental sample
  misc_feature (1)..(289): Xaa is any amino acid
DIPPKNRNDSLRSNIPAGFNREETPGQIGQGTDIGRITRLRDELLDRRIIAQAGGEGYWNARDPYIREMEMIYLEPGNKSIRSKMDEYWDAWQELSIYPADTAPRLALLERGKTLIDGIHERYFALKTLQERADEDIRMTVSEINDLSSQIAELNNVIQKVKAQGDNPNDLYDRRDLLVDVLSSKLNVTVDRRDPDEFMVHTNGIVLVQGRIGRQFDLVLNPETGYSDIVWSETRNKLEFLNNDHNGSLGALVDLRDYTINTEIQTLDNMTMNFVGLVNEIHEKAYGIN

SEQ ID NO: 89467 - protein, 87 aa, Unknown
  Obtained from environmental sample
  misc_feature (1)..(87): Xaa is any amino acid
MLESETKRRIDTARDILVGKVPDPKSQVEQITIALIYKFMDDMDRESKEMGGKASFFTGEFKRYRWSNIFNPRIGGHEMLNLYAEAI

SEQ ID NO: 89468 - protein, 373 aa, Unknown
  Obtained from environmental sample
  DOMAIN (1)...(282): Alpha amylase, catalytic domain
  misc_feature (1)..(373): Xaa is any amino acid
YNEFGELVKTLHENGISVILDGVFNHTIMDFFAFQDIKEKKENSQYKNWYLNINFFQNNEYNDGFSYEGWAGHKSLAKLNLDCRDVRDHILGAVKYWIDEFDIDGLRLDAANVISVNFLRELSSFVKKINPSFWLMGEIVAGDYRSLVHEGCLDSVTNYELYKSLWSSFHDQNIYELAWTLKREFYNDGLCKDLAVYNFADNHDVNRVASSLKNQSNLFPLYGLLFCVPGIPSIYYGSEYGVLGKRGEWDDYELRQAWEDNWAESNIGKGLFKEICRFSKLRRESYALKNGNYCELLVDYEQIFAFSRETNNEIIIVAVNATHNNKKCILNNEQIRYAKWFDLLLGEEYFSNNNILELSLQSSWLKIFKKNMN

SEQ ID NO: 89469 - protein, 505 aa, Unknown
  Obtained from environmental sample
  DOMAIN (324)...(500): Protein export membrane protein
  misc_feature (1)..(505): Xaa is any amino acid
MNIAEYSVKHPVTIIMIFALVIGMAVTMLPTLAVDLFPSVQNPVLSVSVSFPGAGPTDVEKNVTDRLERALAGSRNLVNMTSSSQFEGCSVNLQFAYGTDMDRAAADTQTIVSRLANSLPDGAGTPVVRRFDSSASPIMRLSVRGNYPPDQLRIFAEDEIQSQIERIEGVALAEVTGGTTQIVKVAVALNRLAAFNLTLSDVSSALRGQNVLASGGNLRRGTREYQILTQEELVSLNQIKRLVVKTVNMGAIGPSQPNRSQLIRLEDIADISLGYNENAARVYNNGQSGVYIQITGEANSNQVQVSGRVRAALAGINNKLPQGITLEVLSDNTTMITATLDQVYKNAVQGAFLAMLVLFVFLRNIKGTLIIGLAIPISILLTLMFMAVFGFTLNLLTLTGLVMGLGMTVDGSIVILENIHNYRLRGAKPEIAAILGSREMLRAIIASSATTLCVFISPMIYKNQLEMIGQFASDLIFTVVISLACSLAVAITLVPSLCGSIIKLN

SEQ ID NO: 89470 - protein, 245 aa, Unknown
  Obtained from environmental sample
  DOMAIN (33)...(99): His Kinase A (phosphoacceptor) domain
  misc_feature (1)..(245): Xaa is any amino acid
MEWSNGRIVHIQHSVDVNELVIAKEQAIMANNAKSNFLAKMSHEIRTPMNAILGITEIQLQNKNIPDDIQAALGKINHSGYLLLGIINNILDMSKIESGKLELSIGSYDVPSLINDTVHLNVVLYDNKQIGLNLDVDENIPSRLLGDELRIKQILNNLLSNAFKYTEKGEISMSISAEYKEEDALTVTLVFRIADTGQGMKPEQLDKLFDEFTRFNTDVNSKVEGTGLGMSITKQLVLIMGGTID

SEQ ID NO: 89471 - protein, 141 aa, Unknown
  Obtained from environmental sample
  DOMAIN (1)...(89): CAAX amino terminal protease family
  misc_feature (1)..(141): Xaa is any amino acid
ILSVAIVPAFVEELLFRGVILNGFKDNYSHKKAIIVSSLLFGIVHLNPWQFVTASLFGIASAWVCLKMKSLTLSIYMHLFNNTAVVFARETRDIIPIEGFNSGSSVQTFQPLWFDVLGIVLVSIGIILFLGEIEDATSAPS

SEQ ID NO: 89472 - protein, 338 aa, Unknown
  Obtained from environmental sample
  DOMAIN (1)...(140): short chain dehydrogenase
  misc_feature (1)..(338): Xaa is any amino acid
MNILIIGGAGYIGSHVAKEFLEKGHRVTVYDNLSSGLRENVVQLASCGATSNSCDSRSFTFIHGDIHDYPGLVAVMKGSYDALVHLAASKAAGESMLQPEKYSRNNIIGTLNILNAASETGIKNIVFSSSAAVYGEPEYLPVDEKHPTKPENYYGFTKLEIERFLIWYEKLRDIRYACLRYFNAAGYDVKGSIKGLEQNPANLLPVIMETACGMRPEVQIFGNDYDTPDGTCIRDYIHVSDLAIGHAVALDYIRANDASLTVNLGSETGSSVTEVIETARKVTGRPIPARVVGRRPGDSAKLYASSARARELLGWQARYSDMETLIKTSWQVYQEHKK

SEQ ID NO: 89473 - protein, 536 aa, Unknown
  Obtained from environmental sample
  DOMAIN (296)...(324): The GLUG motif
  misc_feature (1)..(536): Xaa is any amino acid
CGYETGTSGAETIKTGGTGNGTNGADVSLGSTQSGVFNGAGGGTVGWQGADWNITGNLTINVALPTLKTNTQSPAPTLPAEYTVLGSADNPFLVTNETELRKVGTGTDGWTMSAHYKQMANITMTTNNWVVLGAFKGSYNGNGFTVSGFTLNHPTTDYRGMFENIDLTGVVSNLGLVNVNIKGQNYVGGISGGNEGTIINCYVTGTISGNNYVGGVTGMNRGKLENSYNTATVSGNQSVGGIAGANTGSGKYIKNCYNTGNVTASATSNTYAGGIVGANQSNALIEYCYNIGNVSGPASVGGIAGTNDTGCTVQNCVSLGARITGTGTSSIGISRVSGTYGSGSTLTNNKARADMKVGLSGAEATATGASNNGNGADITVGSTTTQTSVFSGWTAVWSVSGNLTAGGALPTLTANTQSPAPTLPAAYSPLGSADNPFLVSNETELRKVGTETAAGGWTLTAHYKQTADITLTSAFTGIVYTSSKFNGSYDGGGYTITGLNITATSSNLGLFGYIGSGTVKNVNASGTVTGTGSVAG

SEQ ID NO: 89474 - protein, 210 aa, Unknown
  Obtained from environmental sample
  DOMAIN (5)...(207): Beta-lactamase
  misc_feature (1)..(210): Xaa is any amino acid
MKEKLTKLLDESSGQLYGKAICAVSKNGKRVFSHSVNCAMDSVFDLASVSKILTGTMVLKLIGEGKLSLDNSLDVLFQTEALGPVTKERFKAITLKQLLTHSSGLPAWFPFYTQVGSFWDVLEVALNKYQVEKGMVYSDLGFMLLGEAIRAASGRTLPQSLDLLNDELGTSFAYNPQNPAACVETERGNRIEEGMCQERGLSFDCFRSRE

SEQ ID NO: 89475 - protein, 259 aa, Unknown
  Obtained from environmental sample
  DOMAIN (90)...(235): HD domain
  misc_feature (1)..(259): Xaa is any amino acid
MDLVKAGLIIAAAHLVVMTAVLLLQYAAAGVYPQALFWAAFNGVASGMLILGLLSPLEHLLNAATTFRLIELSDLNAPILRRLFTVAPGTYSHSIMVANLAEAACQDIGANSILARVGAYYHDIGKMENPGYFIENQTDYNPHDSMAPRLSATVIRSHVKLGVEKARQLGLPDEVIDIIAEHHGNSVITWFYSKALKQENSKNPTVNIEDYCYPGNPPHSRESAVVMLADLCEAAVRSISKPNAAKIEKFIKELIANKV

SEQ ID NO: 89476 - protein, 194 aa, Unknown
  Obtained from environmental sample
  DOMAIN (1)...(98): CBS domain pair
  misc_feature (1)..(194): Xaa is any amino acid
SGHSRFPVYEETIDKVIGILYVKDVLKSLVKTGLVKNGDSSFDIKDIVRKPFFVPESKRIDDLLRELRRRKVHIAVVVDEYGGVSGIVCMENILEEIIGDIQDEFDNENEDVLDLGGGAWLCETRVNLDDLSGRIGIKFPVEKFDTLGGFVFDLFGKIPVKYEKAVWEGHDFIIQDMEGHKINSVKIILNEKEE

SEQ ID NO: 89477 - protein, 221 aa, Unknown
  Obtained from environmental sample
  misc_feature (1)..(221): Xaa is any amino acid
MYEKQPWLKHFGETPANLNYPDLSMYASIREKSEQYPDVDSFIFFGKRTRRADLDKRIVFMSRKFAQIGIKKGDVVIVCLPNIPQAVVSFYALNRLGAITAPIHPLSAAPEIETFAKQVSAKAAITLDAFYPRFAEVISSAGFNKVLVCSLKTEMGPLTRTVFALGPGRKIKPVPYSATILDWANLRPGKKPQSWKSPTQSARTKWPSYFFQAAVWLCPRP

SEQ ID NO: 89478 - protein, 391 aa, Unknown
  Obtained from environmental sample
  DOMAIN (329)...(391): Histidine kinase-, DNA gyrase B-, and HSP90-like ATPase
  misc_feature (1)..(391): Xaa is any amino acid
MGLFIYSIFFAIKPCVFLSIELLVLLPLLAALSFVGMKDLVLFENYIKIIFVGVFSGFLSFKVYYSTLEGIANKKLIEMESEAARDALLRFETIWNWVECGIVIINAATKEIIDINPVAVRMFGGERPAIIGNCCHEVFCPADKNSCPILDFDQEVDRSECEFLNAKGERLPIIKSVIKITYNGQPALLECFTDISNLKKAEEQLRIMSIAEKANQAKSDFLSRMSHEMRTPMNAIIGMTKIAEKTDDVSKLKYCLSTINTSSVHLLGIINDVLDMSKIEAGKFELEMLPMNIEKMIMKVSNIIIDNIEKKNQKLNIDMAKDMGMDYIADDLRLSQVVTNLLSNAVKFTPENGEITLAVAETGSKDNFNTIRFSVTDTGIGMTEEQIARLS

SEQ ID NO: 89479 - protein, 93 aa, Unknown
  Obtained from environmental sample
  misc_feature (1)..(93): Xaa is any amino acid
MAELRYKLTRDTLFKLFFVKHPDLLKNLVSRVLGISVDVITNFVIINPNIAPQSLGDKFCSLDINMEVNDQRVNIEVQVEDEGDYPARSLYYW

SEQ ID NO: 89480 - protein, 135 aa, Unknown
  Obtained from environmental sample
  misc_feature (1)..(135): Xaa is any amino acid
FIDGANNRQLLLWNKVDITPPSTSSSNQNFISVSAKTGEGLARINAAISSAIKEQTTVHQDAPITAAVGTERQKKLVDAAVCALEEALTLARREEPLDLIAPLLREAVNSLGEITGEVSTADILEEMFSRFCVGK

SEQ ID NO: 89481 - protein, 248 aa, Unknown
  Obtained from environmental sample
  DOMAIN (2)...(132): Toprim domain
  misc_feature (1)..(248): Xaa is any amino acid
MLILCEKPSVAKEFAALFNARHGKGHYQAGDTTVTYCVGHLYELLPPEGYDPKYKKWSLEDLPIIPSSFAYQENKSTLEQAEIVSALLKKHKGDDVLIATDAGREGELIARIAMLMAGISDTGRFRRFWVSEALTPSVIEAGIKCAKPLSEYDSLAAQGFARQRADWLVGINLTRFMSVGSPPPPLTVGRVQTAVLASIAGRNNEVKNFTAVPYKKLEASIKSKDGVSIKAYLENPKTGSASFFECDW

SEQ ID NO: 89482 - protein, 114 aa, Unknown
  Obtained from environmental sample
  misc_feature (1)..(114): Xaa is any amino acid
AVLDGRPNFHINVVNQVSPYCDCHAESDAAVIPDIGIFAGFDPVALDKACIDAVNAAPAIQSSILSERERSHRDAAGNEDYFTNIHPTTDWRKQISYAEEIGLGSGKYELITVK

SEQ ID NO: 89483 - protein, 374 aa, Unknown
  Obtained from environmental sample
  DOMAIN (197)...(319): GTPase of unknown function
  misc_feature (1)..(374): Xaa is any amino acid
MAQQLHETRERQKRALLVILSDDNTGELQGLVKTLELEIAGQEIVKIRERQPKFGMGSGKAEEIAGKAKELEADCLVFDWDISPSQQQNWEDLSGIPVIDRQELIIHIFAMRAVTRESDLQVQLAELHYRLPRLTHKYIDLSRQRGGRYGTKGAGETKLETDRREIQKRIHKLEKEIENVAKQRQVQRQQRERQGAPVCAIVGYTNAGKSSLFNALSGSAVLVEDKLFATLDATTRRFEPAPGMEALLTDTVGFIRRLPHNLIKAFRSTLEETAHASLLIHVLDAADPNIESYFGTTVSVLQELGAGEIPVITVLNKIDLLADTAHQDAAHIDAVHQDAVLSRFPQSLGLSAKTGEGLDELKLRIAEKLSGSVM

SEQ ID NO: 89484 - protein, 391 aa, Unknown
  Obtained from environmental sample
  DOMAIN (1)...(353): Major Facilitator Superfamily
  misc_feature (1)..(391): Xaa is any amino acid
MLIVGITENIKGVSYPLIKEQFGVSWEQQGLMVSMLSIAYVGFSVIAGIFLGRFGIKPSFLFGFSALCVGLFSIFFMPGFFLTAAALFVVFAGFGFFEVGLNALATRLFITKAALLMNLLHSFYGIGAMIGPKAAGLIAGNASFGWRYVYLFSLPLALIFFIPAIFIRFPEESHRMDAVAGQSLADGISPLKTPRKSFFDALKSPVVWLMSITLGLCVTVEISSSNWGVMYFKDIYKINPNTDGASFLSAFFLLFTVSRLVCGLFVEKIGYMRALLFSAFIVLAVFIAGFLLGEKGIYLLPSLGFFVAQFWPTLMAVAIVSFGGDAPVFSSAMIAISGLLNAVIQFIIGLTNKFFGPAWGYRSAIVYTLLLIVALVMLYRKLGSRESRVGS

SEQ ID NO: 89485 - protein, 464 aa, Unknown
  Obtained from environmental sample
  DOMAIN (157)...(359): Carbon-nitrogen hydrolase
  misc_feature (1)..(464): Xaa is any amino acid
AVILFPRRAYLVQWSIWLAYEYLRTKGFLGYPYGITGYSQWRMIPLIQIAGLCGVWGVSALVVFSSAWLGAALGGKKILTTEVTELHEGRGIRNQNSVVCEPQVRRVLRGFIFLKTRIASFFRTEKVSTLCWAAALVATVCYGLAQSADYSSAPKANIALIQHNTDPWKGGIEEYRNNYVTLKRLSDQALAAQPKPDMVVWSETAFVPRIYWHETYRDDPSSWLLVKELREYLSAQDVPFVIGNDDAIKDPTKNPRAQEDFRVDYNAVILFHQGKNIAVYRKLHLVPFTEHFPYEKQLPLVHRALVNADTHFWEKGTEATVFSGPGFTFSTPICFEDSFGYLSRKFVRNGADLIINLSNDAWSHSLPAQNQHLSMAVFRAVENGRSMVRSTASGQTCGITPDGRIIAMAPPFTPAWLTVAIPIVKGDTVYTRRGDYLGIGFTIAAFLLLLLGGLAGIISIRRRP

SEQ ID NO: 89486 - protein, 509 aa, Unknown
  Obtained from environmental sample
  DOMAIN (197)...(414): RNB-like protein
  misc_feature (1)..(509): Xaa is any amino acid
VIHTGPVNNFNEIDCCSPAPSDIREAWELLSGEGASLSLKDLAGFICNEYTPSSAYAAYCALKDGLYFYGTIDSVLPRSKDEVISEESKRTAVLLESGERLQFLERLKACVKNPTGNKLLPEDARFLQDVEALAFGKSIKSKTMRDLTLSETSEDAHLLLLKTGFWTVMVNPHPNRCGVTLSSASICPAPPPEEIRRDLCHLPAFAIDSPWSSDPDDAVSIETEEGKSILYVHVADPAASISFNSPQEKEARDRGATLYLPEGAIRMLAQEAIPIFALGLSEKSFALTFKMTFDNDGMVLDTEIFPSVVKVLRMTYEEADRVMDTDNGTDQTDATALRALFSLSRKIYNRRTAYGAVNIDLPDVHITVENEKIEVTPIKEYRSSFLVKECMIAAGEGAGDWAAGKGLPFPYISQEVEIQGKVLGGFAGSMQLRKCMRPRTLSVKPGRHQGLGLDTYTQVTSPLRRYTDLLAHIQIRAFLRGNKPLSSDDVSARLGFSDAAVTAVVHAER

SEQ ID NO: 89487 - protein, 383 aa, Unknown
  Obtained from environmental sample
  misc_feature (1)..(383): Xaa is any amino acid
MYEISEDAKAQNDVVLENNFLNLRFLPSTAEIILTDKSSGVQWRSNPPNPAADHMADVVTRQLMESQFSLDYADNSGVGMTLQSGAYSVQRGAYEYEVVDGALEVRYTVGDLARNYRIPPAMSEERMNVYLDQMDWEERGIVESTYRLYDINNLRMNDDKEKLLAEFPELAKIKLWVLRVVSPDFMKEEAEESFRKAGYTMEDFVEDSLRYELSGGAVKPAFSITLRYLLDGRSLIVNVPFDKIGFRAVYPITQLALLPFMGCGSTADSGYMLVPDGSGSLIYFNNQKQNQLPYNIRVYGWDEAMPREAVISDNKALFPAFGIHKNGSSLFCVIEEGSAYASVRADVSGRNSSWNIVYPFFDIVHGALMDIAGRNQRAVYLYE

SEQ ID NO: 89488 - protein, 69 aa, Unknown
  Obtained from environmental sample
  misc_feature (1)..(69): Xaa is any amino acid
MPLNNKQITFIASIKEKIRLAQYEALKEMNTQLIKLYWEIGKDISERQGESWGESIVSVLSKELQQEFP

SEQ ID NO: 89489 - protein, 288 aa, Unknown
  Obtained from environmental sample
  DOMAIN (3)...(197): Amidohydrolase family
  misc_feature (1)..(288): Xaa is any amino acid
NSQILPTLPIRAIQEYCLAHECSSYDLKWGDGIEIEHEMAKQKNWPFITHLSEGFDDEAMHSIERLEKLNVLDDHCLFVHCIAFSDEDIKKTAKAGASVSWCGFSNMFMFNVTAKIRKMIKAGVNITIGTDSSASGSANILEEIKYDRKLYQQLYGEDLPAKKLFEMVTINAAKAFRMQDRVGALEEGLLGDIIVIKAKNSDPYENFVNAGMKDIEFLALAGKPIYGEMRFMDIFNGKLPSDYTQIKVGNRDMFVKGDPAGLYNEARKKIGFKKVLDFLPFEPTQEGT

SEQ ID NO: 89490 - protein, 142 aa, Unknown
  Obtained from environmental sample
  misc_feature (1)..(142): Xaa is any amino acid
LGHFNKVAETIYFFSKIDIPEEIKNICSDKRPTPSGGDKKQKQIDDEVKKVKKRMPNWFSKTKQNNSKILYAFLKLYEQNNGIVPLEKLKKEANIEGKFETNFSSMKNFGERNHGKIFEQEGDNVCLWYEVKDIILNYYKKL

SEQ ID NO: 89491 - protein, 430 aa, Unknown
  Obtained from environmental sample
  DOMAIN (259)...(424): GGDEF domain
  misc_feature (1)..(430): Xaa is any amino acid
QGIYRKNAFWIGDTDKKYYFNGEYVYTIDPSDESSWWYNSIIENPTPYTLTVNFDVGLKKTMLWIDVPVLNDDHKSVGIVGTGLDLSDFINAINHKNERIEDELYFFNITGELIKAKDIDLVEKKASITDVLGKTGDEILARTKELKIDEIEYFKSKTKRQIIAITSIPVSSVPALSWYITAVRHVTITDFLHTGMTVLFGIMMAVILFVFVFFNIFIAIMLEPLNQMVRTINQTFSDWDMKPQKSDHHKDEIGTLGEYFHMTIIDPLTGIYNRRYLDGSLRKIIKLHSRTGGSLSVLMIDIDFFKKYNDTYGHDSGDVCLGKVAAALSECVIRKEDFVARYGGEEFAVILPNTDENGAKQVAERMLEKVRECNIPHKASDTAGYVTISIGGTTNIIDHLQHGSDYIKAADKALYESKHNGRNRYTAGKL

SEQ ID NO: 89492 - protein, 571 aa, Unknown
  Obtained from environmental sample
  DOMAIN (6)...(83): Bacterial Ig-like domain (group 2)
  misc_feature (1)..(571): Xaa is any amino acid
GIKDVPVTGVTLNENSISLDIEETKTLTATVSPSNATNRKVGWVSSNPNVATVTYGTVLAVSAGSAAIIVTTEDGSKTAYCSVDVNDPSLSTLSGTITISPSGPVAVNTELTATYSGQEAVSFRWKKDGNNIGTASNANPNKYTPTTEGSYSVTVSINGYNSKTSAPVSVTSGEEDNKDFGPGSLKLSGQVYKREETYSENDVLQTVTYTAINENYSGLRDSLSCGSGSVQNGKLSYTLGIPAASKINLLVSRLFGDNEDDREGGFGWSTVTVSPSDAKCNMIGNGDLIINNNYGYLSRQSEYTKKTAGNETTWSLKGAVFIYVDKDCTVKDAGKTMTEDGYIWTLPGINISLKKGWNVLKVELYETYDNSSGDYTKSGYTSVSVGDDSSLKWVIEDRWDDGGGGDPVGGENGEEDNNSKEKPSGEFVCTYMLSSGITNETIELSETLFKISDDSANPHPYLSFKIYEWKEVNVPNPYPYQGYTKGYKLSGKLVGAYPMTAGGDSYIGSTKTAPGTTADDVKADESGDTFHMYVYFNMEDEQLIRTPFVRAGTVDNTTAVTGNDNSLRVYK

SEQ ID NO: 89493 - protein, 433 aa, Unknown
  Obtained from environmental sample
  DOMAIN (54)...(384): Amidohydrolase family
  misc_feature (1)..(433): Xaa is any amino acid
VRVVFKNFRVVDEAREFFGGLVVEDGLIRDIVDADNAPEGDIVIDGKAFGESAVLMPAFIDLHAHFREPGFSEKETLESASLAAAAGGFTTVVCMANTKPVIDTIDKARALKARSGALGLIDLYPVLSLTKNMEGRELSGIKDLQGAKEGFGLPLMLSEDGKDVADDGLFLAAMKEAKRLGLPVSCHCDFGGPEAEAAKSSAGKRAEWSRMEENFAVRRAIELGKTAGCHIHIAHVSTKEAVQIIREVKKSPVSGNGFSLTCEATPHHIGATEEDAHCMGDETYGRVNPPLRSEADREALVSALCDRTIDAIATDHAPHSDNDKSAGMPGFTGLETAFAISLSVLVPGINLRQLSALMSANPARILGLGDRGRIEKGLRADLVIVDTEANWKVESEKFRSRGKCSPFAGKTLRGKILRTFNAGKTVLKENELY

SEQ ID NO: 89494 - protein, 801 aa, Unknown
  Obtained from environmental sample
  DOMAIN (712)...(799): Hpt domain
  misc_feature (1)..(801): Xaa is any amino acid
KSYRLFNFVASSYLKFDKNITPYMFNKYNEITSAVDYNLVENKIRIDELLGDAGKELLITAHGLSEGESRSFIYNKKMYLVNSIPSMEWYLAVSYPMPGFWALNRAMNTVFFSMLFLILFLFIIINVFIARSENAISKQNLQLIAANRKAESASQAKSDFLAKMSHEIRTPMNAINGMAELMLRGELSDEARGYAQDIKQAGNNLVSIINDILDFSKIEAGKMEIIPVKYLLSSLINDTVNIIRTKLKEKPIRFFTNIDGNISNSLIGDEVRIRQILINLLSNAIKYTEKGYIGLTIIADKQNDKQVLLRIDVSDSGKGIKPEHQANLFDEFVRVDKNHNIEGTGLGLPIARRLCAAMDGKISMESEYGKGSVFTVIIPQGIESKEPFAAVEEPEKKKVLIYESRLNYAKSVCWSLKNMNVPHILVTNQNDFAASLYREEWFYVFSGYGLYERIKSLMEQDDSIFCGGKKPHLALMMEWGSEVFVSNARFVSIPVHSLSIANTLNGKTDRQNSFEDSVSSGVIRHTFPNARLLIVDDIATNLKVAEGLLAPYNAKIDTCLSGAEAIELVKRHKYDLIFMDHMMPEMDGIEATAAIRKLEMKKEISGNNGKQIPIVALTANAVVGMREMFIQNGFNDFLSKPVDVSKMDEIIDRWIPVEKRANNNEQLTLNKENEKQDKLPDKDANSLLPIIPNVDTAKGVAMLRGRLDAYKKVLSMFCNDVDERLPQLQIMPEADTLSAFIIQVHSLKSVSASIGAQEVSSNAAGLEAAGKAADMVFIREHLSDFTVQLTVLVKNIRAAIT

SEQ ID NO: 89495 - protein, 163 aa, Unknown
  Obtained from environmental sample
  misc_feature (1)..(163): Xaa is any amino acid
MRLRLETAVDSELALVLKMADTPVIRHYFMNPSDPALKSQADAEIATYNEHFKNKILYWINDVDKLFYTTRSDPYFVNPDESKNYWYNLTLYETERYIFNINYNPDLDQIYLWVNVPVFAEAQTREKPVGLVGTGINLTDFSNFVTSGYQKFDENITTYMFNK

SEQ ID NO: 89496 - protein, 316 aa, Unknown
  Obtained from environmental sample
  misc_feature (1)..(316): Xaa is any amino acid
MYLLKKAGEKIIRFKVKAPNNPRNITFTATAESPGLKTAQQVVDIEVRSTAIPVTKSLQSLLSAGETWRGNLDYPGRDGTNTLVASFSKLPPLNLESRLDYLIKYPHGCAEQTTSSSFPQLYLDKVLLLEDKQKADIRTNVNGGIERVLGMQLMSGGFSYWPGESVVNDWCSSYIGHFLLEARRSGYEVRTSALKSWVNYQKNATAQWQVNSNKFTEQAYRLYTLALAGEADLGSMNRLRSHKLPFQAGWRLAAAYWLAGQRDTARNMIKGLALPERDYRELSATFGSTLRDKAMILETLILINSQEEMGRTKTLF

SEQ ID NO: 89497 - protein, 763 aa, Unknown
  Obtained from environmental sample
  DOMAIN (301)...(550): Penicillin binding protein transpeptidase domain
  misc_feature (1)..(763): Xaa is any amino acid
VTKKRLIIGGGAVVLLLAFIFSLPRPLFNVPYSPVLYDREGNLLGAQVASDGQWRFPGTEKINKKFTLALIETEDHRFRTHLGVDPLAIARAAYQNIRGKRVISGGSTITMQTIRLARGARKRTLFEKFIEAYLAVRLEAGRSKNKILALYAANAPFGANVVGLEAAAWRWFGRNSNDLSWAEAATLATLPNSPALIHPGRNRKTLKAKRDSLLNKLFKKGYFDEETLTLSVEEPLPGEPLSLPRLAPHLLDRLVLEAEKKSSLKKSAAFVTTINRDIQLRVTDILNRASDRFALNGIFNGACVVLNTQTGETAAYVGNTNTLHAPDVDIASSRRSSGSLLKPFLYAAMLDSGNILPSSLVSDIPTRIGSFSPENMSRNYLGVVPADEALSRSLNVPAARNLRIFGVERFLQFLRSLGLTTLFRPANEYGLPLILGGAEVTLFEITKLYAALGRATDPSSKDSKLISSGAAWLTLEALVNAARPGEESIWREYAGARHIAWKTGTSYGFRDAWAVGVTPEWTVGVWIGNATGEGRPELRSAVTSAPVLFEIFSVLSSIGGNRNTWFGKPAKELAQAEVCASSGFPASVNCADTKYVDIPKDAPAAKPCRFCQTIILDASLTHRIVLGSGVSAAAVEQKWFVLPPAEEWYYRRWNLDYKPLPPFLNSKDLSNRGEGVLALFNPEPDSKVYVPRELDNSEGKIVFSAAHRDGEEIIYWHLDDEFLGYTQTFHEMEARPLPGARTLTLVDSKGNMIVRRFTVLEGK

SEQ ID NO: 89498 - protein, 223 aa, Unknown
  Obtained from environmental sample
  DOMAIN (10)...(196): haloacid dehalogenase-like hydrolase
  misc_feature (1)..(223): Xaa is any amino acid
MDTQEKPFLPAAVIFDMDGLMFDTENLTIPLWEVAGKPFGYNLTREIVLRMVGISGERAQQLLLEEFGSDFPYEAIRDEYKILVSKEIEKKGVPKKPGLMYLLDRLRAANIPLGVATSTRSPRAIDLLGKAGILDRFKALTCGEDITNGKPAPDIFLLAAKKLGQPPCNCVGFEDSTAGLMGLHAAGIRSIFIKDVLSPPEEVLATVWHRCNDLSEAAALFGL

SEQ ID NO: 89499 - protein, 276 aa, Unknown
  Obtained from environmental sample
  DOMAIN (40)...(230): ATPase family associated with various cellular activities (AAA)
  misc_feature (1)..(276): Xaa is any amino acid
MGYIVFARKWRPKTFGDMIGQEHIVDTLSRAIEKDRVAHAYVFTGTRGVGKTTAARILARALNCEKGPTPTPCGECPSCKDIVSGSSMDVMEIDGASNNGVDDIRELRENIGYTSMGGRYRVVVIDEVHMLTKSAFNALLKTLEEPPQNVIFILATTEPTKIPSTIHSRCQRYDFRRVGADRIAAHLAKICEAEGVAFDKSALSVIARKADGSVRDSLSLLDQACSFCGESLTEQKVRAVLGLVGTDTYRELMKSIKEKNQSAALEIVQKTRSTAM

SEQ ID NO: 89500 - protein, 531 aa, Unknown
  Obtained from environmental sample
  misc_feature (1)..(531): Xaa is any amino acid
AFVALPKDTAIAPRDAGVYTVKVKIPDSENFTGGTYTLGDYRIKAPAVAKFAADGDLTDTEVREGNSVTLTVNASSPNGPAGSLSYKWYRYTSSGDSVLIANATGPSYTVSTGVEGDVLEYAVKITNNPGAAVQTAADVMSAHSHVTVKKAAASMSKAIIVINPEKSWIYKGDSIKPSGTDIAVWLPVTLADGTNDTVEISSQYYSLSYLNNVNVGTATVRASGVDVAGASDAYSGTVSKTFAILPKTLERSDLTYTASRAYSGDTTLGADVKTAQPKTGMGVITTFYDGSNTVPTDVGEYDVTVSVAVGTNFTAGEVPIGTYRITKKTPDTSSVVYDGIPVGHKQGDTATVYGIGEVKLRGTGYESITVFYGADTIVPSTAGSYPVKVVVEGGDNYNDGEIALGVYNIAPAEVVVSVAESVREVPVAPVVTEAAVAPVKTVAASFTAGPSPVSKNGAIKFFSSKQIKSGSLYIFDAAGNAVAKLSAKSGTGEIGSWAVKGVSEGTYVVKGALVGKDGTREKVAFVFSVVK

SEQ ID NO: 89501 - protein, 528 aa, Unknown
  Obtained from environmental sample
  DOMAIN (8)...(288): RNA polymerase Rpb2, domain 2
  misc_feature (1)..(528): Xaa is any amino acid
VVVSQIHRSPGVIFSHEKGVYSSRIIPYRGSWLEFEIDNKKELIYAKIDRKKRILGTIFLRALGYENREEIIRAFYKTQTLKVKDDNETREKFFGRVLAQAVWVNETNKADDSGNEGKKKLYRAGDKLHPHDVDELLANGVKTVEVIKFVDPADPKNDKSPNLSLDSNVLLNCFEREEIKFVRDDPARDEPSREEALSSVYSALMPGESITVEAAEKDLDSMFFSPRRYDLGKVGRYKLNKKFAFTPPLEDFTMTKQDIIATMKYLINVHSEVEKVDDIDHLGNRRVRSVGELMGNTMKTAFSRMERIAKERMSLKETDTIKPQDLISIKPVVAAIKEFFGSSQLSQFMDQVNPLAELTHKRRLNALGPGGLSRERAGFEVRDVHYTHYGRMCPIETPEGPNIGLIVSLANYTRVNDYGFLETPYRKVVKGIASKDIEYLSAMDEDRYYIAQASAKLNNSGSFVDAQVPCRRQGDYTTRSPGDIEYMDVSPKQIISVSASLIPFLEHDDANRALMGSTCRGRQFRLFL

SEQ ID NO: 89502 - protein, 384 aa, Unknown
  Obtained from environmental sample
  DOMAIN (28)...(144): HD domain
  misc_feature (1)..(384): Xaa is any amino acid
MTTVRMDSLIRSISTALDIVEGELLGASTNHGKRIAVLCAKMGKLLGKNTEEITALAVCALLHDSALTEYILSEQKDGNREHAMKKHCEIGQRNVDALCFNTNIKDFVLYHHERADGGGPFGIKEGEGPFEAELITIADSIDVAYHLQKLEPEDLPVIRNIITQESGKRYSKKAALTMLEILDWPTVLSLKDDVIKQTADSSISPWTVDIQTESVFGLAGFISRIIDYKSGFTHRHSTQIANRAWFMGKHYKYGPRELAELYLAASLHDLGKLAIPSKILEKPGKLTDEEFEIIKSHVRLTWELLNEIEGFETICQWASNHHEKLDDSGYPFGKKSAELDFNSKLLACLDLYQAISEERPYHPGRNHADTMKILYEMADTVTAR

SEQ ID NO: 89503 - protein, 356 aa, Unknown
  Obtained from environmental sample
  DOMAIN (2)...(352): Acetokinase family
  misc_feature (1)..(356): Xaa is any amino acid
VKNLILNPGSTSTKIAVYDGLTKVFSKKYIHPQKELEKFHGVMDQKQYRSQAVIDTCREHGIPIEEITAVIAIGGFMRSVTGGVYEVNDLMIQDLMACTYGEHASNLGGVIAAEIADGLKIKAYVADPISTDEMQEVARLSGLPEIVRTGRVHTLNQKAVVRRAAKELGVSVESANFVVAHLGGGISIGAHRGGLIVDSNDPRGEGPFCMDRPGSVHGFELAKLCYSGKYTEEEMLERLSDGGGVVAYMKTRDFFDVMRLYNEKDPMAITVYNALVYQIAKEIGAEVAVLRGKVDAIILTGGMAREACFIEDIKGYVGSFAKTMVYPGELEEEAMATYADGVASGEIKPRVYTGKC

SEQ ID NO: 89504 - protein, 179 aa, Unknown
  Obtained from environmental sample
  misc_feature (1)..(179): Xaa is any amino acid
MPYMGMEYCYEKAFSKTTRDEVIETCPGPLSRLKEDRPRERLIRLGPESLSDEELLSIILVSGIQGKNVSLLARELLSKLEAEKKLPTVSELCRLSGLGVSKACTVSAMLEFGRRKWASGQRIKHPEDIYGIIRHYADRRQEKFISISLNGAHEVLAVRIVTIGLVNRTIIHPREVLAD

SEQ ID NO: 89505 - protein, 289 aa, Unknown
  Obtained from environmental sample
  DOMAIN (5)...(43): WD domain, G-beta repeat
  misc_feature (1)..(289): Xaa is any amino acid
ASGREIRNFTEHTHTSYVRSVAFSPDGKQALSGSNDGKTELWDAANGRLIRNFSASRSIYVNSVAFSPDGTQVLSGYADYDTPIEDAGPFANYMELWDTANGREIKTFKGHSNYINSVAFSPDGKWVLSSSTDDTVKLWDTASGRELRTFSGHTSTVLSATFSPDGKQVLSGSYDGTIKLWDTASGRELRTFSGHTEGVESVAFSPDGKQALSGSYDGTIKLWDTASGRELRTFNGYLALFSPDGKQILSGSGDYTMNLWDAASGRELRTFSGGGVSIAFSSDGKQALS

SEQ ID NO: 89506 - protein, 465 aa, Unknown
  Obtained from environmental sample
  misc_feature (1)..(465): Xaa is any amino acid
AKKGEIETERYDNGWRFISEKMASGEFDVRIDNVKTGQKVPIIGNKKVKVLLSNMGAISTEYMGAAVRSLGINAEALPVATAKTVQIARAHASGKECVPSHLVLGSALQFFFSDKYRKDELYLLFVPITTGPCRTGQYYVFYENLFRDMRLENVVVFILSADNSYTELGPSFAKEMWKGLVLSDYLKDVQCSLKATAVDPVKASADFEQSWRRVMSAVEHNPKKLWKELRHVAREVKKIPLKRKLTDCPRVLIVGEIYVRRDDFAVGELIDLMSERGIVVKVAGISEWIHYLDYMREYSLNKLINLRPRGKRMFSVPWKKLKTLQIEKWWKHHIEKKTLAILQPTHLIPETPHDMRHIMTFTQEHFVNLELNSEIAVSSGSAAAAMDAGYSGIVNISPFACLIGRVIEGLFTPWARERNYPILSVEVDGNLLPPNIVNKLNIFMVNVLRFKGGSDLSSLVDEASS

SEQ ID NO: 89507 - protein, 278 aa, Unknown
  Obtained from environmental sample
  DOMAIN (20)...(105): Rare lipoprotein A (RlpA)-like double-psi beta-barrel
  misc_feature (1)..(278): Xaa is any amino acid
MMKKLFFTFFLIFTLFLPLSAQVRLGNFSQKGVATQEMKDNGLVAAHSSLPLNTVIKVKNEANGKEVDVKITNRISNSPSRIIDLSSDAFKALELKRDGIVTISVNSSASSALAAVTSARGTTARGAAANQDQTSGTATGTSQYNPVQTTTAPGTTVTSGQLPGINVVVTNSSPVTTPTAPVYPPAYPPPVYPYPPPTYPPAYSRSEPNSGDRIIVINTNPNPSYPPSASAPLPAPTPAASSSQSNSAYLAWMMAMTVEAREMRAAREEREMREAREA

SEQ ID NO: 89508 - protein, 458 aa, Unknown
  Obtained from environmental sample
  DOMAIN (387)...(457): Sporulation related domain
  misc_feature (1)..(458): Xaa is any amino acid
MTQQGLVGAHPSLPLNSKVKITNPKNGKEAEITIIERIEPSQNRIIDISAAVASVLELKAGEQVIITVSAPPRPVAQPPRQQEPIIDLLEPVFIARDTKPPDATAQTTTQPTDQTAPPATVQKPLSGQEPVVREQPANEQPAAAEKETPSAANAQTPPEAKPGEGYYPEFFVSDPTAKEALFSGANSNDPEFLAWLMVMTVEAREAREAREAREAREARELREIREEREIREARAAREAREARELKEAKEAREAREAREAKEAKEAKERRETAARTVIAQKEAKAAQTVQPPIPASAPESVPKANSQTNQPAINLPSTERPKKDTWPLNLDMFEPTSKAAPSSDLRVSANQSQVIQNQQSAQKQDGRLEPVKPEALKIIPGLPDRHSGKLYKLQIGAFSSQDTANRTADILKNSGFDAEIEYSGAIYRVFASKISSADVHSASVRLGTLGFDQIGLKS

SEQ ID NO: 89509 - protein, 236 aa, Unknown
  Obtained from environmental sample
  DOMAIN (5)...(201): Coenzyme A transferase
  misc_feature (1)..(236): Xaa is any amino acid
MTDVKNIIAARAAKELKDGDVVNLGIGIPTMVVNFLPPGIEIFLQSENGIMGMGPTPAPDEVDPDIVNAGGQPVTVKTGAAFFDSATSFGIIRGGHVDATIIGALEVDEKGSIANWIVPGKTIPGMGGAMDLMAAAKKVIVATTHTNKGAPKILKNCTLPYGALDAVDMIITEMGVMEITPDGIMLTELHPDYTIEQVQAATGARLIISGNLKRDDLGVQGTGFGVQGNKKKIVVT

SEQ ID NO: 89510 - protein, 84 aa, Unknown
  Obtained from environmental sample
  misc_feature (1)..(84): Xaa is any amino acid
MALVSFSEVRRFYGRQDVLAGVTLALGPGERVGLVGRNGAGKTTLIRLLLDLESPDSGAVTRAKGLRTGYLPQELPARRGLTLL

SEQ ID NO: 89511 - protein, 353 aa, Unknown
  Obtained from environmental sample
  DOMAIN (203)...(327): HD domain
  misc_feature (1)..(353): Xaa is any amino acid
LSEVPEIGLNEPETPAASETPDAAAGARPPKIMVVDDEVLNRKLLLAMLKPQGYEVILAEDGADCLAKIEADPPDLVLMDIMMPKMNGFEVVTELKSRPHLALIPIVMVTALQDINDRITALEVGADDFLAKPVDRMELRARVRSLLKVKAYNDHMANYRRELEREVAARTEELRRVNAKLRDASLETIFRLARAAEYKDEDTGAHIISMSRISAYLAERLGLNSTVVESILYASPMHDIGKIGIPDRILSKNGPLDDEEWEIMRMHPIFGGQILEGSDIGFLNLGEVISLTHHEKWDGSGYPHGLAGDQIPLAGRITAVADVFDALRSKRPYKPPLSVERPWTSSGPAGAPT

SEQ ID NO: 89512 - protein, 284 aa, Unknown
  Obtained from environmental sample
  misc_feature (1)..(284): Xaa is any amino acid
KPILLLNMKRLPEILEREYKAASEKQYPVEQPAPEEVSKPVASAPKEVVDEPPTVPEAVSTPVPLAPKEVVEEPPIVPEVVSTPVPTPPKEVVEEPSTVLEVVSQPAPPPKEVIKEPSTVPVVTSTPAPPAIKLVDENPPKVTVVTSESVLSATKEIDEEPPTVPEVTSEPVPTPPKEVIEEPVETSDTSITFDEVVEICEIIEEAPISHAVTSEPAPSTPKEVIEEPPFVLVVTSEPVPPPPNEVVEKPAEVPVAEALEATITIEDSDSSLMFDEAIEICEII

SEQ ID NO: 89513 - protein, 317 aa, Unknown
  Obtained from environmental sample
  DOMAIN (9)...(317): Periplasmic solute binding protein family
  misc_feature (1)..(317): Xaa is any amino acid
MKKSILILFTLAVFLFGISGCKKNKNTVTRNADGKLIVTATNFPPFDFVRQIAKDKVNLNLLLPPGAESHSFEPSPRDIITVQNSRLFIYVGGESDTWVDRILETMDTSKMIIIKMLDTVDAVEEEIVEGMEAEDEEEGEETAYDEHVWTSPQNAILIVKAINTALCEADPANADFYRKNTADYIEKLAQLDAAFKGVVAGAKRKTIIFADRFPFRYFADAYGLKYFAAFPGCSTETEPSVATVAFLIDKVKAEKIPVVFHIELSNERMADTISGETGAKKLLFHACHNISKKDFDAGLGYLDLMRVNVENLKEALR

SEQ ID NO: 89514 - protein, 101 aa, Unknown
  Obtained from environmental sample
  DOMAIN (44)...(94): AP endonuclease family 2 C terminus
  misc_feature (1)..(101): Xaa is any amino acid
IVHVHIKDAAVTLDGKSSLLGSNLNFGDIKRGWNFRSPGHGDVDFENIIRELNAINYKGPLSVEWEDSDMNREYGAKEACEFVKNINFSPFDANDDGQKSE

SEQ ID NO: 89515 - protein, 70 aa, Unknown
  Obtained from environmental sample
  misc_feature (1)..(70): Xaa is any amino acid
MQTLPVIMCTARGEETDIVAGLELGADDYVLSPTAPGYWLRVYARLSGGKKLSLLKPGAPKARRSFSRES

SEQ ID NO: 89516 - protein, 233 aa, Unknown
  Obtained from environmental sample
  DOMAIN (157)...(230): Transcriptional regulatory protein, C terminal
  misc_feature (1)..(233): Xaa is any amino acid
LSAERILIIEDDPEIQEMLKFAFVREGWQLTMVSTGEEGLKKLQSKEADCVILDIMLPGMDGLKTLKKIRENKNLQNLPVILCTARGEEADIIAGLELGADDYVVKPYSPRVLAARIRAGLRRKEAASSQGEATQKKFFQHGKISLDIDRHTVLLEEKPLDLFPTEFAILVQFMSNPDIVFSRQRLITAIHGNDYPVTDRSIDVQIMGLRKKLGDSGDMIETIRGIGYRFKTE

SEQ ID NO: 89517 - protein, 345 aa, Unknown
  Obtained from environmental sample
  DOMAIN (5)...(103): Aldehyde oxidase and xanthine dehydrogenase, a/b hammerhead domain
  misc_feature (1)..(345): Xaa is any amino acid
LKDPAEFITDLSVAGMLHAITIRSPVARGILKEIKCPELSGTYRLITAENIPGKNSLSDFSVPILADRKLSYIGQPVAILAGREESVLEDLASKIEIQAEEEKPSFSCRAFIPEDEIVKREIVSGDPHKALEEGGLILSGTYIMEIQEHWYSEPHGAVAAPMGLSKKEITAMTIYTATQWPYHVKSSVSGLLGWDPQRVTVAPTLMTPHLDGKIWYPSLISCHAALAAWITGGPVKIMLKREEDFIYSPKRNRAEIEMCSAVEEKGTIRSSIVQIQLDLGAHAVFENEILDHTCLGSLGNCNHGAIEIESSGILTNIPPQGPFAGFGLAQGFFAAERHFSHIADT

SEQ ID NO: 89518 - protein, 77 aa, Unknown
  Obtained from environmental sample
  misc_feature (1)..(77): Xaa is any amino acid
MFSLSDNDLSKKIASFGDGPASFNYESTINNGDVISFDIIYQFSKEEIEIQINKTREIILNQLKQNMENYVWTDIKM

SEQ ID NO: 89519 - protein, 207 aa, Unknown
  Obtained from environmental sample
  misc_feature (1)..(207): Xaa is any amino acid
MCIIRNKLAKFAQVAALVLALTFTFSCSGEDFKYGSVKDNNGKTYKTIKIGNQTWMAENLGYNVPGNDTDVCYENNPANCNKYGRLYNWATAMSACPNDWHLPSKEEWDELVDFVGGMETAGKYLKSKSGWLENGNGEDKYDFSALPGGYGDSGGSFYDVGNYGYWWSSSERNSDYAYLSNIYYNYELVFNPIINKIKLLSVRCLQD

SEQ ID NO: 89520 - protein, 422 aa, Unknown
  Obtained from environmental sample
  DOMAIN (2)...(419): Phosphoglycerate kinase
  misc_feature (1)..(422): Xaa is any amino acid
MALKKKTVKDIDFKGKRVLMRVDFNVPMDKGVIQDDTRIQAALPTIKYVLENGAKSLVLMSHLGDPKKDMAKAKEKAEKAGKPFDEAQYLAYKHKMAPLAAHLSKLLGKDVALAPDCVSDETKNMAAKLDGGAILMLENTRFHKEETSKEAADREKMAKALAELGDVYVNDAFGTAHRAHASTETVAHFLPAVAGFLMEKELLFLQDKVVDAPVKPFVAIIGGAKVSSKIAVLESLLSKVDSMIIGGGMAYTFQKALGQSIGESLVEDDMIDTAKSIMDKAKSKGVKLLLPVDNVVTKEFAAEAESKVVAAGAVEAGWMGMDIGPKTTELFKDALKSAKTVFWNGPMGVFEFPKFAVGTQAIAATLAELKGATTVIGGGDSVSAVKKAGVADKMSHISTGGGASLELVEGKELPGVVALNDK

SEQ ID NO: 89521 - protein, 305 aa, Unknown
  Obtained from environmental sample
  DOMAIN (30)...(282): Pyridoxal-dependent decarboxylase, pyridoxal binding domain
  misc_feature (1)..(305): Xaa is any amino acid
MTGMIKALPFSNDEITAIANRHETPFHIYDEKGIRENARRLKAAFSWAPSFLEYFAVKAAPNPFLMNIFKQEGIGADCSSLAELSLAGRCGISGENVMFTSNDTPSAEFKAAKSMNAVINLDDISHIQFLEEHAGLPELACIRYNPGTARTGNSIIGNPVEAKYGFTREQVFEGYKILKDKGVKRFGLHTMVASNELHYKYFVDTALMLFELAAEVYKELGIRIEFVNLGGGIGIPYRPDQKAVDLEAVSAEMKAVYDRIIVPAGLHPLKICLESGRMMTGPYGFLVSRVLHVKNTYKNYVGLDA

SEQ ID NO: 89522 - protein, 873 aa, Unknown
  Obtained from environmental sample
  DOMAIN (717)...(755): WD40-like Beta Propeller Repeat
  misc_feature (1)..(873): Xaa is any amino acid
GQRRLFGTLGADFRFDPAEFLSGRIYFSSAGMPLSGDSAFVHRFSEQYGLIINYDQYLDEREFWKMNLGAGVRKTTWDGAFDIGLGAEFSADERYFMRLGWEVPTSAISQAWEDIGYFIRSGEVGLDKFNKLAIFYGWGVGLGFKAGGFGMDAAYRPGPDGLANSIWSVNATFEVEEMKKRSAEDNLELARDYYGLERFGKSRLYASRAMREDSTLWNAWPLYVKSEMELRRRAAGSIALIYGGNSRGTVVPYPPSDEALGGLSRYAALVSRLRNSYPVNFTVDVGNLISADKDAQRVEFAANYYDAARFDALAPGAGELSMGTAKLSAALKRKMPVIITNLNDNDAAATGIRNNAVLTSGDYNVYLLNIIETEVPENKDGVSLDLSFDPEAIKSQLAKGQAASADLRVAVVHGTLDEMKRLAEELDGAIDVMIAGSLEQRLDTPIKAGNTLIVSAGAENKFVGCLFVKFNDVKRAIKKGRADAKAPSAAQARAQKAKQMRAKAKARFTTENMLFPVRQDIAPDSAVENITRLVRSAIVVERTAGPEIRTKVRGVVAHLSDRGAGPQAFLKSAQGKSELALSDSLLNCRRPLLSSSGDRAAFIFGKPGGKNGKLRMVDLGLGAAKTVSKGKNVLDAVFSPADDFLYYIEADSGGDNGAIRKTKMYMNDALTVLEADASTRGDLRISSDGETLIFASKYKDSNWDIYALDTSGKAAPVRLTDGKADHRYPRISPDGKYVAYLSNRTGFAWKMDLWVYNRVAKEHRQLTFNTDVQGFTWSDDSEAIYFSAGANLLEICRVDMRHGLIKNMIPHPQGAVKSWSESNPRFIRYNDEPMIVYTRTYPSGKRQIFWFDINNAADAKMYSVEEFDEWNED

SEQ ID NO: 89523 - protein, 111 aa, Unknown
  Obtained from environmental sample
  misc_feature (1)..(111): Xaa is any amino acid
MSGKIIHTTDTKTLIKSNIRNYSMFIMLALIMLIFAPLTKGHNWDPRNFTNIFFQYSYVLILAIGMVQVIIVQGIDLSVGSVCAFVGALSAMVYNTGVGMFVTVVASIAMG

SEQ ID NO: 89524 - protein, 347 aa, Unknown
  Obtained from environmental sample
  DOMAIN (69)...(325): Methyl-accepting chemotaxis protein (MCP) signaling domain
  misc_feature (1)..(347): Xaa is any amino acid
MQVLIFIAGIIVTCAVMVPVLRSYKKRIRELEDKTEQSFASVSNFKGKTIKLAAAVKESADVVSRTGKNNKTSDAGQTGSIEKVESTIDENARIAAEIVEKTRSVAVISSKMEEDVLNGFAVLEKNVKKMGDIKEKNSGVISGIISLGNKVNKIRDIVRVINTITDQTKVIAFNAALEAAGAGETGKRFAVVAAEVNRLADDIAVLTRQIREQVEEIQSSSSSLIVYSEEGSDRIAEGYKLIKDLEDVFKEIRAGAEITSNQAQAITVSTQQQLKSSEKVSFAISEVSQEVKLFINSVETAALSAGTLAERTRELERFLTAQTAAQIAAHTGKEAIGQGHGGYKSKY

SEQ ID NO: 89525 - protein, 164 aa, Unknown
  Obtained from environmental sample
  misc_feature (1)..(164): Xaa is any amino acid
VPFKRYSVAVLLDRVYANYASLFKPLDKTPRHSLLKVFAAVDAGILHQNLGDLDFLALQLFPDTAEGDYLRQHWSSRVTPLYAIASSGDALLKGLPNKPVPSGLVFAAASGERYYTEKAYRIGEDGTVAITLKSQGTGLITNLAPGEELPLVSSKLPGSNRKQS

SEQ ID NO: 89526 - protein, 426 aa, Unknown
  Obtained from environmental sample
  DOMAIN (259)...(426): NfeD-like
  misc_feature (1)..(426): Xaa is any amino acid
GKPDLIVFEVNTFGGRLDAAFDIVDTITALKIPTITLVQKKAISAGALIALSSDKLYMLPSTTIGDCAPIVQSSDGQPQIVGEKIQSPLRAKFRNLAERNGHPRLLSEAFVSPDLGVMELSNRDTTIYMNVAEYSDMSEDEQKKWASKKTLVRAGELLTMTNEEAERLKFSKGTPESIEAFKKEVGITKTEIIEISWAEKLTRFIGAISGILMILGFGALYMEFKTPGFGIFGVIGIVLLATVFLGQYASNLHDKLPLVLLCLGVVFMLLEIFVLPGAMMCGALGIICFVAALALSFDGSSLPDFAPQFGSLSNWQYGLMYIMLCAVLALSLPIVASKYLIPMLPDSLTPINKTDLSKAHSPVEEFVEEIKKGDIGVALTDLRPCGHAKFGDKMFDAQSRSDFIVAGSAVKVDFVEAGKVWVVKEG

SEQ ID NO: 89527 - protein, 219 aa, Unknown
  Obtained from environmental sample
  misc_feature (1)..(219): Xaa is any amino acid
VISYSTIEDLVARGVLTLTQIETIAKGANLVAPALSLDMKNIITSASISISNISSVLLRHSRSSPVSRTLTPISTARYTGIIIIALGELPVYGFNKTAMPVPCLFPKIWDSEMNLIYERFMLEPQSQSSQGVAMVRYSAAKNIFQNNPSGLSDELREIVGDRPLRIFARNVFGIKPTDLIIERSDALVIISSEENRRLLSQGKVVFILDESVLRYEFGE

SEQ ID NO: 89528 - protein, 65 aa, Unknown
  Obtained from environmental sample
  misc_feature (1)..(65): Xaa is any amino acid
MKVFIVYCHPSNDSLTREVRDSFIAGLESAGHDYILSDLYAMNFSSDMSEGEYERETYYRRELPL

SEQ ID NO: 89529 - protein, 339 aa, Unknown
  Obtained from environmental sample
  DOMAIN (22)...(339): Amidase
  misc_feature (1)..(339): Xaa is any amino acid
MFNMSALELSAAIKEKKFSVTETVSAYIDLIKKTDSQFNAFLPVSKEKAFSCALTRAQEIQSKLGEETLSPLAGVPIAVKDNISTEGIETTCASKMLSSYTPVYNAAVIEKLEQAGMIVIGKTNMDEFAMGGSSETSAFGSVRNPWDTSRVAGGSSGGSAAAITSGEAPLALGSDTGGSIRQPCAFCGVTGIKPTYGAVSRYGLIAYASSLDQIGPIGQNINDCAALLSIISGPDYKDSTCVIEKPFTFNEQNTGLEGVKIGLPRNYFADGIEEDVKLAVLAAAKEFETAGAKIEEFDMQLMDYLIPAYYIIACAEASSNLSRYDGLKYGYRSNNAQTL

SEQ ID NO: 89530 - protein, 263 aa, Unknown
  Obtained from environmental sample
  DOMAIN (201)...(234): Tetratricopeptide repeat
  misc_feature (1)..(263): Xaa is any amino acid
MWDNKFDPRYISVVKARDNDALKLRELEQELEEAKARGEKGRSLAEIREEISKTQSELNEFCLQQNRAANQFIYIFLKHTINFLECSVYALQLELNEAIEEGNFKPQKKNSNQEKAAREKAEKERIVKEKSAREKAEKERIKKEKNEIAEIKRRYEQRIRKNPNDKNIYKIRAKEYYVKKYYDFAIDDYTKIIEDIDSNDKDSYVERAIMYSEKKEYKKTIDDFTKAIGLDPKDADNYALRGMAYSTIGEYDKAIADYDKAIK

SEQ ID NO: 89531 - protein, 359 aa, Unknown
  Obtained from environmental sample
  DOMAIN (219)...(265): Bacterial regulatory proteins, tetR family
  misc_feature (1)..(359): Xaa is any amino acid
MTNDDIIKAAFKVWGRNFYRTTSLAEIALELGVSKPALYRHFKDKDALLDAMHTAFFDDCTGFLKKGCEQADAASSAQEANLAFINTIAEYYIRNREAFIFSHILVYNCHERKNTVEELKTRGINFKHPVFENKTGLYPAKMQLLLVTVVFCIANFHYENFKTDRIPNEETIKAALIRIEDLITKGLKMDAQMISALDYERLEKQAAGLVGKDKEDNALLKAVAEAVAEVGPWDASMEMVARRSGLSKSGLYAHFRNKQDMLAQLFITEFSKIVNFAKAQIETTAVHEEQLYLAIISIVYYLRSRPEIFVAMDWVKTRQLDLGKSMPGRLYRIIRSIKMEAIRKYDQHFLFWAAKWVIF

SEQ ID NO: 89532 - protein, 372 aa, Unknown
  Obtained from environmental sample
  misc_feature (1)..(372): Xaa is any amino acid
MEFRTTRGGAPDFPLYLPVNRANTLPEITFMTPNSRFGPVERATTASGIVNYFVPLDEISYSTDGGETFKQIDFTRKYGRAWFNEFLDFSDINARGMELVVKVVDRAGNTVEASPDIEFDSNATAARIVHNVPDEGDVITRDFEISGLAYTDVGVSAVMWRILSPKNPWDPPEVTLAYGGDIEFKRIDTPQNYLVEVSLSEVRDGENILEIYAEDIYGVPGEMVTKVFGVSTAVPVTAVVEPSRDIWNKGNIIIHGTSFDRNGIDEIKISMDNGISYQRADVIDNQDRPSLWTISLNTRVYMDGQYSIIIRATDGYGVQSFTSTTINIDNTAPMIDLSAPKNGAPIGRTLEVNGQIYDNLKVKLISILLTDT

SEQ ID NO: 89533 - protein, 270 aa, Unknown
  Obtained from environmental sample
  misc_feature (1)..(270): Xaa is any amino acid
MDNDFLLKHRNTDIAQFSINKQYNRINYLKILDEQFSPVNTKEDNLSQAISFNDWLSERCVPNSREGVARLRVKYKVEQIKQLMIYMKGLSLSDHYWIDRAPFNEKWENINMFENRYDELMGQLLFDQKLKLVQSAENYQAQSPELTTGGSLRKQWIYNEYEQKSYLIKAGSKKDYQEPFNEYYSHLLSEELGFTHTPYLLEKRGDEYVSVCPCITDNKTEMVCASDILRKYGIDKSYNGFVELAQQKGCVYFKDEVNQMIILDYLMTTL

SEQ ID NO: 89534 - protein, 246 aa, Unknown
  Obtained from environmental sample
  DOMAIN (23)...(52): IstB-like ATP binding N-terminal
  misc_feature (1)..(246): Xaa is any amino acid
MVNEATISKLHDMKLSAMADAFRQQMQESAMNTLSFSERFGLLVDQEWDTRKNNRLKRLIQRADFPIGGACMEDIEYQSDRKLSKEHLLQLSTCSFINEKHNIIILGATGAGKTYLSCAFGMAACRHFFSVRYIRLPDLLDELSVARGEGIFQKVMQGYKKIDLLILDEWLLSPLTNSESRDLLEIVETRYSRCSTIFSSQFNPAGWQERIGEGPLAEAILDRIIYDSYTILIGGEESMRKHKGIS

SEQ ID NO: 89535 - protein, 215 aa, Unknown
  Obtained from environmental sample
  misc_feature (1)..(215): Xaa is any amino acid
MRMFNEGVEWAGRFKDKTEELSIISGDGLTLYGEYVNFGYDKCVVILQGRTESLLYSYYFADVYYRNGCNILAVDVRAHGLSDGKYQTGGIKESDDCVLWIKLINEKYGINDFTIHGICIGGATAVYTYVKLKNAGSNLVKRIVTDGVYQSYYELYKMNFRMYRKPAFPALHLCFFFIYVLAGVRPFRETPLKYMKDIDIPILFIWSKQDIFCIN

SEQ ID NO: 89536 - protein, 294 aa, Unknown
  Obtained from environmental sample
  DOMAIN (188)...(261): MazG nucleotide pyrophosphohydrolase domain
  misc_feature (1)..(294): Xaa is any amino acid
MEEKKHIGGFAETKKRRAFGGGGMNVSEAFKALYDTVVKLRGPGGCPWDQEQTPSTLRGALVEETYECLEAINENDPDHVAEELGDLFLLATMISYMHEQEGKFTVADTLKKINDKLIRRHPHVFADVKVRDSAHVLENWAAIKVNQEGRKPKDSVLDEVKGGFPPMDRAFKLQKKAAKVGFDWPDAQGVVTKIKEELQEVTEAENNIARNGQTEKKSLQEAELEKELGDLLFSVINLCRFHKIDPSAALHRTNVKFTERFKYVESKMKETGNEMKKENLEIMDKFWNEAKNQK

SEQ ID NO: 89537 - protein, 213 aa, Unknown
  Obtained from environmental sample
  DOMAIN (4)...(192): Peptidyl-tRNA hydrolase
  misc_feature (1)..(213): Xaa is any amino acid
MIKLAAFLGNPGAEYSGNRHNAGRMLARSLPFYQSLSWQKKYKGLYSSHGDKHFIMPETYMNLSGESVQAVAAFYKIDVKEIIVIHDELELPLGVISLKFSGGLGGHNGLRSMKKSFNSADFWRIRIGIGRPDSRLPGEGGHAGSGEGVYDWVLSDFSGAERETLNPALDAGAGLLQQLSANEPEPLLNEWKKKNISGASPKRKSEEPSAEAV

SEQ ID NO: 89538 - protein, 273 aa, Unknown
  Obtained from environmental sample
  DOMAIN (55)...(72): Bacterial transferase hexapeptide (three repeats)
  misc_feature (1)..(273): Xaa is any amino acid
LEVDDPYVGYALVAQLFEDTTPLFGEGVHPSAIVDKTAVVDKTVSVGPGTVIGADVRIGTNCRIGANCVIERGVSVGESTRIDSGAVIRYGTQIGARVIIQSGAVLGSDGFGNARGADGVFVRIPCFGKVVVEDDADIGAGTTIDRGNFEPTVIGKGVKLDNLVHIAHNVTIGENTAIAAQTGISGSTKVGKRVIIAGQVGFVGHINIGDDSFVGAKAGVSKDVDPKANVTGYPARDIMTMRRIEASSSRLPDLLKEVKKLKEEIEELKTRLN

SEQ ID NO: 89539 - protein, 417 aa, Unknown
  Obtained from environmental sample
  DOMAIN (210)...(379): Protein of unknown function DUF115
  misc_feature (1)..(417): Xaa is any amino acid
MINNHYRRIFFEKNLLALSEKDPELCSRLSAAQTTSGRYTFIESRTHRVVPALVDSNGRAHALHSTVDPEKEGIRLAASLNEGWAEPSFTVFLGLGAAYAAEAALSAGNASHVLVIDFDINGIAELLSLREYIVLGDHRFTLLIDPDSSLIQKTILDLYNPCLCGGIRALPLRARVEQDKEKFDMAGEAVQRTIEKVSADYSVQAHFGIRWFSNIIRNLGIAQSLNSDASQIAAFSDAAICAAGPSLDAQIPFLRERQRESLFVIAADTALSALLVGGVKPDAIVSIDCQHISYCHFIGNGSACADIPLFLDIASPPLLSGFSRSPIYFAGGHPLAAYIRLKWMPLPSLDTSGGNVTYACLSLAEQLGARRITVYGADFSYPLGNAYARGTYFYPLFERRQNRLSPLESGGPHSLPQ

SEQ ID NO: 89540 - protein, 98 aa, Unknown
  Obtained from environmental sample
  DOMAIN (1)...(87): Formyl transferase
  misc_feature (1)..(98): Xaa is any amino acid
VRWKDNKPSPCPTPKFGGQGMYGEHVHQAVLKAGETESGCTVHLVDAGTDTGAILLQRKVPVLSDDSPESLAERIHKEEHIAIVEAVKIMIRRLEEDL

SEQ ID NO: 89541 - protein, 362 aa, Unknown
  Obtained from environmental sample
  misc_feature (1)..(362): Xaa is any amino acid
MPFFNFWYQFTDFLKGTVSVLIIAVAFAGIFITLCYSIFSLGKKHHYLAIVFSTIVSCVLMVPVITAFNNLVLLRIEGQIIDKGKAEIRAQRAEVERLIAENKVKLLEREKLDNEITIAKQSIEIETLNASNMLLERARLSMQSFQQIAELALTQANLSQTLVRKEPVTPIETGWGLKADYYYDEALVIVAHDINAKFGVDLKEIKIAKAQNNSVVVSGIRPRFIGANQNESKTLVKEIRRVDNKFGVPYRVRIKDQRQDLVLADIKADQFELEFQKKLSEGMEMAFMDNVIVQLAQNFIKIVLSPIYSNIVFDNADAPGALPLLDFLTKEINENNEEKYRLLQANEQFILQMNQLDGYSET

SEQ ID NO: 89542 - protein, 79 aa, Unknown
  Obtained from environmental sample
  misc_feature (1)..(79): Xaa is any amino acid
MADTDFQRGAGGCGDFAGFRGGGQQTTNNRQRTTDNEQQTTDNRQRITDNEQQTTDNRQRTTDNGQQTTDNRQRITDNG

SEQ ID NO: 89543 - protein, 243 aa, Unknown
  Obtained from environmental sample
  DOMAIN (36)...(243): Iron only hydrogenase large subunit, C-terminal domain
  misc_feature (1)..(243): Xaa is any amino acid
MDGSGKRLIINKDLCIGCGNCIYVCSHGARKIIDDTKQFFEDLKRGLKIITVVAPAVASVFPGRHLNLNGYFKSIGVKESFDVSLGAELTVISYLDIIKQKNPKLVISQPCPAIVSFIELYHPELLPFLASADSPMLHTIKLVKEYYHQYDNCRVAVISPCIAKKREFEETRLGDYNVTMLALKEYLEEQKIRLSDYPADEYMGLLAERGVMFPTPGGLLDTAERFVPGIRRNTRKIEGVHTI

SEQ ID NO: 89544 - protein, 691 aa, Unknown
  Obtained from environmental sample
  DOMAIN (8)...(31): 4Fe-4S binding domain
  misc_feature (1)..(691): Xaa is any amino acid
MNGSEEKLQINHDICVGCGNCINACTHKARMLIDDTDRFMGDLKKGDKIIAVAAPAVASVFPDQFLNLNGWLKSLGVEAFFDVSLGAEYTLISYLDYIKEKNPRTIIAQPCPAIVTFIEINHPELLPYLAPADSPILHIIKLIKEYYPEYRDYKVAIISPCIAKRREYDETGLGDYNVTMLALKNFLDDQKIDLSSFPKVEYIGASAERAAGFPIPGGLLDTAERFEPGIRRHTEKIEGVFAIYPYLREISGMVKTDAKLPLLVDCLNCEKGCLGGPGTGNAEKPLAVLKEPVQRRIAELEEKNNLQSGKNAYKKYHDVLSKYWKKGLYNRSYRDLSGNNTIKQPSEAELTEIYRSLKKFKEEDLYNCTCCGYGSCKSMATAIYNKLNKAENCAHYILALLTEKTNAEEQNRLQLQEHIGRASGFIEGINNLINKLNATISSQAETIAQSSVATEKMIGSLKETTALSQSKQETIKELIHNTEKSRESMRETIQSVEGISKSVEGIAQAIKIISTIAANTNLLSMNAAIESAHAGEAGRGFAVVADEIRRLSESTRENSRSISQTLSSIITGITSTTKRSTDTGTLINGMSDEINGFATTMTQLIDTLTSLADESSGVTSSLKDLKENNTRVTSNCSEIVGLTDKLRYDINFLAAMSDDIVKAVEKGDRDIINRLLEMEKEKAGISELSGA

SEQ ID NO: 89545 - protein, 227 aa, Unknown
  Obtained from environmental sample
  misc_feature (1)..(227): Xaa is any amino acid
MKNVNEKNKDTVFTFLFSNPDLLRELYSAIEGITLPPDVPININTLSDVLFRTQRNDISFLVNNRLIVLIEHQSTINNNMPIRFMIYASKLYQEIINPDDKFKRKLEKIPKPEFIVLYNGEDNYPDYKELRLSDAFMKTDKIKIDVPLELVVQVYNINKGRNREILSKSRTLDNYSQFIDKIREYQKEYQMKYNERKEILDKAFKSAIKYCIKNNILKDFLRKHGSE

SEQ ID NO: 89546 - protein, 494 aa, Unknown
  Obtained from environmental sample
  misc_feature (1)..(494): Xaa is any amino acid
RLVFIPDPNGEGWDISAVNKLAAENNLGANPDQKAVETFLSKASRAKNPEPMEMVYAQGIPPEDPVSEKVNWADLPVPADMAVYQEEVLKKARPPQVFRVTVERIKHESTVKKPHSLISGKEEISVTWEKKENREKVEVNAEVLEVKYAEKETVLGTVTPPVPGKNGKSIFGRPISPKSMENTAFLLGNGIARGKSDLTAQASGFIRIGDRWADLVPLAKHSYKINTGADGLTLFLFFEPGDKRFALPKGEQILAEAAAMGAKEENLVSAGELDKVINEAITTGAPVEAFALFNPLQAEARVDINPDKTRAVLYLRKGVAGASPLEMKAISQVLKESGVHGFDAEKLKTAIHDFMESKELVLPEYVLVEGVSSTRGKDREVKVTAKVFSEEEKKPVINRLKDWFSRNALEAPELNLDEVPDLAFVENGQEIAKVSEGSGGKDGKDIYGNVIPGLPGNDPEIKLFKGLELRDSAIRAARDGLLLFHASKKVSLAR

SEQ ID NO: 89547 - protein, 446 aa, Unknown
  Obtained from environmental sample
  DOMAIN (209)...(309): 5'-3' exonuclease, C-terminal SAM fold
  misc_feature (1)..(446): Xaa is any amino acid
MKNPLYLIDAYGLIYRSYFAFMSFPLKNNAGKNVSALFGFARTVISLLNDGAPLLRENGKSALTNGYFKETPKLLAAVFDSRTPTFRHKMYSEYKATRQKAPDDLHAQVPLVEEFLAALNIPCLQADGFEADDIIATLAKKCQEEKRQCYILSSDKDLLQLVGNGTFELRPAKNTATGGGTPHGVAQKQNTGPVWEIIGPAEVKAEWGIPPEKILDLLSLVGDSSDNIPGVKGIGEKTAVEHIVRYGSLDGIYKNIAGLGGSRGKKIAEGKESAYFSQSLIRLETNVPLPITDIDKLSAENINRKAAAQVLFREGIRQSAKQLDSDISAAAASGDPKTQADEQRGAIGATYSADKSLFGGGVYKIINDITELKTLLDEAKEQKIIALDFETDSLDAWNSRPIGISFALRPKEAYYAPVAPHGVQEDGTAADPNHLDPQKVRGLLAP

SEQ ID NO: 89548 - protein, 443 aa, Unknown
  Obtained from environmental sample
  DOMAIN (93)...(314): CagE, TrbE, VirB family, component of type IV transporter system
  misc_feature (1)..(443): Xaa is any amino acid
MLQDYPRPCFKDGKSTFDSLAPFLIDRERDLSFNSEGRHFDSSFYLTFVWRPPSEGAKKLVSMFINSGVRDGNGAGVKQNVEFFVNESDSFVGLLSNGLLLEPLDNDETVKFLHSAVSFKRHEIYCPNTQIFLDRVLPDSELENNIPMKLGGNYIPIVGVNDFPDETYPAILDGLNRARIEYRWVTRYICLDKDEGVKEARKKEKFHRGSRKSFLQTLAEQTSGEAAKSVNHGASVKENDSVQANIDIENDVAALGYLTTCVMVWDASLKKAKIKADLVKTLINSKGFTCKDEKINALEAFKSMLPGQIYANYRALPVMTNNMAHVVPLSSVWAGNTSNSHALAVTGVDTPHLICTTIEGTPFYLSLNVGDVEHSAVWGPTGGGKSTVLNLLEMQVFKYPGSQVIVFDKGRSCRQPCLACGGLFFEPAAEKADGVNLQPLRHL

SEQ ID NO: 89549 - protein, 396 aa, Unknown
  Obtained from environmental sample
  DOMAIN (7)...(243): Methyl-accepting chemotaxis protein (MCP) signaling domain
  misc_feature (1)..(396): Xaa is any amino acid
SLNKMIEQQPESVDMSSSAMEEMTANIHSVTETLTENSKNVGALTEASENGKIGLQAVAQEIREIAHDSEGLLEINSVMNNIASQTNLLSMNAAIEAAHAGEAGRGFAVVADEIRKLAESSGQQSKTTAAMLKKVKASIDSITRSSDDVLARFGAIDSSVKTVSEHEQNILNAMKEQETGGKQILESIDRLRDITSSVKKGSDDMAKSGETLVKETDEFIKTSQEAVEGMNEILTGVNQIKVSVNHVNDMGMENSRNFESLKHEANKFNDAVGNEKQKILIVDDDSIHLEMVESVLQNEYEISTAKSGKEALGLFYQGLVPQLIFLDLIMPDMDGWDTYKRIKAISGLHDTPIAFFTTSTDQKDIKHAQEIGAVDYIKKPYDKDDLLHRVGRILNK

SEQ ID NO: 89550 - protein, 260 aa, Unknown
  Obtained from environmental sample
  misc_feature (1)..(260): Xaa is any amino acid
MQTIEIERLKLEATINSEIAIALRMADSPIIQWHFLNPADGELQKIAFEEITGYRRAFKGNSVFWCSDIDKEFYFNGDNHYTVDAENPDNYWYKMTLYETEKYNFNINYNPDIQRTMLWINAPVFDNNKKPVGLVGTGVNLSDFINAIYQDYSEDEELYFFNAAGEITGAENIDLVAKKINIVMELGQTGNKIMDNAKHLKTREIKYFKTTDQKGIIAYSSIPALNWYITVLRHVTIGESLQTDMTVLFGVMMTVIFAVF

SEQ ID NO: 89551 - protein, 499 aa, Unknown
  Obtained from environmental sample
  DOMAIN (327)...(492): GGDEF domain
  misc_feature (1)..(499): Xaa is any amino acid
MDKIQYDNARHELMQTVEIERLKLEASINSEIAIALKMADSLLIQWHFLNREDEDMKQIALGEIAGYRRAFTGKNVYWVSDIDKKYYFNDEYIYTIDSSDESSWWYNSIMANPVPYSLTVNFDVGIKKTMLWIDVPVLDNDHEPIGIVGTGINLSDFINAVNQDNSGTEDELYFFNAAGEIITARDIDLVEKKANITVVLGQTGDEILARTKELEIGEIEYFVTKDKRQIIAVTSIPVSSVLALNWYITAVRHVTAIGFLKTGMTVLFGIMIAVILFAFIFFNIFIAVMLEPLNQMVKTINQTFTDLDLKPQEGEQYKDEVGTLGDFLHLTIIDQLTGIYNRRYLDGSLKKIIKLLSRTGSSLSVLMIDIDYFKKYNDAYGHDAGDECLRAVADALSQCVIREEDFVARYGGEEFVVVLPNTDENGAKLVAERMLGKIRECNIPHEKSDIASHVTISIGGATNVVNHFQHGKDYIKLADEGLYESKENGRNRYTFLKTV

SEQ ID NO: 89552 - protein, 97 aa, Unknown
  Obtained from environmental sample
  DOMAIN (1)...(90): Diaminopimelate epimerase
  misc_feature (1)..(97): Xaa is any amino acid
LFENDPIFPDRVNAEFVETIAESRLKVRVWERGSGETQACGTGACASVAAAVLNGYCNKNADVKVQLPGGELIIKYTDETVFMTGECVKVFDGTVEI

SEQ ID NO: 89553 - protein, 95 aa, Unknown
  Obtained from environmental sample
  DOMAIN (8)...(84): Uncharacterised ACR, YggU family COG1872
  misc_feature (1)..(95): Xaa is any amino acid
MNNCFREDGDKIRLEIKAVPGASKTELAGVKDGRLRIRIAAAPEDGKANAEMLSFLSKKIDCPKRDLQLLSGEKSRLKTIAIPLERMEKLEQILS

SEQ ID NO: 89554 - protein, 295 aa, Unknown
  Obtained from environmental sample
  DOMAIN (14)...(209): Metallo-beta-lactamase superfamily
  misc_feature (1)..(295): Xaa is any amino acid
MERYINCIADKTSEGNLLIGDKYSALFDCGMAFCADITIQKVKNALKGRPLDYLFITHTHYDHIGSLPCFRKEWPSLKLVTSQAGAAVLLKDTPRRVIRELSIVAANEYKGKFDASYSDDDFHADVIVKEGDVIPLGGLSVQILETPGHTRDTLSFFIPELEMLILSETTGVLLPDDTVYPPYLTSFIDTANSIEKCRRIPYKFLSLPHKGLSEEIDANGFFDKTLETSTACRDFILDLNKKKIEPEAMLDLFYKKYGTEALFSYQPKDAFFANARATIACTLREFAPGETAAAS

SEQ ID NO: 89555 - protein, 47 aa, Unknown
  Obtained from environmental sample
  misc_feature (1)..(47): Xaa is any amino acid
MKRQIMGREVVVAVTGGKLHFGPWEQIFYGEFDGQRKKRVLVKIIGE

SEQ ID NO: 89556 - protein, 71 aa, Unknown
  Obtained from environmental sample
  misc_feature (1)..(71): Xaa is any amino acid
MSALTDLIYKGANAVAGLTEEAVKKAIEKYGADKKISFPDTAYFFPTILSATGVKVDKLGVLNACVGVLKG

SEQ ID NO: 89557 - protein, 483 aa, Unknown
  Obtained from environmental sample
  DOMAIN (69)...(483): CO dehydrogenase/acetyl-CoA synthase complex beta subunit
  misc_feature (1)..(483): Xaa is any amino acid
PPFVNAFGPLNEVIVAAGAGAIALGFPVISDWDVVASVAIPGALEHSAGGEEMVKKSLELRSIKVKTKKISIPVAFSSAFEGEIIRKSDMAVEFSSSHNTTCELLVMKDPASIEDHKITLIGNDIGGIKTYPVNMALAVYVEVSGAKMKTDFEPVIERKIHHWVNYIEGMMHTGQRNMFRVRISKETLEKGFKLKDLGEVIYTMVRDEFAAVVDKCQVTLVTDEAKAAEILKKEAMPKYEARDSRLASMTDENAACFYSCILCQSFAPSHCCVITPERLGLCGAVSWLDASATKQLVDTGPCQPIAKTGVQDEKKGIFDSVNEAVKAATNGWIKRMSLYSIMEDPMTSCGCFECICGIMPESNGVVVVNREYKGVTPNGMTFGELATMTGGGAQTPGFMGHGRHFIASKKFVHAEGGVGRILWMPKELKDDVAVKLDKTAKDLYGIDGFSGMICDESVATDIDGVVAFLKEKKHPALSMEAML

SEQ ID NO: 89558 - protein, 226 aa, Unknown
  Obtained from environmental sample
  misc_feature (1)..(226): Xaa is any amino acid
ALSLVLPWQEIRQGHSLPANTLIHPLSEYPRINGLVEANIEEALSLLAEANHPKGAGLPELVIRITPSQEAERIALLMARAWYEILNINVKIDVVSFRQYYQSVKQNDYDVGYTTWIGDFADPYTFLQMWCRDSNLNDALHDDSDYEALIDKSMNEEGRKRMETLAEAEALLLSRGNVLPISYSPAVNIIDTNEIDGWYPNALDIHPFKYMSIKARSPLPGVVMAR

SEQ ID NO: 89559 - protein, 70 aa, Unknown
  Obtained from environmental sample
  misc_feature (1)..(70): Xaa is any amino acid
MSEWIGYLASVLVAVSITINNNFYFRILNLVGSACFMVYGLFISSWPIVIINIYGIGINIFHLIKGRKKT

SEQ ID NO: 89560 - protein, 470 aa, Unknown
  Obtained from environmental sample
  DOMAIN (46)...(456): Sodium:alanine symporter family
  misc_feature (1)..(470): Xaa is any amino acid
MEKFSQIIETIDGWLWGPPLLILLVGTHIYLTIRTGFIQRKLGLGIKLSVTRDKGSTGDISQFGSLVTALSSTIGTGNIIGVGTAIAAGGPGALLWMWLTGVFGIATKYSESLIAVKYRVKNNKGMMIGGAMFALERGLKMKWLGTVFAALTAVTAFGIGSGVQSNAVAIRLFDDFGIAHWVSGLIISVMTALVIIGGLKWIARAAQALVPFMTIFYILGCIIILVINHHFIIPAIQLVCTNAFNIKSLGGGFLGFAAVQMMTAARYGVARGLFSNESGMGSAPIVAAAAQTKNPVRQALVSSTGTFWDTVIICLLTGLVIISSVLAHPELRIDGLEGDTLTRIAFSQIPMIGNFILTFGLITFAFSTLLGWSYYGEKGLEYLFGTRSIALYRFVYVIVAYLGTVLSLDIVWNIADALNALMTIPNLIAVLLLSGVITAETKKYLEGGRIEDVDDTPIPTRKQLTDGEEN

SEQ ID NO: 89561 - protein, 410 aa, Unknown
  Obtained from environmental sample
  misc_feature (1)..(410): Xaa is any amino acid
SFIEGLKDAGNTEIWKQCYDYIAANIALFERFTKSDLDAISPFVSSSVTLSTLHGCPREEIEKIAAYLINLKGLHTCIKCNPTLLGYETARKLLDEMGYGYISFDDHHFKNDLQFNDAVDMLKRLQAQAKKRKLDFGVKITNTFPVQIKRNELPGNEMYMSGRSLFPLSINVAKKLSRAFDGEISISYSGGADYFNLKDILETGIRPVTVATTILKPGGYERLPQLAEMAEETVKDISMAAPVNVNALNALAESLPKRNRYRKEYRQTGLRKTGSPLPLFNCAKAPCMDGGCPIHQRIPEYLTAVAAGNYDEAFKIIAADNTAPSITGTICDHQCQYRCTRLDYEDPLQIRKAKLLAADKAQNAFISLLQSPQIKTNKSAAVIGAGPAGIAAAVFLRRCGVPVTVYENAG

SEQ ID NO: 89562 - protein, 309 aa, Unknown
  Obtained from environmental sample
  DOMAIN (91)...(254): MatE
  misc_feature (1)..(309): Xaa is any amino acid
THFIRSDGHPKTSMLVQIVGALTNIILDPIFIFAFNLGVAGAAWATIISQFVSFIFVMGYFSSKWTKLRFRLRHMKLNAEITGSILAIGFAPFIMQFAMSLVGVLQNAVILKYGGDEALTAMTIFFSALIVVIMPILGIGQGAQPIIGYNYGAKQYDRVKKCYKLALLACTGVLTAGFLTTQLAPAFCFSLFSKDTGSLRDLGILTMRICTGMFPIIGLQMMSGQLFQAIGKPVQAAILSLSRQILFFIPMVLFLPVLFKTIGLRPIYGVYCTFPLADFCSAIISGVFVYRQFRAWKNEQSANTHTLTE

SEQ ID NO: 89563 - protein, 314 aa, Unknown
  Obtained from environmental sample
  DOMAIN (13)...(300): Dihydroorotate dehydrogenase
  misc_feature (1)..(314): Xaa is any amino acid
MSEKNNTQEIQCDMSVNIAGVKLRNPVIAASGTFGKAREYSSMFDLSLLGGICTKGLSLNPRKGNKGARVWETPSGLINSIGLENPGIQSFLADDLDYMKRLGPAIIANLCGSTSDEYVKGAVLLNESSIDMIELNISCPNVRDGGLTFGLDAGTAAALVIAVRRVCKHKPLMVKLSPNCPSIASVANACVNAGADALSLVNTIRAMAIDVENRKPVFDNIIAGLSGPAIKPIALRMVWELKDTLKNMKDIPIVGMGGISCTNDALEFFMAGADAIQVGTATFANPHAMAEIIDGIHNYLIENKMLNTGQISIR

SEQ ID NO: 89564 - protein, 296 aa, Unknown
  Obtained from environmental sample
  DOMAIN (16)...(267): Orotidine 5'-phosphate decarboxylase / HUMPS family
  misc_feature (1)..(296): Xaa is any amino acid
MAANIDKLYNSVNEKGHVCVGLDTCVDYVPPAQRLKDNDPQSVLEFNKALIDATFDIAACYKVQIAYYEEMGTAGLCVYSETLKYIRAKNCLVIADIKRGDIADTARCYAKAHLTGGFKADFVTLNPYMGMDSIEPWLSEARNSGGGAFVLMRTSNPGMKDFQYLETSDGKKLYNKVGDKLSELAAKHNGKSGYGLFGAVVGCTERQEAAVIRKNYPNLFFLIPGYGTQGGGAQDAAVLLRYKNGGVVNASRSIITAWQKEDNNENADNAFAAASARKAAIKMRDEILFAVNGDSK

SEQ ID NO: 89565 - protein, 314 aa, Unknown
  Obtained from environmental sample
  DOMAIN (100)...(253): ATP-grasp domain
  misc_feature (1)..(314): Xaa is any amino acid
TPHKYDIHPVLISQDDYWIWGRKPLTPYQCQNFNVNFFTSAENDMQKKLRPSLEELKPMDIAFLALHGRFGEDGHIQAMLDYAGIPYTGSGMLSSALAMDKIKSKEIYRANGIPTAEFRVWQRESFSKETIEEAFEHLGSPIVIKDPLGGSSLDMGFAKNIEEAGKICERLFEKSGRLLAEQFIAGMEASCGYIEGCEPLPPTEIRMTTREFFDYDAKYNGEVIEITPAEFPKNLIKEIQTLVRKAHYALDCQIYSRTDVRINKEGKLFVLETNTLPGMTPTSFLPAQAKHIGLDYSALVETLLEKSLTKSTGR

SEQ ID NO: 89566 - protein, 482 aa, Unknown
  Obtained from environmental sample
  DOMAIN (265)...(482): Uroporphyrinogen-III synthase HemD
  misc_feature (1)..(482): Xaa is any amino acid
MKVTLVGAGPGGIGLLTVRGLETLQAADVVLYDRFVSDDILAVIPDSAEKIDVGKHAGSHPVPQDVINKLLLEKAREGKNVIRLKGGDPFVFARGGEELELLAENDIPFEVVPGVTSAVAAATYAGIPITYRDCASSFHVITAHAKNNEPMNIDFDTLVKLNGTLVFLMGATAVGDICESCAAAGMDKDMPAAVVENAAANRQRKFLGTIATLPQIAGANNVESPAVIIIGKVCQFSARYDWFDRKPLRGKRVIVTLVNVDTSKLGTSKLSNALRELGCDAVELPYSKIAPLTGLGSILERTLKNINDYSWLAFTSGVGVNIFFDYLKDVSIDIRELRRLKIACVGTETEKEVNMRGIRVDYIPAEYNGTALAHGLSGLVKNGEKLLIARAKNGDKDLTCVLTNTGTVFDDVPIYEKVKNTERTDEIRNAINRNSFDFAAFTSPSAVKGFAETAAYMDFSKIKAVCIGEKTAAAARSYGMEV

SEQ ID NO: 89567 - protein, 397 aa, Unknown
  Obtained from environmental sample
  DOMAIN (279)...(389): OmpA family
  misc_feature (1)..(397): Xaa is any amino acid
GDGKTDSDQLAPDGAYTFKIAATDRAQNTGSAVMSNIVVGTKTADAILSASADAISPKTGQTAELVRFNDRLNRTDAIDSWKLEIKNDKGGIVKIYQGSGGRPPENFSWNGLSDDGSIPEGLVYPEFTVNYRDGFVANAKSPPILVDTTGPSLDLSSRPNQFSPDNDGVNDVLSIRLKTEDSSPIARWTLDIYEPAMENGANPGIFKHFEGNSAPVEELMWNGRGNNGDLVQSVVDYPYTFTVTDALGNTSVKNGSFGIDVLVIREEGDKFRIQIPSIVFPADSAVFDGLNQNTLDNNIRVIKRVAQILNKFRNYKVTIEGHANPTTAPGPSREQEEPSLKALSEKRAGYILEQLVRNSVARNRLSFTGAGGSMPLASFEDRSGWWKNRRVDFILIK

SEQ ID NO: 89568 - protein, 82 aa, Unknown
  Obtained from environmental sample
  misc_feature (1)..(82): Xaa is any amino acid
MNKHKNDWALVLSGGGAMGLAHIGVLRGLEDAGFPRPSLVVGTSMGAIVGGLYAIGMSPEEMERFVIDEFNIADYLDSFVLR

SEQ ID NO: 89569 - protein, 523 aa, Unknown
  Obtained from environmental sample
  DOMAIN (58)...(274): 7TM diverse intracellular signalling
  misc_feature (1)..(523): Xaa is any amino acid
RRTWNDVSFPVDGTLVLPGTNILALRILGDPTYRGTGLYYSSAPIYMDDYRSIESGQFNYLYIFLCGFFAFTGIYYLMLFLSVKKKTEVFNLYFGIFSILIGAYIVSLQGLINTLIPNSDISKRLEFGSLMLAIPVFGMFLEALGRGGKTTKISWSYMAFSFFLCLTQSFFCRQYGEEVIIIWNAVTGIYVSYLLVYEIFYFHLWSRHKVQAQGNNAGKASAMPIDNILIGMVICYLCGVFDILYNTFFKNNISLFSYSVIVVYIGMVFTLSWRFSDMYKRLEKSNAMLEIAVHERTIELERQTDIAIQANRAKSQFLATMSHEIRTPLNAVIGLSEIVLRRGKLPEASENDIQQIHQSGASLLGIINDVLDISKIEAGSFELVPVKYETASLISDTVMLNMVRIASKPIVFSLEISGDFPSMLFGDELRIKQVLNNLLSNAIKYTKEGSVTLSVAWESFTEKENEALIRFGVRDTGVGIRAEDLWKLFSSYTQLDPQANRKIEGTGLGLEISKKLVDMMGGS

SEQ ID NO: 89570 - protein, 541 aa, Unknown
  Obtained from environmental sample
  DOMAIN (205)...(435): 7TM diverse intracellular signalling
  misc_feature (1)..(541): Xaa is any amino acid
MLIVVFYAWNEQNKTRRGNSPLYINLRECPSFARKGFDPADLLKIPDEGPQAGGEWKRFEGKSRRIGDAGLKIPKRKYLSPWGNDTEEFTIVFLVEMDSAAMAFLEGNISVVPGFFFAGIGESWEVYFNGKLVLSEIHLDENGRIRERRTWNDVSFPVDGALVRPGTNILALRILGDPTYRGTGLYYSSAPIYMDNYRNIERGRFDYLYTFLCGFFAFTGLYYLMLFFSVKEKTEVFNLYFVIFSILLCVYNVSLHGLINLLIPNSDISKRLEFGSMMMAIPIFGMFLEALGRRKITKISLSYMACSFFTCLTQSLFCRQYGEEINVIWNVITGVYVSYLLVYEVIYFHFWSGHRTKVLETKVLRTKVLKAKVLGSDADKAPALPIDNILFGMVICYTCGVFDFLHNTFSKDNISLFSYSVFVVYVGMVFTLSRRFSGMFKQLEKSNTMLEMAVHERTVELERQTEIAIQANRAKSHFLATMSHEIRTPLNAVIGLSEIELRKNLPESSRENIAQIYQSGSSLLGIINDILDISKIEAKSF

SEQ ID NO: 89571 - protein, 159 aa, Unknown
  Obtained from environmental sample
  DOMAIN (48)...(123): Mur ligase family, catalytic domain
  misc_feature (1)..(159): Xaa is any amino acid
METNNAFSRFIGDFLDSALAEKAGIIEIRTGASAPAPLAFFSWPAASMITGLKYDSRTIAPGDLYFALPGLHTDGHDYISQAVDRGALAVVHQKECSEFREGIIYIRVKDSRFAMSPIADAFYNFPSRKMGIIGVTGTEGKSTTVYLIYQLLKLLGRKA

SEQ ID NO: 89572 - protein, 297 aa, Unknown
  Obtained from environmental sample
  DOMAIN (80)...(246): RNA pseudouridylate synthase
  misc_feature (1)..(297): Xaa is any amino acid
VEYPLTPGLRLDRYVAERLKILSRSQIKARCLEARLNGRAVKISHVLKGGEQIDLSWLESESPFLIPQELPLDVIYEDERVIVVNKAQGMVVHPGAGNRQGTLANALLFRKLKSTGRLPDFSPDDAGGLAGLRPGIVHRLDKDTSGVIIAAWDDDTLAFLSDQFKKRKVSKTYAALVQGCPREKEGWIDKRITRSRRDRKTFTVSDTEGRKSLTYFKVVRSYGKYSLLLLRPKTGRTHQIRVHLKYLGNPVLGDPIYGQRDFVFPHSTLMLHAKRLSLFLPSNVRTTFRTPLPERFP

SEQ ID NO: 89573 - protein, 371 aa, Unknown
  Obtained from environmental sample
  DOMAIN (228)...(306): Mur ligase family, glutamate ligase domain
  misc_feature (1)..(371): Xaa is any amino acid
GIKTASYASPHVSDFRERITVGGNFLDEEIYANAGKELMELAGQVKLKNGEQMSYFELLTMWFFLCARLSNCSAMAVETGMGGRLDATNILDPLVSVITIIELEHTEYLGNTIAAIAAEKAGIIKQGRPLVLAEQSVQALDVFWEHAKRRASPFFYFPDCGEVKNTHVEKSGTSFDLVLKSETIPGLFVPIPGEVQAKNAGLAVLAVKTAFPNLQNQCLYKGLSAFVLPARFEKISSTPLFIVDGAHTKTSVKTCLDTFSLLYGDGGILLFGCAEGKDVLSMAELCLPHFSRIIITKPGTFKKSNVEEIHAVFIQMAEAQKTHPEIIFLPDTEEAIDLVLRLTAKHGLPALGTGSFYLAGEIRGKVDLKNH

SEQ ID NO: 89574 - protein, 255 aa, Unknown
  Obtained from environmental sample
  DOMAIN (1)...(237): Cell cycle protein
  misc_feature (1)..(255): Xaa is any amino acid
MDKKANNMNNFSSGILPPVLVTGLFFGLIYMQNNFSTAVFLVFNAMVIFFLAGMRFRYFFAAIAMILPVSALLVFTKEHRVKRLVSFLRPQWDPLGAGFQVNASRDAIVSGGFWGKGIGEGTRKIASIPEIHSDFIFSAFVEETGFIGIMLFFVMYAVFGILGYRAALRAQTVFGRLLAAGMTTMIITQTLSNVAVVSGALPATGIPLPFFSAGGSSLLTTMICAGLIANVARNDAITSGVRNPIYDVSEGEYDI

SEQ ID NO: 89575 - protein, 326 aa, Unknown
  Obtained from environmental sample
  DOMAIN (18)...(326): Major Facilitator Superfamily
  misc_feature (1)..(326): Xaa is any amino acid
MTIPPLSPYRLRKAREVFNLFNVFNALSWNLLVGSIITLFAIRLGASSTYIGTLSALLYVSFFFLPLGKMLSKKFSIVGIFSFTWTFRAIGMITVVFAPIAAHLGHHDTALGLTMLGVGIFHVVRGVGMIANNPVLSNLSTGPDRSSYMTQIQIINSAVGMFSGFAIAIILGKEPGLYLYSIIMAAGIVCGVTSGMLIGKVPEPPTEKSAVKTSLVGLIREALHEPKTKLFLIILLLVVLVSGVSRTFLVVYAREVFIQEDGMVLLYSVFGGLGQLLANMLIKFLVDRIGAEPIFIICVLFGFVMMIPIVFFPPSSVNSLTMVILF

SEQ ID NO: 89576 - protein, 89 aa, Unknown
  Obtained from environmental sample
  DOMAIN (3)...(73): ACT domain
  misc_feature (1)..(89): Xaa is any amino acid
MNAIITVVGSDKVGIIAKVSAFLAERNINILDISQTVLSGNFVMMMVVDLSSSAKALEDVKKELFAMGESFNVSISLMHEKVFSEMHRI

SEQ ID NO: 89577 - protein, 208 aa, Unknown
  Obtained from environmental sample
  DOMAIN (85)...(143): GHMP kinases N terminal domain
  misc_feature (1)..(208): Xaa is any amino acid
MLSEFAPAKVNLFLSIIKKREDGYHDIGTMFHTISCGDVLFGELSADGEISIFYNEPQEYPPEKDLIYKAAVKLKEAFGVSSGVNFYLEKKLPLGAGLGGGSSDAAAALRLLNKLWGLNASSLELEKIGSSLGADIAFFVKGGAALAEGIGDILTPRNPINSESCAIVVATPKCVVPTAEAYKDVILSGAQRWQNFVKNMDPFDDLYN

SEQ ID NO: 89578 - protein, 498 aa, Unknown
  Obtained from environmental sample
  DOMAIN (223)...(385): Alpha-2-macroglobulin family N-terminal region
  misc_feature (1)..(498): Xaa is any amino acid
MTVFRPQNAETRGYVFGPRRGWDSKRYTGSQSGMLSGQGTASLSQKTGGGKITGAPYIYQAEARVTDISNQMVTAYRSVVVHPASFYIGLYRSAGGFSRAGQEVSVDYITVKVNGEKTSNNELFLQSGEGAGQLKVELLREEWRRIQQRGVNGYIYDEYTSQQVVDSSQTVNIRNNGGSLKVKPSKAGFYILRVSSRDREGRTALTELTFYVTGSGGYWNMSNPQEIRLTPDKDVYEPGDTAKVLLQSSLPEGSYLITVERDGIYTEEVRYLNESVTVLDIPIARNYVPVVYLAVSSYSVRSGAPSHEYGSPDLDKPKGYYGVTRLSVNPRTKAFSVQVESDKKTYRPGDEVTMTLTATRDGVPLPNAELTLMAVDRGVLDLINYHVPDPIDYFYSESNFRLYAAGGDSRAMLMDPVTYSVKNLAGGDAESDSKIEERKDFNPTAVFEPMLITDANGKVTCKFKLPDNLTTYRVTVFGVRGDLFALKETEIAAQNKIN

SEQ ID NO: 89579 - protein, 444 aa, Unknown
  Obtained from environmental sample
  DOMAIN (34)...(431): Aminotransferase class I and II
  misc_feature (1)..(444): Xaa is any amino acid
MRRDILHPGAGKLRYEIREIVSFAKTLGKWNIPIHWENIGDPVQKGEPVADWIKDIVREKAWENLSYAYSETEGVRSTREFLAELANKRPVIELPGSNMQTPPQIKAEDILFFNGLGDAVAKVFGFLRREARVLGPSPAYSTLSSAEAAHSGYEHLTYRLDPQRDWMPDMIDVELKVKYNDSIAGILLINPDNPTGAVYPVEVLLEFVRIARNYGLFIVCDETYANIIYGGAKTAALSQIIGDVPGLAMRSISKEVPWPGARCGWTEVYNRRADPRFDAYIKSLVDSKRLEVCSTSLPQLCIPAILGNARYPKHLEKRAAMFKKRADEMEQAFAGISGITIKKPCGAFYVSAVFDDVVNENPGLRSLPVSDESLRNYIRAEITNLKPDKQFAYWLLASTGICVVPLSGFASDLPGFRFTLLEYNDEKRNWIFNTLAEAVQIYLR

SEQ ID NO: 89580 - protein, 270 aa, Unknown
  Obtained from environmental sample
  DOMAIN (24)...(267): Aminotransferase class I and II
  misc_feature (1)..(270): Xaa is any amino acid
MSVYWNTRIKNLSPYVPGEQPKERQFIKLNTNENPYPPSPKVIEAIQKTAGERLRLYPDPECTEFREAVAARYRVKPEQVFAGNGSDEVLAFAFGAFFENSGGGPILFPDITYSFYPVYANLWDISYRTVPLDDNFIIKIDDYMIPSGGIVLPNPNAPTGIALPLCEELALARYCEKQGKVLILDEAYLAFSAAAGVESAVSRIGDHPNLLTVHTLSKSASLAGLRVGFAIGNEDLIEGLRRVRDSFNSYTLDRLALAGAAAAVSDVYYY

SEQ ID NO: 89581 - protein, 77 aa, Unknown
  Obtained from environmental sample
  misc_feature (1)..(77): Xaa is any amino acid
MVGVDGELRQDRWQQDGQNRSKVEIIANYIQLLGGGGSGGGAGDRQNHNNSSGGNSHESQNYAPSGKDDGFTDDIPF

SEQ ID NO: 89582 - protein, 268 aa, Unknown
  Obtained from environmental sample
  DOMAIN (1)...(249): IPP transferase
  misc_feature (1)..(268): Xaa is any amino acid
AKLPHYLIDIRNPCEQFNVGDFVRLANEACVEIASRRKLPVVSGGTGFYLKNFILGLSEAPPSDKSIREQLKRELSEKGAAFLLEELASCDSISANRIHINDEYRLLRALEVHRSCGKPLSSFEINTAKNRPNFHFLIIGLSRPREELYHRINLRCADMFKQGLAAEVSSLFKSGYTPEDPGLRAIGYREFFVEATQDGDFSADKQCKWRLSEDIEGVQALIAQNSRRYAKRQITFFSGIPNVNWLKPGHDDAETTNKIRILLSSQFI

SEQ ID NO: 89583 - protein, 199 aa, Unknown
  Obtained from environmental sample
  misc_feature (1)..(199): Xaa is any amino acid
MKTSDMAAAGSSKKRYRPRFIDDIYRPDAKVGRFLSVLILFGVSFGLYRGIQDNYLAEINHITPFERGIVEFFRETPGLLLIFILALMYRFADSKIFKIGIGVMAGGVTGLFLTSTSGLLLTKLIVVVFMVLFSAGEHIIMPVRASIAMDLAKQEKTGASLGITNSLSQFGNIAGFILVTVIFLILENIGISRVDIPDT

SEQ ID NO: 89584 - protein, 85 aa, Unknown
  Obtained from environmental sample
  misc_feature (1)..(85): Xaa is any amino acid
MIFPLKELIEYGDNMYEITTAASRRAYQLSSVLEKDEKDDYDGKMVALAALQVLPKKSNSVWKLNNPFGNLRYSGISSLWSDSVR

SEQ ID NO: 89585 - protein, 388 aa, Unknown
  Obtained from environmental sample
  DOMAIN (92)...(325): Beta-eliminating lyase
  misc_feature (1)..(388): Xaa is any amino acid
MYKLSDRTAGFTDSVIRRMTRVSLKYGAVNLSQGFPDFDPPKEILDRLAEIAHTGPHQYSITWGAQNFREALCEKQSKLMGRQIDPQREIVVTCGSTEAMMAAMMTVANPGDKVIVFSPFYENYGADTILSGAQPVYVPLRPPLFNFDANELEAAFKQRPKALILCNPSNPCGKVFTRDELTVISDLAKKYDAYIITDEVYEHIVYAPHTHTYIASLPDMFERTISCSSLSKTYSITGWRLGYIIASEEIIEVAKKVHDFLTVGAAAPLQEAAVVGLRFPAAYYEKLLREYTERRQLFLKGLDDLGIQHTNPEGAYYVMLDISEYGYKSDLDFCEKLAEKVGVGAVPGSSFFREDVNNLIRFHFAKKNDTLYEALNRLEKMRERMRRN

SEQ ID NO: 89586 - protein, 101 aa, Unknown
  Obtained from environmental sample
  misc_feature (1)..(101): Xaa is any amino acid
EAPASDPPVLPSDASSAAAKAVQESPLEGEIIIDKARWHAIDTLLEGSGPFDRDVVFAYMLKLIILNRQALFQTEKGFSEYKSLYASILEKSGNLSAGDYK

SEQ ID NO: 89587 - protein, 373 aa, Unknown
  Obtained from environmental sample
  misc_feature (1)..(373): Xaa is any amino acid
MYPNITISYEGITDYSESMTTRISTPDWGDACMIPTTVPLTELVNYFEPFGQTDILERTYNFADNRAFGGITYGLSSTNNVQGVLYNKAVYQKAGINPLPKTPDEFLAALKKIKDNTDAIPLYTNFAAGWTMGAWDAYIGGSATGDPDFMNQKLPHASNPFANRGDGTGPYAVYYVLYEAVARGLVEPDPSTTDWESCKGRINRGEIATMVLGSWAIVQMQEAGPNPQNIGYMPFPITVNGKQYASAGADYCYGINKNSSRDVKLASLLYIKYLIDKSNFDYDQGGIPTVKANPPPATLSAFNGIDLVADNPSLKGEEDLFVNINVESELGLNMDNRHVISIVEAALRKSPSLDTIVAGWNANWTKAQQKYIR

SEQ ID NO: 89588 - protein, 239 aa, Unknown
  Obtained from environmental sample
  misc_feature (1)..(239): Xaa is any amino acid
MKDNILKFLKYAILIAASFIVLLPFVSVLITAFKTVEEYNTTNVMVLPHSWLYFGNFVTAWQRALMTRAFLNTTIVLCFVLFGSILISAMLAFVLNRIKFPGNSIFRNMFLFASLIPGVAMQVTVYQIMYSLHLINSLGGYIILLMGSDVISIYIFLQFFASLPVSLDESAILDGCNLFGVFFKILLPLTQPAIITCMILKGVSTYNEYYMANLYLQDKVKLGVMATALYKFRGPMEPN

SEQ ID NO: 89589 - protein, 389 aa, Unknown
  Obtained from environmental sample
  DOMAIN (143)...(216): Domain of unknown function DUF11
  misc_feature (1)..(389): Xaa is any amino acid
FRAPWRTVLNYMWHGNPRYTWDPVNHVIINRANTSQRDAGQRFAKFLWDRRQAPWNDTCEKIIGEGSWWGPSMLKYHYSPDGRALTVYPLNWIHGTGSPSAVAAQDADLMAEMYRQAELEWDVEEPGDRYLTSTPHYFHGFFRLLGMTTLTGNNHAPLNMKRAANMKVYLDVDKTYAFEDDTITYTIDYRNYGADEAKGVRIVNKLHPDFVFISGTGSPSYDAASNTVTWNIGNVPGFKTSTGINPTKGTVTLKVRIPNAKLKRYENKVTISCTNGSGWTSNEYPNKISSVMKRTGVDIASRALRVDHSLSRDTVNPGMTVVYTIDFENSAKAGWLNGGRPGVNFSYAHDGTAASAGSHTFQLRAFHDAHEAYIDYGNYRISYFLFDNN

SEQ ID NO: 89590 - protein, 229 aa, Unknown
  Obtained from environmental sample
  misc_feature (1)..(229): Xaa is any amino acid
VGQGGLVVFGVKPSRPETGYGYIEVGERLTADDGDCPAFKVKRFVEKPNAGDAAVFMESGGFLWNSGMFVWKASAILEAFKKYMPDLHGQALAAADKGFTAEAISEFYSVCPKESIDYGIMERAEGVSAVCGEFSWDDLGSWEALSRLLGSDGAGTTVGGAAAYHSGCAGSLIINKSSGGLALAAIGLKDVALIAVDDAVLAIDRSRLPDLKKYLADIKNSGKFPADLF

SEQ ID NO: 89591 - protein, 500 aa, Unknown
  Obtained from environmental sample
  DOMAIN (23)...(91): ATP synthase alpha/beta family, beta-barrel domain
  misc_feature (1)..(500): Xaa is any amino acid
MANYGDLTRVLEEQIKNWNGKAITESSGFVVQAGDGVVSIHGLSRAIYGELLDFASGASGIALNLEEDGVGCVLLSGESGVKDGEEVKGTGRVVSVPSGDSLVGRVLNPLGKPIDGKGPVQAEEWLPVEAPAAPVIERGSVETPMQTGILSVDSMIPIGRGQRELIIGDRQTGKTALAVDAIANQKDKGMYCVYCAIGQKSSSVAAIIKNLEKAGALDYTFVVLASASDSAALQYLAPYSAVAMAEHFMHKGKDVLVVYDDLSKHAVAYRAISLLLRRPPGREAFPGDVFYLHSRLLERAAKLSPARGGGSITALPIVETQAGDISSYIPTNVISITDGQIFLDTELFNSGFRPAIDVGLSVSRVGGSAQFKAIRKIAGRLRLDLAQYREMAAFAQFGSDLDKATQTKLAQGERLMEVLKQPQLSPYPLELQIAILFLAVNGYLLDVKTENVSTFVKDFLSHLKDQKADLMRGIAETGAVSKEQEDELRLTVEAFKGIKK

SEQ ID NO: 89592 - protein, 67 aa, Unknown
  Obtained from environmental sample
  misc_feature (1)..(67): Xaa is any amino acid
TLDKLSAARIDKFVQQLFGTKIEHGQLANSDLSFRELETIKNAFVKVLAGYYHSRIEYPKQKEEAPQ

SEQ ID NO: 89593 - protein, 323 aa, Unknown
  Obtained from environmental sample
  DOMAIN (5)...(271): Nucleotidyl transferase
  misc_feature (1)..(323): Xaa is any amino acid
MSEVLSIILGGGKGTRLFPLTQFRSKPAVPFGGKYRLIDIPLSNCINANLKRIYIVTQFNTASLHLHINQTYIFDPFTNGFVEILAAEQSLVHSGWYEGTADAVRKNFPHFRTQNPSYYIILSGDQLYRMDLQDLLEKHIESKAAITIACTGVTRENASGLGILKADKNNQITEFMEKPGPTKDISDFKAPKELLRDKNKGDCFLGSMGIYVFNAKAMDGCLENELTDFGKEVIPQAINNLKVNAYLFDGYWEDIGTIRNFYETNLELTALRPKFDFYDEDRPIYTHRRNLPPSKINFGNMNQSIAAEGCIITNGSITDSMSV

SEQ ID NO: 89594 - protein, 201 aa, Unknown
  Obtained from environmental sample
  misc_feature (1)..(201): Xaa is any amino acid
MKDMSVNDVTEFSRDGRVIVLNLNKRGIDGVGMTAFPTEIFKLTALKGLFLKGNALKELPQEIGNLSELVELNLADNIDLGRLPSGICNLRNLRKLDIRYCGLTELPPEIGNLNNLEFLQMWGNGFIELPYSITELTKLKELYLNDNKLTKLPYDIIKMDNLKYIDVQRNFLCDVLPEVDAWLMSINRMYKAYQFCENVKR

SEQ ID NO: 89595 - protein, 80 aa, Unknown
  Obtained from environmental sample
  misc_feature (1)..(80): Xaa is any amino acid
TAGALRDLGFTVLPSSANFLFVKPPDKSGAELFAALRSRGILVRHFNKDRIADFLRISIGTDADMDKVLEACKEIMKNED

SEQ ID NO: 89596 - protein, 356 aa, Unknown
  Obtained from environmental sample
  misc_feature (1)..(356): Xaa is any amino acid
LSGPQKQSGDIIEIDYFYFSKQTEQGPASFELIFYLKNTDGKNIRYRYGFTITHEEVIAEYLFAIYNTREVTLFTREKQDIFTTHYFHEGNRIKSAVRSNCSVLSVSAQYNGDIAKSIIQYFNEMLVISGLIDIPNTKGLLSTFTDDNARVQVLSFLHYADIQVKELIVKRRSLDVNEISPKLLDYYKKNPQVKPPEQIAYHFGHDYFDGNEKTDIALIPEDEESEGTQKLFDYSIPIISALENGTPLFIDEFDTQLHPLILENIIKLFHSPDINKNNAQLVISCHLVNIMTNKNFRRDQIWFCEKDQYGATNLYSLVEYDEPVRNDAAFGKNYLQGKYGAIPYINEIALQFGKKE

SEQ ID NO: 89597 - protein, 81 aa, Unknown
  Obtained from environmental sample
  DOMAIN (35)...(79): Bacterial regulatory helix-turn-helix proteins, AraC family
  misc_feature (1)..(81): Xaa is any amino acid
MADMANIHPTYFGILFKKKTGMSFNRYLIQTRVQKAEKMLASGNYRVTNIAEACGFTDISHFYKHFKIVRGYPPSYYMPKK

SEQ ID NO: 89598 - protein, 211 aa, Unknown
  Obtained from environmental sample
  DOMAIN (6)...(108): Hpt domain
  misc_feature (1)..(211): Xaa is any amino acid
VETDNDILAEYIEESREHLSHVEQIFVEIQKTGAVSPGSINDLFRAIHTIKGSAGFLGLTGIGTLTHTMESLLDSLREGRLSMTEQITEALIEGTDILNDMFDDVDNSNSKDTSELIALLKNLNSASGAPKPAPAAAAPAPAPAAPAPAAAPEEKRSVADVLNQFPELAQYVTPEQQAEAAKAAPAAPAPAAAAPAPAPAAPAPAPEVKKK

SEQ ID NO: 89599 - protein, 306 aa, Unknown
  Obtained from environmental sample
  DOMAIN (1)...(303): Glycosyl hydrolases family 8
  misc_feature (1)..(306): Xaa is any amino acid
MFLALYCNDQTYFNKIWNGAETYMWSGGAKLYNWRRDSQGNANPAMGPYNDGPASDAEQDIALLLIFADQLVKNNIWRPYTDPKNNATYAGRARDMLGTIRTTMIKDGKILLPGNWGGDGAGTINPSYFSPGSYEIFAEFDPENASAWKTLTDGVYEMLAKSPGYSRGLAPDWYTFEGRSTGGAGYNAYFAGDAMYMDAIRIFWKIGLHYLWYKDERAKSYLSKAINFLGSPEKANFFTMNGELLPDTAIDAISDGKGGKVERPRRMHNHLTVGMWSIAAMAAGGVEMAEEYSDEFLKFYDTGNDF

SEQ ID NO: 89600 - protein, 91 aa, Unknown
  Obtained from environmental sample
  misc_feature (1)..(91): Xaa is any amino acid
MLQILKYLKPKERFMAGVSLIFIVAQVWLELKLPDYMSTITRLTQTPGSAMRDIWLNGGYMLLCTLGSLAAAIIVGFFAARICASFSQRLR

SEQ ID NO: 89601 - protein, 112 aa, Unknown
  Obtained from environmental sample
  misc_feature (1)..(112): Xaa is any amino acid
VGYSFNRIASYSYAAGVYAQIDGMLENGTQAVAVEVKTKLKQSDIDDHLLRMGKIKKHADENGDKRQFMGAIAAFITDENTRNYALKQGLFVIEPSGENVKVTKPEGDVRVW

SEQ ID NO: 89602 - protein, 221 aa, Unknown
  Obtained from environmental sample
  DOMAIN (25)...(215): Glucose inhibited division protein
  misc_feature (1)..(221): Xaa is any amino acid
MSQTTSVLLKEGLAKLGIEESGGRILPLLERYIEEIELFNPAYGLVKVKDRRELIVKHILDSLAPIKIIRDLSKNSISLKIADVGSGAGLPGIPLAICLPHAAFTLIERMGRRAGFLRDAVAVLGLPNVTVEEADIDELTLAADDRYDLVVFRAFRPLDSAILKGFFALLKPTGLLAAYKGRRQAIEEEMSGLRNVSWEAIPLEVPFLEEERHLVMIKACL

SEQ ID NO: 89603 - protein, 83 aa, Unknown
  Obtained from environmental sample
  DOMAIN (1)...(78): Bacterial Ig-like domain (group 2)
  misc_feature (1)..(83): Xaa is any amino acid
VSSVYLDKTSLTLVAGNQDTLTPIFQPANASNKAVSWDSTNPNVARVEGNGTVRGVAPGSATITVTTQDSGKTATCSVVVLSQ

SEQ ID NO: 89604 - protein, 314 aa, Unknown
  Obtained from environmental sample
  DOMAIN (235)...(314): PPIC-type PPIASE domain
  misc_feature (1)..(314): Xaa is any amino acid
DEDSGFSDIVGKFKANPALYIGSVIILVLVVVTFVGGDFLSGGRRYVKGGGGDLTFGYYDKVPISWVPGNKFSQYYEQLVRRYRDRIDINNPQIAMSLWSQSFEATAVQTAILQEMKRSGYETPERIVDREVARLPQFQDEYGRFSPALYRQMSDTGRLALWRQVREELTVIQFYNDLFGLLIPAGEKEFIAQMGSGMRTFEMVSFSVDDFPDSEYLSYAQENSDLFRSIHLSRITVASNEREAKKILESIKNGTTTFEDAAKAHSRDSYSEKGGDMGVQYVYDLEMEITDKTVLENTLSLGKGELSSVMQLGS

SEQ ID NO: 89605 - protein, 311 aa, Unknown
  Obtained from environmental sample
  DOMAIN (1)...(290): Poxvirus D5 protein-like
  misc_feature (1)..(311): Xaa is any amino acid
MITKIANVKFDPDADCPMWKQFLREIMNYKADVIGFVQAAAGWALSGDTSEQTMFILFGTGANGKSTFLNTIMYLLGDYATATPTETFMKKTGDQYTNDIARLRGTRFVTTTEAEQGRRLAEPLIKKITGNDQMTARFLYGEFFNFTPTFKIFMATNHKPVIKGTDHGIWRRIKLIPFTERIPEEKQDKHLELKLREEASGILNWLLEGTAKWKREGLKAPKAVLLATDEYRGEMDVIGNFLKERCVQQKELSIRIRELYKAYTDWCDENNEHAVSERFLSMRLKEMGFEQTRTAEARYWVGIGLKITDNK

SEQ ID NO: 89606 - protein, 717 aa, Unknown
  Obtained from environmental sample
  DOMAIN (30)...(698): FHIPEP family
  misc_feature (1)..(717): Xaa is any amino acid
MADARQAAGGSAITRFGNINDLFIGVGVIVVVVMMIIPLPGPLLDTLIALNIIFSLLVLLIVLYSEKPTEFSLFPTVLLVTTVFGLALNVSSTRLILSTGAQGKEFNGEMIKAFSKFVVGGANGNAGIVIGFIIFIIIIAVQVIVITKGATRISEVAARFTLDGMPVRYMAIDTEYSSGSITEEEAQRRKAEIQKESQFYGSMDGASKFISGNVKIGVFILAIDVIGGIIIGTVLGKDTIGEAVSKYIRFSIGDGLVSQLPALLISTAMGIVVTRAAATGNLSEQAAAQFTTSSRIYWIAAAVLLGFSLLPGFPWYVLIPMSALLAFTAFQIGRKKKKAESFNEMMAKSKDPKKGKEDGSEMSPIVPLDALSLEIGYGLIPLVDKEKGAELLERVQGVRRQSALELGLVIPKVRIIDNMVLDPSEYCFKIKGIDVGRSKIRMGYFLCIIPGTVTEELPGDKTVDPAFGLPAQWISEDRSDDAERAGYTVVDPPSIIATHLTEIIRRHSADILGMQDTQAILDTLRKEYPAVVDEVLRPELGMPVIKIQKILHGLLRERVSIRNMVTILEAIAEYAPLSKTVWFLTEKARQALGSQICHQYADEKHHLRVLTIAPELEQKIIESKYETPSGVICALDPPTQMAWIKAVSKAAAAVKSRGFLPVILCSEQARFLVRNSTDRELPDLAVISVPEITPDIVPEAVGVIRLEGAAPSKDGGE

SEQ ID NO: 89607 - protein, 367 aa, Unknown
  Obtained from environmental sample
  DOMAIN (184)...(348): Glycosyl transferases group 1
  misc_feature (1)..(367): Xaa is any amino acid
MKVAIIHYWLVNMRGGEKVLGSLLEIFPDADIFTHVYNPKAVSSLIKNRRVIASRINRLPFAKKIYQLYMPLMTNALNDFNLQSYDLVISSESGPAKGVIPNPSAYHLCYCHSPMRYLWDMYHEYFHGANPLVRVFMKHITPKLRLWDAVSANQVDFFIANSCYVAQRIRRCYNREAAVVYPPVEIEKFLSVERQSGDYYLFFGQLTWYKRADLAIEACIASGRRLVVAGAGKKNKKWRKHEKTGLITFKGRVSDEDMLYLYSSARALLFPGIEDFGIIPVEAQAAGCPVIAYRRGGALDTVIEGVTGIFFDEQTPASIIEAMNRFESIKAEGAFNNRDVFSGHVRQFSPDVFKDKVKRIIEERKRL

SEQ ID NO: 89608 - protein, 512 aa, Unknown
  Obtained from environmental sample
  DOMAIN (1)...(277): DNA gyrase/topoisomerase IV, subunit A
  misc_feature (1)..(512): Xaa is any amino acid
EIPCEELLNYVKGPDFPTGAVICGRTGIRNAYLTGRGKIKVRADIEVEVDSKGRNFLIVKSIPYMVNKKELLETIGKLVNDDKLEGINHANDESDREGMRIVVGLKKDAVPEVVKNNLFKYTRLEESFSIYNLALVNRQPKLLNLKDLCANYVEHRYIVIRRRTEFELNKAKERAHILEGFKIALAPENIDEVVRIIRFEDEPDQILQTRYSLSELQVKAILEIRLRNIKKIEVKKFEDELAELLLKIADLEDILAKKERIMDIVKTRLQEIADKYGDARRTKIADDEDDLEYEDLIAEEEQVITLSKRGYVRRLPIDTFKLQGRAGKGVIGTGLKDEDFVEKIITASTHSYLLVFTNKGRMHWVKVYKLPEGSRTGKGIPIVNFLQLTEGEKVSAIVPVRKFAEGFYLVFCTRQGIINKMKLGLFSNVRKIGLNAISLNEGDELVSVLLVQAENNLMIATKNGNALTFPPTVFRSAGRNSRGVIGIRMEGDDAVIGMIDIKKDSLILTISE

SEQ ID NO: 89609 - protein, 540 aa, Unknown
  Obtained from environmental sample
  DOMAIN (37)...(199): Alpha-2-macroglobulin family N-terminal region
  misc_feature (1)..(540): Xaa is any amino acid
GLWELRLSGRDQKQRIAATRSRFYVSGAGWVRWDSDDVDTITLTTDRQSYAPGETAKIMVRSPLEKGKYLLTLEREKVISQKIIELNGSALTIDIPIEESYVPIIYAALSSYTVRSAVPQNSYYEPDLDKPKGIFGVTAIYIDNESRHYQIEIDTGRNTYRAAEEAEVKIKVLLNGKPAPNTEVSFLAVDRGVVDLIDYHVPDPLASFYAPWHFPLGVRGADSRSLLIDPVTYNISDLQGGDSDDDGKGEDGASSFNDDMKERKDWRPTAVFEPYLVTGPDGIAVVKFKLPDSLTSYRCTAVAVGVNNFGIKEQDLRVSAPLTATAALPRKLRWRDTGTVSLILTNLENTAVEANVSLKAFSESAVSTDTVIEVDGEDSKTVKVLPGASQEVSFKVAAVGAGVSRLTFTLRSPQVNEHIVKTLLVDRPSLIETVTTIGNLGPDNAFVEEGMILPSLVPEGTGNVSVSLSSSRLAALKEAIRYLLDFPYGCIEQRTARLLPIVAFGQYLDTFDLESPLAAFGEHFDPQKLVKKNWRNSSNS

SEQ ID NO: 89610 - protein, 563 aa, Unknown
  Obtained from environmental sample
  misc_feature (1)..(563): Xaa is any amino acid
TIGSLGPDKPFAAEGMVLPSLVPEGTGNVSVSLSTSRMATLKEAVRYLLDYPYGCLEQRTARLLPIVAFGEYLDTFNLESPLVAFGEYLDTFDLANPLRGFSPWNPQKLVEKELAEIAKFQLADGSFPYWPGGRYGSLFVSIRVAHIATLAKAKNMKVPDSLDTRKLLSYIGTESNNVNFKDPFLKGYSLWVRTMYNEKISSEITAFLTRGDELGVSGWAFAGLAALEMGQKDLAVSAGDRVRRFIRPGPRSLDLTDTYERQGNYWDYDSDRYALALMLFHSLDSQGDDMTTRLTTSLIERQRRGVWNNTASSFWAALAFGMLGDSESSEWKAANGTPLAVTTSLGGTSLFNAEFKTYGGIPVSYNGHFTEKPIIDLPRDTLLPLRFDRSGPGRLYYTASLRYGIPIELAGARDEGLGVFVETYDSEGKPVKNGRLQAGKTYTRRVIVSTSRDRTFVALRSPIPSGAEIVDAVFITSSTVAPPAKDESGDVYDWRYYQPEPVRFMMDDEARFHWDFFNSGKQQIEFRFRAVMPGIYPTPPAVAECMYEEEIFGRSAGELIRIE

SEQ ID NO: 89611 - protein, 683 aa, Unknown
  Obtained from environmental sample
  misc_feature (1)..(683): Xaa is any amino acid
GSAPLTAIAALPRKLRWRDTGTVSLILTNLENTAVEAGVTLGSDAFADADAVIEIDGETSKTVKVLPGASQEVTFKVAAVSTGLARLTFTLNSPEVNERIIKTLLVDRPSLTETVTTIGNLGPDNPFAEEGFVLPSLVPEGTGNVSVSLSASRLAALKETVRYLLDYPYGCIEQRTARLLPIVAFGEYLDTFDLDSPLRGFSPWNPQRLVEDELAELARFQLADGSFPYWPGGSNGNLFVSMRMAHIAALAKEKNMNVPDSLDTRKLLSYIGTTSSDSDAPNRPSKDPFLKGYSLWVRTMYKERIGSEITAFLKRGDELGISGWAFAGLAALEMGQKDLAASARDRVRRFIRPGTRSLDLTDTYERQGNFWGYDSDRYALALMLFNSLDSQSGREGDDMTTRLATSLIERQRRGVWNNTASSFWAALAFGMLGDSESAEWKTANGAPFTPPPAAPPLAVTTSLGGTSLFKAEFKTYVGVPVSFNGHFTEKPIIDLQRDTLLPLRIERSGPGRLYYTASLRYGIPVELAAARDEGISVFMETFDSEGKPVRNGRLQAGKTYTRRVTVSTSRDRTFVALRSPIPSGAEIVDAVFVTSSTVPPSPRNESDDRDEDDWYNYKPGPVRFLMDDEARFHWDFFKAGMEHVEFRFRAVMPGIYPTPPAVSECMYEEEIFGRTAGELIRIE

SEQ ID NO: 89612 - protein, 262 aa, Unknown
  Obtained from environmental sample
  DOMAIN (1)...(256): Protein of unknown function (DUF1015)
  misc_feature (1)..(262): Xaa is any amino acid
AGFGRVSGWFLDSEDDIGFLANGLERLARRALTRYGTEQAASAPQPFLFAVGDGNHSLASAKGIWDEYKRANGEVNNHPCRYALVEIENIYDPAIKFEPIHRVVFGLGFEEALDILSALPGFSGRMIGAAEELARLIREPVKGNRFGIVCKNAANQDRYALVETEAGGVPTAFLQPLLDNNVNNSKGALSVDYIHGEDELFRLARGYDSGKPVTGILLPPVQKAGFFETIAQNGPLPRKSFSMGEAFEKRFYIECRKLFTQS

SEQ ID NO: 89613 - protein, 88 aa, Unknown
  Obtained from environmental sample
  DOMAIN (1)...(75): Uncharacterised ACR, YggU family COG1872
  misc_feature (1)..(88): Xaa is any amino acid
MAATVNVRLKPRASRCAVKVCGQKDVEVSVTSPPIDNRANEHLTEYLADILGVAKTSLSIIKGGHSRNKVVLIESLGEDEVVERLKKV

SEQ ID NO: 89614 - protein, 76 aa, Unknown
  Obtained from environmental sample
  DOMAIN (1)...(62): Uncharacterised ACR, YggU family COG1872
  misc_feature (1)..(76): Xaa is any amino acid
SRCAVKVSGPKVVEVSVTSPPIDNRANEQLIDYLSDILDVAKTSLSIIKGGHSRNKVVSIESLGEDEVFERLSKNV

SEQ ID NO: 89615 - protein, 273 aa, Unknown
  Obtained from environmental sample
  DOMAIN (22)...(273): Phosphorylase family 2
  misc_feature (1)..(273): Xaa is any amino acid
MAEQFDMIKEATAFIQSKTAVKPEYGIILGTGLGRLADSIKKETVLDYGDIPHFPLSTVETHAGKLIFGTLAGKSVVAMQGRFHYYEGYSMQQIVFPVRVMKFLGADTLIVSNACGGINPLFPPGTIMAITDHINLLGGNPLIGPNDDRIGPRFPDMSQPYSGELLNIASKVALDNGIRLERGVYAAMSGPSLETKAEYRMLKTLGADVIGMSTVPEVIAAVHAWMRVLGFSVITDSCLPDALEPATLTKILAIADKAEPVLVKLIEKVLQAL

SEQ ID NO: 89616 - protein, 605 aa, Unknown
  Obtained from environmental sample
  DOMAIN (21)...(604): tRNA synthetases class I (I, L, M and V)
  misc_feature (1)..(605): Xaa is any amino acid
MSKEFFDPVSSQVRFPDVERRVLDIWEKEKTFEASLGSTRGKEAFVFYDGPPFATGLPHYGHLLAGTLKDIIPRYQTMRGRYVDRRFGWDCHGLPVENEMEKEFKVSGKRDIEKLGIHLFNEACRSIVLRYTGRWETVVNRMGRWVDFVNQYRTMDPPYMESIWWVFRQMWDKGLIYRGFRVQPYCPRCATPLSNFEVNEGYKEINGPSITVTFPLADDPSTKILVWTTTPWTLPSNVALAVGEKIAYVKIKDGENIYIMAKERLGAYYKDLSTIEILKEMTGGELAEKRYVPIFDYFKDKDPRFFTVTAADFVSTEDGTGIVHIAPAFGEDDFTVGQKMGLPIVCPVDDEGKFTDEVPQWQGKLVYTADDEITRHIKTSGRLFHKTTILHRYPHCYRCDTALIYKAITTWFMKIEPLKANMLENNQQIRWVPPHLQNGRFGKGIESAPDWNISRNRYWGTPIPVWLCDCGHKECVGGLDELHTLVGGGDKSAGESIHAQTARQVQESLKAKDAAQRLSDAGIDAAWIERLANVNISPVDIHRHIVDKLEVKCPKCGAMMKRTLEVLDCWFESGSMPYAQQHYPFDTRKSLRRTFRRTSSPKVST

SEQ ID NO: 89617 - protein, 69 aa, Unknown
  Obtained from environmental sample
  misc_feature (1)..(69): Xaa is any amino acid
MIRSIIWTIVFSIVAALLQSTVLEKISFLSAVPDLALCVVVFSAYVNGTMTGQVSGFLSGLFTDFISQA

SEQ ID NO: 89618 - protein, 310 aa, Unknown
  Obtained from environmental sample
  DOMAIN (134)...(293): rod shape-determining protein MreC
  misc_feature (1)..(310): Xaa is any amino acid
MQRGFFGKSPRQGGNKLPGAQINSSVFVFVILIIISTLMLLVSSRNFIFGVKNTGLSLFSGVRGGIYELSSLVSRTVLSIKELTNLRKEHADLLKQLDRYEELERSNAEIYQENIRLKEQLDFSKTLRYRRIPAQISGRDPNNLFSALVINKGSYSGVSNNMTVVAWQNGVQALVGKVIQTGLLESLVMPVFDINSLVSCRFSVSRFEGIVEGQGSSESSLIMRFVPRRARDEVNIGDIIITSGMGGIYPPGINLGRVSSINVLEYETTLEIEVIPMIDFSRLEYVFVIEEESSAYDSMEIYNETGINND

SEQ ID NO: 89619 - protein, 671 aa, Unknown
  Obtained from environmental sample
  DOMAIN (244)...(386): Histidine kinase-, DNA gyrase B-, and HSP90-like ATPase
  misc_feature (1)..(671): Xaa is any amino acid
MLEFKRIEELSHSLESVFIAMRDKQITFSDNAIKLIFSSLDLLKTGFSVLQTSKDDNIETGEYVNNLSLLADNKEFSLPITEKSAESEKQEIKEEKHKESKTETIRLSLDKIDEIIKNIMSLHTLEVNAKILSQNSAEIGNLIKKFSKSFKEHKNIDPAHAVYLKKLERLCGRLNSSLKDYVIDAGNSIKTAYDGVISLRTLPISTIFDSYPRYVYELAQELGKNVQLTLEGKENEIDKNIIEALSEVLLHMVRNSVDHGIETPQERIAAGKEETGKISIICSRESGNMKIIISDDGKGIDTEKIRQKIVKEGLIDEEASKNLSKEELTDFIFQSGFSTSEKTSNISGRGVGMDVVRDSIEALKGSIVVDSEQGKGSKFTIMIPLSIAALMGVPIECNGMKFIIPANFVEAIMLIKRDEIISSEDKLEIKYNDRIIKLYYLNHILKIKDDSIHDNDSIFIVIIRSYDDSAALAVNNIYSMKSVILKTLPSFMKNMNVFSGIVQNEEYEMVSVLHIPTVIKMAKRVKIPEYKKIFDEAKENRKSVLVVDDSLPTREIEKDILLSEGYIVDAAANGEEALNAARAKHYDLICTDLNMPVMDGFSLIQNLKKEEALSNIPIIVISSKEDKEEQERAFKLGASSYIIKNSFNNHNMLKAVNSLIGEVYHDRQRNK

SEQ ID NO: 89620 - protein, 324 aa, Unknown
  Obtained from environmental sample
  DOMAIN (116)...(221): TonB-dependent Receptor Plug Domain
  misc_feature (1)..(324): Xaa is any amino acid
MKINKYILLIIFFLCAFPLFCRDITVIVIDEDLALPLEGASVRTRGGNEYICDKDGKTKVQVPDDRQILLYAAYPGYETGTITIPVTGNSFTVYLRLSGFLQGRELVVEASKPGTSESKTGRSVAVSEKEIAQTAEIGVIEDVMNTIKLLPGVGYSGMFNAAPSIRGGQPGDMMASLDGFYINSPYFWGGGFSIFDPRMVKSAQLSHGVFSTRYGHTISGLLEITSKEPSSTETEFELGVNSSAANFNLSVPLNGKGGILFMGRVTYYDPVIWGAKELSHSIPELSVINYIRTAPFIRAGTISGNYRFTDNLVISSTGFSEWME

SEQ ID NO: 89621 - protein, 708 aa, Unknown
  Obtained from environmental sample
  DOMAIN (267)...(434): Type III restriction enzyme, res subunit
  misc_feature (1)..(708): Xaa is any amino acid
MLLRSIKAPLTAIQGIGQRIMKENAPRIARLGIRDVAGLLCHYPRDWEDRRFTVPIAEFRRAKVCTEVTVLAHDWIGFGHKRTPKVYVEDESGRAVLVGYNRPWLAKQMTIGGRYRIWGSFDYKRGEIQSSAFEFEEASKAENFNTMLPVYPLCAGLKQAVLRRFTANAIEQYAARLENEIPDEIIARDKLLSKAAAVRAFHYPASPEELEQAKKTLVYEELFYLELIVGKRALERRGYRIQQSPEPRTPNPEPFSPLQKRLLERLPFSLTKGQQKAIVEINSDMTCNDSHYSMARLLQGDVGSGKTLVSFMAALRAADNSGQTALLAPTELLARQHAENAARLLEPLGLRIAFLTGNIKAAGRKDLLKHLEAGEIDIVVGTHALFSKDVTYKNLQLVIIDEQHRFGVTQRALIMAKNSAATPHLLMMSATPIPRTLAMTVFGDMDVSVISDMPPGRKPVITHLARESNEQKVYDFVRDKLKAGSQAYFVYPLIESDDEKEMVLKDAVFLKDAVSMAERLAAKVFPGFAVALIHSKLDEEEKRQTMDRFRKGEIRVLVATSVVEVGVDVPNANCMVIEHAERFGLSALHQLRGRVGRGQDQAYCFLVYSDDLTEDGKVRLKVMLENTDGFIIAEEDLKLRGPGQIAGTEQSGYLNLGIANPIRDIDELARARTDAFFILKNDPGLVLDSHRIIARVLKEAPLFDEVVL

SEQ ID NO: 89622 - protein, 282 aa, Unknown
  Obtained from environmental sample
  DOMAIN (84)...(165): OB-fold nucleic acid binding domain
  misc_feature (1)..(282): Xaa is any amino acid
GTWETCEDKAQDDKVAILRGKIEYQRNKDKYGFIVDSWIDVREAEAAVEEEEALQKKREKFRSVWFYMADLKSGGLARAAKGSYTVIGQLSGLRESRDKNGEEMAFGAIQDFEGEIDLVFWAKTWKESRELLNLGEFVALKGNLDPEKDRNPQKPSLKVSKVDDLAALSRSAARKAEAGEQPKVPPLEIPAKNENSTNTEQSAAPLNEIHIRLEDGAADRDESIQPLGNYLMGNPGPCPVFIHIGEKIIRAKKGLSLEAEKEALGVLEGCIGVAQSWKEQCK

SEQ ID NO: 89623 - protein, 488 aa, Unknown
  Obtained from environmental sample
  DOMAIN (1)...(266): ImcF-related
  misc_feature (1)..(488): Xaa is any amino acid
ARAAVRRAYVAASERVTAQPAARFMESAVNQRIARRAGEFTASERSALYGELSAYLLLTGGNQVKGINVDSMAYRVGSAFKKIPGAADEAVMANIYMTVKLAAEGGYKNVPADGAMIEAARERLAAAPQSAAVYASVMDKLAASSRPIPMPRIIGGGLLKYGRDVSVLYTRDGWENAVFPELIKASKEPLKADWVTGPAATVSNEERMLSELASLYAEDLTRRWLDFIRNTNVSVQPSPPSLARDLELLAARDCEVGRMLAVVCSLAVQPPADFSLSQVSAKSASSIKSQAASAVNKLRGGAASIAYDIRDPFAEARAASFAHVEAFLKNGAFDAYQSGLGKLAEKIRTCGDRGSYVPFTARGSDDPLRECRLALDRAYAAMPPSVSAPLKRVIEPPLEITAAVLTKAVIDEIEESWNAQVVNPYVNKLIKRYPLDKKGNDAAWSDFEEFFKPQSGVLWVFYDKNLSGVLECTSRGWEGVGRSLSLQL

SEQ ID NO: 89624 - protein, 400 aa, Unknown
  Obtained from environmental sample
  DOMAIN (2)...(114): Response regulator receiver domain
  misc_feature (1)..(400): Xaa is any amino acid
VAAILIIDDELGIRQTLAAILEDEKYRVFSAGDAPAGLKILEDQKIDIIFLDVLLPKMGGLEALEQIHANWPGVEIVMISGHANIDMAVRAVKGGAFDFLEKPLSLDKVLTVCRNALALRKLREENRKLKKSASLAHKDIVGTSYAMKGIRDLVRQAASCDARILITGENGTGKEVVARAIHLGSSRSERPFVGLNCAAIPDTLLESELFGHEKGAFTDAVSSRKGRFEIAGGGTLFLDEIGDMSLSAQAKVLRVIQEQKIERVGGEKTIETDVRLIAASNKDLEKACAQGLFRQDLYFRLNVIPIHIPPLRERKEDITLLLYHFLTEQGIENLRLEDDAAELLLSHDWPGNVRELKNIAERIAVMHTGDSINKQDMAGLLCMGAGRGTTVSEPLSPVES

SEQ ID NO: 89625 - protein, 202 aa, Unknown
  Obtained from environmental sample
  DOMAIN (38)...(70): Ankyrin repeat
  misc_feature (1)..(202): Xaa is any amino acid
MSSRKEGLQLINASEKGDIETVKSLLKNGVYIHAQDKEGKCALVAAAYRNNLEIVDLLIAAGADVNMKDNTLQSAYLISTSDGYTELLKKTLKAGADVHCTDSYNGTGLIRAADRGHVEIIRELLKTDVRVNHINRIGWTALLEAIILGDGGERHTEVVRMLVDAGADVNLPDKDGVTPLSHAKSRGFSEIIGILENSGGKV

SEQ ID NO: 89626 - protein, 93 aa, Unknown
  Obtained from environmental sample
  DOMAIN (6)...(93): Plasmid stabilisation system protein
  misc_feature (1)..(93): Xaa is any amino acid
MKKYELEYTSDFEKDKEKLRKSGDVQALKKLAALLLELTEHPTSGTGKPEPLSGDRAGQWSRRITSKHRLIYMIDNEKVIVLLLSAYGHYDDK

SEQ ID NO: 89627 - protein, 312 aa, Unknown
  Obtained from environmental sample
  DOMAIN (5)...(272): Nucleotidyl transferase
  misc_feature (1)..(312): Xaa is any amino acid
MSDVVSIILGGGKGTRLFPLTQSRSKPAVPFGGKFRLVDIPISNCINADLRQIYIVTQFNSASLHQHIGQTYLFDSFSNGFVEILAAEQTFEHSGWYEGTADAVRKNFPHFRTHKPAYYIILSGDQLYRMDLKDLLKSHIDSGAAITIACTPVGRGDASALGILKTDKSRRITEFMEKPGPTKDISDYKVPSELKMEKKIDGDAFLASMGIYVFNAKAMDDGLENELTDFGKEVIPQAINSLKVNAYLFDGYWEDIGTIRNFYETNLELTALRPKFDFYDEDRPIFTHRRNLPPSKINFGNMNQSIAAESCI

SEQ ID NO: 89628 - protein, 257 aa, Unknown
  Obtained from environmental sample
  DOMAIN (1)...(256): Cell cycle protein
  misc_feature (1)..(257): Xaa is any amino acid
MALPMFYWSKLTLLDVFYIVSPLISLLLSAIPLLLAFNTGVNWGVFEAVPWGLFFVVVVVLLYMFRAPLYIWIGVIAGNIATATATTVVWGSVLKDYQKMRITSFMNPQADPFGSGYQVIQSKVAIGSGHIFGKGYLQGTQSRLSFLPEQHTDFIFSVLGEQFGLVGCSIVVILFSVLIIRGLLVTYSCRNRFINLTAIGASAILGFHTFVNIAMTLGMTPVTGIPLPFLSYGGSFTMTVAILVGLLLNARVADQDF

SEQ ID NO: 89629 - protein, 245 aa, Unknown
  Obtained from environmental sample
  DOMAIN (42)...(220): Thiamine monophosphate synthase/TENI
  misc_feature (1)..(245): Xaa is any amino acid
MEGEAFRLKKNLIFNKLILRIRINTFPLIIMSKRKLPDPIGFYSVLTDPIKGYAYLTSLLVDYGVSVVQLRMKNALREIVVDTALQMRKITEGTDTLLIINDDPHIAVEVGADGVHIGQCDMPYNDVRAVVGDDMLIGVSTHNLRQTIDACLLPADYIGVGPVFATPTKKIPDPVIGIDGMKEMLSAATVPAVAIGGIDLWNLPDVLAAGAKNFCMVRQLTQSENPESILEEILRCGICLRQNGN

SEQ ID NO: 89630 - protein, 207 aa, Unknown
  Obtained from environmental sample
  DOMAIN (1)...(187): Formyl transferase
  misc_feature (1)..(207): Xaa is any amino acid
MRCAVFASGNGSNFQALLDRKSAGGLTRADFVLMIGNNSKAGAFDKARAHGIPALHIAPSHFSGEEAYAEHLSAALNDARVELIVLAGYMKKLPPAIVGQYRNRIMNIHPALLPAFGGKGMYGSNVHKAVIDYGAKISGVTVHFVDDEYDHGPIIMQKVVPVLDTDDDQTLAARVLEAEHEYYWRAVEAVAEGKIKIVGRRVVWDKD

SEQ ID NO: 89631 - protein, 282 aa, Unknown
  Obtained from environmental sample
  DOMAIN (11)...(209): Glutamine amidotransferases class-II
  misc_feature (1)..(282): Xaa is any amino acid
MRIERKLNEACAVFGVSLTTEEAAGVTYNGLLSLQHRGQEGAGIAVVNDGHIFCHKDTGLVSEVFSTAELEKLPKGKIAVGHTRYSTTGVNKRENVGPFVTEYLTGRIAVAHNGNVTNALEIREDLRRKGLRFGATSDSEVISSLMAYCTIKEKDPLSGIIKAVDMLRGAFSLAIVCNDDKLIAIRDPNGFRPLCIGQNELGFAVASESCALDACDFKFVRDVLPGEVVVIENGEIKSQGIKLTNREDDRGICIFEYIYFARPDSVVDGLSVYRTRFNMGKE

SEQ ID NO: 89632 - protein, 901 aa, Unknown
  Obtained from environmental sample
  DOMAIN (695)...(729): Sel1 repeat
  misc_feature (1)..(901): Xaa is any amino acid
MTEKLTLANGETYEGNFIDGVLQGKGKYTNRMGDIYEGDFVDGKFHGKGKFTMPDDHEYEGDFVANLPHGKGKWTSLRYDEYYEGDFFKGRKSGKGKMTYYDNRVYEGDFAKDRRNGKGKMTYPNGRIEEGEWKNGEFLGKQMNNEQTEQEILNQLNTLIELDPNRDKNYYNRGLLYKDKKLWEKAEADFAKAFSLWKDPLYLSEWRQAAMERQALQTLEERIAPYEEIIRNKTEIIPSAEIIAAIALFEEYELLEALFETKQFTKEMLNETVSPSFSYYQPTPLYLITGKKALKKMKDPVKMIRTLASFGADPNVPAGDGSTMLWNQCNPGYPIEIMETFLEIGADPNQTSEDGEFAWTPLAYCLIPGNPEDENGNPIADQYLPLESETLEKAKLLLDHNADPNLANPSVLDSPPLMFTIRYASRQNDETERLRPQDMELIKLLLEKGANPNFTDSKGDTPMIVALEKGMWETAELLLKYGAIMPNVKIKTLTQKINRIKEEYADLPPMILPPAGDEEIKRHSRMLTGYGFPTIPDGYAEFLKICDGYAFDGVELYGTECVTEEGSTFILHDIGSMTFKMNKRYEEYCEQSNKSLLWLGSDAGGNYYTYDDKTGKYQLRSHESIGEVYFEYGTFEELFDRLIYENQITDDEDNIKYIYKEGATASETYDKIQTDDTVAKDALDYYRALAEKGNAEAQFELASMLFLDSRFEDKDQAKEWLKRAAELGHRQAKNAIQNIKDYEKMPKGRHRPEVAPPIGYTIDPGFDQKFENDFRELFTSRLKEDEDFGSELWSALANVSWIHEDDGEKTECRRSFRSAGSMIASMLGIGDYIDWYCSGPYETVSEYVAEKMASKGWRYKLDGDGSDINTGRLTFKDGSVYEGEIVGGKPQGKGKLTKPDG

SEQ ID NO: 89633 - protein, 141 aa, Unknown
  Obtained from environmental sample
  DOMAIN (31)...(141): Flagellar motor switch protein FliM
  misc_feature (1)..(141): Xaa is any amino acid
MGDVLSQDEINEMLKKVDAANAGKKAEETGAENRQEKFTREHFRGISIIYEKFARTANKSLSQKLGVTVNMTVASIDQLTVDEYYRCIPFPSVLGLISMEPLKGGTIFEIDPLISFPMIDIMCKRKAGTTEPNRELTERGK

SEQ ID NO: 89634 - protein, 442 aa, Unknown
  Obtained from environmental sample
  DOMAIN (24)...(315): ABC transporter transmembrane region
  misc_feature (1)..(442): Xaa is any amino acid
MTLPWKGGKTELVVAAAEGKHFLFLLCCAATLAAVIFSFLTPQIIRFTIDSVLGTEPLKVPAFVSAFVDQIGGLGYIKKNIWICAAFILAAALLSAFCNMFRRYNCGIIGETVAWKLHNVLYAHIQKLPYSWHIGCQTGDIIQRCTTDVDNIRNFIHNQLSELMRTFCVFVFALVIMFSMDIFMSIVSLILIPVIVAFSILFFRKVSVEFIRADIAEGQVQAASQENYTGVRVVRAFGRESYEMEKFSEKTKNYQDIWVHIGKMLGLFWGAGDFFSGLQLVIIVGFGVWRSVQGHLSPGTFLAFYTYCNWMIWPVRQLGRMLADLSKTLVAAGRISEILASEPETDPPDALTPDLKGEICFNNITFNYGDKEPILRDISFTLKPGESMAILGATGSGKSTLVHLLSRLYDLNDNSSHNAGSITINGIDIRRIARPWLRRHIG

SEQ ID NO: 89635 - protein, 82 aa, Unknown
  Obtained from environmental sample
  misc_feature (1)..(82): Xaa is any amino acid
MPNIKPVSDLRNYAEVLKGISVDSPVYLTKNGRGRYVIQDIEEYEKKEAAFKLMMELEKGRISGEKEGWHSLEEVRKEFGIA

SEQ ID NO: 89636 - protein, 135 aa, Unknown
  Obtained from environmental sample
  misc_feature (1)..(135): Xaa is any amino acid
LAGEKAADVLQTGDHGSTFGGNPIAAAAGLVVLETLTKPGFMKEIERKGQKISDAIASWNHPKITAIRGKGLMLGVDLTVESWPILEALISRAQSTDAGLLLLAAGKQTLRFLPPYTISEGEIEQGLEMLNLTLN

SEQ ID NO: 89637 - protein, 140 aa, Unknown
  Obtained from environmental sample
  DOMAIN (15)...(140): Aminotransferase class-III
  misc_feature (1)..(140): Xaa is any amino acid
MNDAFMDTYHRLPVIFAKGEGAWLTDINGKKYLDFCSGIAVNCLGHAYPPLVKAISEQAAKLNHTCNYFLSDTTMAFAEKLVAACAGAGMKKVFLANSGAEANEGACKVARKYSFAKYGPGRHTIVTLRGSFHGRTITTL

SEQ ID NO: 89638 - protein, 609 aa, Unknown
  Obtained from environmental sample
  DOMAIN (306)...(371): His Kinase A (phosphoacceptor) domain
  misc_feature (1)..(609): Xaa is any amino acid
MVVLSYVFTRNIVDKYLKQNTENIFVSLESQVITDIMEPQLTLESFSRTVRNMIINGDNADKLREYFNDMSNYLSQDKQSYLNFNGFMGYFETFSGGPVFIESLLGSRPADYDPSEREWYKDAIKADGKIAETLMHHDFIYDDVMFIYSYCIFDDAGRRLGVVALRVKIDNIKKYIVNTVLVQGAYGILISKDWIVLAHPNEAFVGEDAHNSKIPFSIFINELSGGIEITERPLVTYKGERALASFRFLPNGWVMGIVTPKGQYYKSIFYMAVILIILGTVLSSVLIFVLIRVDAARNKSEMENKQKSTFLANMSHEIRTPMNAIIGMTDLLNYEPLNKRQMGFVNDIKVSAHSLLSIINDILDMSKIEAGKFELNLINYDFHMFLDNIFSMFSFVTQKKGLEFKYETEGKIPRYLYGDDIRLKQVLTNICGNAVKYTENGYVKFRVTATSNKIMFEIKDSGIGIRKEDMPKLFNTFQRIDSDKNRNVVGTGLGLSICKTFVEMMGGKIIVDSEYEQGSVFLVIIPIVLGKKEEVKSSKGLPDGHILYAPDAKVLVVDDNEFNIRVAEGLIGLFKINVQTAFSGKDAIEMVQKNDYDIVFMDHMMPEMD

SEQ ID NO: 89639 - protein, 331 aa, Unknown
  Obtained from environmental sample
  DOMAIN (2)...(286): tRNA synthetases class I (W and Y)
  misc_feature (1)..(331): Xaa is any amino acid
MKKISLTGIKPTGDLHIGNYFGAIRPALELAKEYDARYFIADYHALNTMKNPKELNTTIREVAAGWLAAGLDPDKVIFYRQSSIPEVFELTTMLMAFTSKGLMNRAHAYKDAVQKNNDKGDDTDAGINMGLFTYPVLMAADIILFDSDIVPVGKDQLQHIEMAQDIAQSVNANYGQQVLKVPQAGIQEDVAVVPGLDGRKMSKSYGNVIPLFAPEKILRKTIMRITTNSQTVEEPKNPDESQIFQLYKLFADASEQTALADRYRAGGMGWGDAKEELFRAVNRCLSPIRERYDAIMADIPSLDKILAQGAEKARPIAAATVKRFRKAAGVD

SEQ ID NO: 89640 - protein, 107 aa, Unknown
  Obtained from environmental sample
  misc_feature (1)..(107): Xaa is any amino acid
MGNMKTISGGVCAPKGFKAGGIWCGIKATSRKRDLALIYSEKICTAAALFTTNRVQAASVLVSQKHIMGGKLHAIIANSGNANACTGEAGLVAARRMAELAADEFAI

SEQ ID NO: 89641 - protein, 58 aa, Unknown
  Obtained from environmental sample
  misc_feature (1)..(58): Xaa is any amino acid
AVCSHGESIPFSEETAKTILSEEEIEILISAGEGTGSASAWGCDLTYDYVKINGDYRS

SEQ ID NO: 89642 - protein, 217 aa, Unknown
  Obtained from environmental sample
  DOMAIN (27)...(217): Amino acid kinase family
  misc_feature (1)..(217): Xaa is any amino acid
MSEIISNNDRAAVLIRALPYIQSFRGKTIVVKYGGNAMINGELKAAVIQDVVLLSCIGIRTVLVHGGGPEIDAMLKKTGKESRFVNGLRYTDTETMEIVQMVLCGKVNKDITGLIQRQGGRAIGLCGIDGAMLKARKLQNEDLGLVGEIEEVDSSVLHSLLDAGFIPVISSVACGIDDGQPLNINADTASAKIAAALHAEKLILMTDVQGILRDMQD

SEQ ID NO: 89643 - protein, 255 aa, Unknown
  Obtained from environmental sample
  misc_feature (1)..(255): Xaa is any amino acid
MLIYEKFTGRNRDDFKSYEDIVKNYNITYNDDFNFAYDVLDELAKKQPDALCMLWISNEGEEKRITFSDMARYSNKAANYFKSLGIRKGDFVMLVLKRSYLFWYCMMALHKLGAVAVQAAHLLTKDDYIYRCNSGGIKMAVITGDNNCTEAFDDGLSEYKTIKIKAVTKGKKAGDGWLDFEAGLEAASDVWQRPTGAEATRASDLMIMSFSSGTTGYPKMVAHDYTYPLGHLATGVLWHRVEKARSSLYHFRYRL

SEQ ID NO: 89644 - protein, 315 aa, Unknown
  Obtained from environmental sample
  misc_feature (1)..(315): Xaa is any amino acid
MASSIRSKILIPCVGIAVVCVVASTAVTIDLAWKLVVNSLYDKLKTTHHMTQSTVDRCRDEAALVAKIAADDDIVVSALSAYLSAKDNASRDKLLKAATLVAAESGVDFLTVLDAAGTAVANTQDPSKYGDKQIDHVSVRNALIGKQYTTIEIGTPVKMAICSGAPVKDAAGRIIGAVSTGYRLDQDKFVNDLKESTLSDVVIFLGDTRVSSTIKDKNNLHAVGTKAPEAVSKKVLSGENYMSGDKIDGRLGRSEYSPLRDVEGNIVGMLYSRIETDYVLTDGIKMITTALFIGLVLCVAAAFFATTVANRITKP

SEQ ID NO: 89645 - protein, 122 aa, Unknown
  Obtained from environmental sample
  misc_feature (1)..(122): Xaa is any amino acid
MYGGGRGRNNKGGGAAVIGLILMILAPIAAMLIQMAISRSREYAADAAGARICGKPMALASALNRLELGSNRVPMDMGDPATSSLFIVNPFKAGFMAKIFSTHPPMDERVKRLREMERGHAL

SEQ ID NO: 89646 - protein, 452 aa, Unknown
  Obtained from environmental sample
  misc_feature (1)..(452): Xaa is any amino acid
MDDSARQARRQTRETTAQRSGKKDPFEQVMDSLDQLARERAEREKSETAKKKAEQEAREKIEQAQREENERIEQARRVAEVQARERRERAERAERERELSESRGNRDTLNGAVTAAENIRHWWNTDFTPQGSKYPIPDGNGAGRFSGTGSAKDGFVKSTDYLKKMTGKPEADYKTYLTVRKDHANSPTFYFNMASWFYACGDKETAIRVLTSIADLELENAALYRLLGYRLKEFGEYALEKFVCQKVVQWRPMEPQSHRDYANALADNGEAQAALNTLYGALLKTYSTYNRGRSRGIEEIVVTEINRLVTKNNLNKSKIYKRLLTNIPVDIRVVINWNMNNTDIDLHVVDPTGVECYYGNSKTKIGGRLSPDITQGYGPEQFLLKKAVKGKYRVYVDYYGDNKVTDAGPATVMAEIYIKYTGKAERRKVVCLQMSNAKQREDGTVQIAEFEF

SEQ ID NO: 89647 - protein, 309 aa, Unknown
  Obtained from environmental sample
  DOMAIN (42)...(158): Vault protein inter-alpha-trypsin
  misc_feature (1)..(309): Xaa is any amino acid
MNSLKSIKPILIVATAVVLLTASLFLSMAESPVLKIDGKANPDVYLQSLDIQVEVTGNIASTRYTMVFKNKTNRVLEGNLTFPLPDGRAVTYYALDINGKMREGVPVEKERATEVFEEIVQRQVDPGLLERVAGNNFRTRIYPFLAYGTRTVSIGYEEELPLEKDSLRYRLPMDYPNALEKFSVTATVWKSGLKPLVAKSGDEFSFDKAGENYVANFARENYRPANTLSFSLPAPDDIPQVMTQSTRGNRYFLVSVTPKIETRKKTWDNELAVIWDVSLSAMQRDLKRELEALNIIFAEKKNAKVHLSC

SEQ ID NO: 89648 - protein, 391 aa, Unknown
  Obtained from environmental sample
  misc_feature (1)..(391): Xaa is any amino acid
ETTYAVTVVSGAGGGSYPAGAKVTITASAVSGKVFDKWEVTAGGVTISDVNEPSATFTMPAKAVTVTATYKTAVYTVTWMTNGGTPHLSETSVLHGGTIPAPATAVTRVGYDFGGWYNYPDTLTQASFAIADVDRNMTFYAKWTPKTYSVIWNANGGTPIPAPQTSVDHGTIISAPRLMTKTGYTFDGWYTDAGLTVEASLPMKVTENLSFYADWKIKTYAVKWNVDGGFPIPAQTSVDTGGTITAPAAMEKAGHTFVGWYINSGFTWPAVFPMTNVKADAEFYARWTPVTYSITWNANGGTPVPEQTTVNYGGTIAAPDTIKRERFAFSGWYADSNFTGKAVSFPIVNVTGSKESYEFYAKWTPIVNVYFFGVEKHTPATRMSVEYGGTI

SEQ ID NO: 89649 - protein, 580 aa, Unknown
  Obtained from environmental sample
  misc_feature (1)..(580): Xaa is any amino acid
VLRKIFVSNIVNENAQAAQQGKTPVFSSLIKVEYAQTAAQFTPWLTSVLPQLGGWFNRVTGLKTDNILGKDAETAADKMEGDDRDIFALARRYALFLDEHKLFEPAWETPPFNDEGKEVFIFFPESLSDYGEYRELLADSKHVKTLNAPNTDNLKSNTFFYTNSRSEIKEAALYIRSLNENHGVSWDSIAVCITNSENYEPYVLREFTNRNIPFVKRTSKILSDYPAGGFFRSILDCASQDFTFSALVSLVMNKNLPWKNELPIEELVQFGIENNCLYSWVEEIDGEEKYINVWEDALKKPIHRYDNKISEFFYELKKRITAFSRCETFSDVRKQYFIFRDSFFDMENCVEETDLILSRCISELMNLVEIEKSFPDVKAAQPFKFYTEYLDEIQYLPQQEFSGVAILPYKTAAAAHFDCHIILGARQESLSVVYSRLAFLPKKKREGLGIPDEDASLEFINMHKYNSEKISAFFCSEQTFSGFAIPHSRINAPSEPKTCYSADAAFVGKFAQDPFNIEASFYSSLSNKEKNQKLHDNQINGFTNWKNRRSAKSASSGKWTASEEIKNSIKKAFRKTGKYS

SEQ ID NO: 89650 - protein, 295 aa, Unknown
  Obtained from environmental sample
  DOMAIN (1)...(199): FGGY family of carbohydrate kinases, N-terminal domain
  misc_feature (1)..(295): Xaa is any amino acid
ETYWTAVCETAKDVMAKSLVLPENICAIACTTQGETLIPLNCMGRPVGGAIVWLDERAANEAEWLKQWFTAAEFFNKTGLPELTGACPAAKALWIKKQPEYSEVTKLLLLEEYLIYRMTGEMAGNPALVCSSGWMDIRTDGLWDEMISAAGLKAEMLPEIQESGTVAGFLQNEAARALGLLAGVPVAACAMDQVASAMGAGNTEPGMVTETTGTALVASSVLNSFDGVLRSPLTVYRHAFKDKFLLLGFTPVAGLWLKWFKDNFCPDLAERDDAYAVMDGWAEEAGSQNVRFTGS

SEQ ID NO: 89651 - protein, 129 aa, Unknown
  Obtained from environmental sample
  misc_feature (1)..(129): Xaa is any amino acid
MRLLNTERYTFADYMKWDDGIRYELIDGLPYAMSPAPTWFHQDISIKIAKQIAVFLEGKPCKVFTAPFDVRLNAADEDDTVLQPDILVICDRSKLDKKGHGCKGAPDMVVEILSPSTAKMDRLIKYKKY

SEQ ID NO: 89652 - protein, 218 aa, Unknown
  Obtained from environmental sample
  misc_feature (1)..(218): Xaa is any amino acid
MGFTGSFMKFGAVSGNSRPFTMLVEYKPWFFELSGVANAGHNTSDLDYLSDDIVVILAYYDAGGKASDGTPYQAGIFDFMLYLDDDPIKISNLKIVLKGKAEAGSSVLNQAKTWNFEQGKVFNTPKYSDKITKAQAIAIDKIDIQKEIEAEKKRVADSIATEKKRVADSIAVAKKRVADSIATEKKRVADSIALEKRRAAVLAAREKKWTTDSIPERK

SEQ ID NO: 89653 - protein, 355 aa, Unknown
  Obtained from environmental sample
  misc_feature (1)..(355): Xaa is any amino acid
VDRFGVFRYDISEEEWGFGGPHKIYAHYKTDRGRTVASASHTVYFSHYGPILLIDSHRDGDVITNRPWLSGKAMYVRPPKPDGKPYTRAEISQYAVSKVEVSYDNGRTFKAAMGKGDWKWRLEPLDLPPGTQPVVVRATFENGEQAVRRVLLFMDPEAPKVETVSPAEKSRQRDELNVYGAASDNFELTDVNVTLRPFNKFWYSVPEAIRGLYFDVKSLGATYFDVGLGLSFFNDNVRVQGQFGIAPEQGIYTPMVEGGRYVGQVIGLKLIANIYTLPFDWLFKDRDWIFYKMNIGVGANFSWFEMDDWRSSLYMGAVLMQIDLANVDLKHIYPKWKYFHIMSPYSQPELWLHQP

SEQ ID NO: 89654 - protein, 442 aa, Unknown
  Obtained from environmental sample
  misc_feature (1)..(442): Xaa is any amino acid
KVSVRLDNAAPVEAEGTEYWSAPIEFTKVNDGRHTLFFRASDTKGTPGPETRIDFILDTSPPKIDLISHRVGDTISRNVSIRGSASDPNGIKTVELSDDGKNFSGLRLTKRRDAVEFSFPVNLSGMPDGPKVYYVRATNTTGAITVKSYMFLIRNDAPSLEIYTPAPGEAVFDTFMLSGKTEARTGIARLSYEWGSIKGDIDIRPGDPYWSVPLQVAKGATGSIKVTARDRSGKTASLTRKVDLRITGGGDFSRQTKIQFVSPTRNEVVRGGRTVMGFIEHPVPIQTIAYTQNGFQFQEIPFISRAGKAWFSYYCDFSTFNPMWEKLSFRFTDVNGANYDQAPEYTLGTDEPGGAAPRLILNTPFDGEVITSAFDITGIASGVGIETVHWRFLGPKLDSITKGEAGRTATEAARAFMANPNVPFEESTARQNFSIPIDFTMI

SEQ ID NO: 89655 - protein, 79 aa, Unknown
  Obtained from environmental sample
  misc_feature (1)..(79): Xaa is any amino acid
IVTEYFVTFKWDEARISLQHYLSVPRSKDIEARARFYFGQALYYTGNYRESLMEFMSIRSIYLAEANKWIDAVLSAMVY

SEQ ID NO: 89656 - protein, 738 aa, Unknown
  Obtained from environmental sample
  misc_feature (1)..(738): Xaa is any amino acid
MENVSPYNDKRVSLQFKRPRLNQLFAEAVKSPVVVVCAGAGYGKTYAVHDFAQEYQATTFWLQLSERDNTSARFWESYIHTLTKINAPLAKALTKMGFPDTKEKINHYLTLLNDLVEKKRRIIVMDDFHCVEDPSVIKFIEECMLFKMPPGTSVFLISRTVPDIKSANNGYENKIFNISEDDLRFTESELAQYFHSRNISASYENLREIIQDTGGWAFAINFIAQSFQKAPGYSGYVRNALRTNIFGIIETEIWKDISASLQNFLLRLSLIDHLSVDLITQLAGSEEELVAELEKQSAYVRRDNFINAYLIHPLFLEFLRTKQDSLSEEQKKETYAVSGSWCARNSFKIDAMSYYEKSGDYKSILLILAGLTTQIPQDIAKYAAQILDRAAEDVFDKVEFLADMHLRTYICQGLLQKSLELLKTYEAKFLKLPDNDPIKNRTLTRLYICWTYIRCLMSVTDDVFDFDVYIEKACNCVHEEDSGKLDIYYPGAWINFAGSSRKGGPEEYIAAVSRNHMHIQKSYMKGFMAGELELARGELEFYRGDASSAEPHIALAVKQAKAEKQYGLMHRALFYTLRIAVYQGNFIMAEQTLKDTQPQENETEYLYRFMDYDISLSWYYCFLGLPEKVSDWLQEDFSPYSHAGFIENFGNQVKARFCYATRNFAPLLAYIEEMKTRESFLFGRIEMLAMEACIHYKMKDKEKSFAALRAAYEDAAPNEIVTPFIELGKDIRTLASAF

SEQ ID NO: 89657 - protein, 191 aa, Unknown
  Obtained from environmental sample
  DOMAIN (59)...(191): GGDEF domain
  misc_feature (1)..(191): Xaa is any amino acid
MIVFIVIVSIVKTPEESRIDILNVLLAGFISVVLDWYVIMTRLSLASFAKKMEDERDIYLDQSTIDDLTQLKNRRDFFNTFERSISSYRQGDRFLCAAVLDVDFFKNYNDYYGHPQGDECLRSVGKVLKDLQNKMDIYAARIGGEEFALVWFEKNPSNVYSAASIVKEMICRLGIPHEKSEVAAYVTVSIG

SEQ ID NO: 89658 - protein, 238 aa, Unknown
  Obtained from environmental sample
  misc_feature (1)..(238): Xaa is any amino acid
MIEIAKEYKVFVIADEIYNKVVYNGARSYSLAEYIGDAPGIAMKGLSKELPWPGSRCGWMEYYNRDKDQEFAAFCSALDNAKMVEVCSTTLPQLALPLILGDSRYEAHRANLNEQIGKRSTLINKILGEVAELKFNPTYGAFYNSIIFRDGVLNNKQTLPIENPKMKALVEEWCEGVSPDYRFVYYLLGSTGICVVPISSFCSELLGFRITLLEEDEKELNNVFTTLRDAIKAYVKSA

SEQ ID NO: 89659 - protein, 435 aa, Unknown
  Obtained from environmental sample
  DOMAIN (21)...(129): TonB-dependent Receptor Plug Domain
  misc_feature (1)..(435): Xaa is any amino acid
INKDGNIVIDGDEFEITVKHRAVTTLSPSRRIIKASEFRGKFADLPSALESVSGVDIRSMGGYGQYAESSIRGGTAKGLRVHLDGIPLNSASGGAVDLSKIPLDKITEIRVTKSTSGLRQMGAGMGGVIELFTVDRETNNDIVGINVEAGSFGHLKEGVVVRFNGGNDVIAKSEATKKSRIPLLLKTTHQINIDLSKSDNDYPFIHDNGTTIPTLRDPDPTWDDTLMRKSNNHYKSIDAAYSLSANITENHKITQQISAGSYNQGLFVYHYKDNQSGSTSGNTIIYGIDYQGKISNNLTICGEASGIYRGGKISDPAGHFGLGGAKEIESDGVTADFLIDARYSLTENFYLAGLTGARYDGYAQESKERNETPEMNRYEYQAGAEAVIKTKIGESSTTKTALRAVYKYEIDTSNAAFNKRPSAQKNYRLGYPVAE

SEQ ID NO: 89660 - protein, 394 aa, Unknown
  Obtained from environmental sample
  misc_feature (1)..(394): Xaa is any amino acid
VVINVTKPHANASVSIGLTNVNNAAPAEYVNAAGTGTAASASFQSVPVAQFAVIRIISADKTKTVFYKLRLELENASTDTTISKINIAGVDIPDLPAANGAATGTTFVTYNIPGDVTVLNNLQVNATAAEGSVVGYGSSNANNTAPSTYNETGLFPIFPNGQWLVIRVIAEDNINAAYYKIRIVNGDNGTMLTDIKINGTSITGESGVTIPAANAAVTGTTAALYHAAASELDNLTVTVTGDAGIKVAYAAAAANNANTPAASFVTSGTFSPFIDRQWLVIRVISGNDSNTVYYKVRISTGSGSTALSEITVNGTPVSSVPAGNALVTGTTAVTFNSGTKFTSVTIEATAAESGAGLAPGIAYAKAAANNANTAAGEFASSGSLSGFTSGHYAV

SEQ ID NO: 89661 - protein, 244 aa, Unknown
  Obtained from environmental sample
  DOMAIN (110)...(237): SCP-like extracellular protein
  misc_feature (1)..(244): Xaa is any amino acid
MKIKIIGLMVIIGFFITSCEAIETNNDETINSSQGRSDPDVSNWNIAALDTAANADYLTDIEKDVILEMNKVRTDPKKYAELYIQPRLKYYSGIYYSVPGQTTIVTQEGVTAVNDCITALSTAGSVDVLAPEKGLSLAAKDHVTDQSKTGQIGHNCSDGSTPETRMKRYGAFSGAWTWGENISYGEANGREIVCSLLIDDGVPGRGHRTNIMNKAFTQTGVAYGTHTRYRTSCTIDYAKGYMSK

SEQ ID NO: 89662 - protein, 228 aa, Unknown
  Obtained from environmental sample
  misc_feature (1)..(228): Xaa is any amino acid
MNNMSQSLYQLKKNTGSFVFKFCRAILLFGLCFLIVQPLLNKLSISLMEQQDLYDSTVVSIPRHFTVGNYTLAGELLTFWPSLFQTLIIILVSSFLQVSACTLAGYGFARYKFPLKNFWFLCVMLIIVVPPQTIMASLYLNFRFFDIFGLVRLITGSPLNLLNSVVGYWLLSATGMGLKSGLYIFMLRQYFRGMPKELEEAAWVDGCGRFKTFIRIMLPDAVPMLTSC

SEQ ID NO: 89663 - protein, 688 aa, Unknown
  Obtained from environmental sample
  misc_feature (1)..(688): Xaa is any amino acid
MELENRRKVEASYRLYDINNLRPSDDKAKLLSSYPDLSRTKLYVLRDNTQEYMKETMEELFSRAGYTIDDFSEDSSLYAMPEGADKPAFNITLRYTLDGKSLVLNVPFDRIAYRQAYPITQLSLLPYMGAGGVDDEGYLLVPDGSGALIYFNNKKQNQIAYNNDVYGWDEAMPRDAIVNDNKALFPVFGIQKNGNALLCVIEEGASYAGIRADVSGRNSSWNYVYPQFTIVHGAKMDISGRSDRSVYLYERSLPAGESITLRYTPCAGDGYPGMAKEYRSWLTRTYPSLGADKEDGVPVAIEVVGAVNKTRHRLGIPFDLPLKLTSYKESANMIGDFAQWGWKNVRIKPNGWFNHSVDHSVPNKIKLISELGSKKDFKNLVSVAEKNGYAVFPDVDFMYMRDVKLFGGFSLYRDAARYVNRKRVEKYPYSFVWFGERVRWGKLSYLARPAYMMSLIDKFTRNSAKFNLHNIAFRSLGAKLSGDYHEKRLVSREASMKIRQEKLNELSGKGTGVMLNTGFAYAAPWASFITDMVIDDQGFGITDVSVPFYQIVLHGLVPYTGPAINLAEDYTMNLLKTVESGAGLYFSFMTEETTVLQETKFRQFYANEYDKWAPDANALYQKFTVDFAGLYNQAITNHIIISTGLTLTEYEDGRRVIVNSTSNDVNYNGCCYRRVQLRGTTAGGMMYF

SEQ ID NO: 89664 - protein, 91 aa, Unknown
  Obtained from environmental sample
  misc_feature (1)..(91): Xaa is any amino acid
DLDLEKFFDTVNHDILMQTVGETVKEKPVTALIRKFLKSRIMVDGLASQREQGTPQGGLCSAEHNPPYVQCLLMCSDKPNCRKNKALRQKD

SEQ ID NO: 89665 - protein, 884 aa, Unknown
  Obtained from environmental sample
  DOMAIN (346)...(498): ABC transporter
  misc_feature (1)..(884): Xaa is any amino acid
DAWTSPDLDYIEGLSPAISIEQKTTHRNPRSTVGTVTEIYDYYRLLYARIGVPHCPVCGKEIREQPVDSIIETILQFKEGAKIQLLSPVIRGKKGEHQKIVEDARKAGFARARIDGVPVNLDENIKLDKQKKHTIEIIVDRLVIAKDIRSRLAESVETALQTADGLMLVLVNEDGKNTEHFFSQKNSCPDCGVSIPELQPRLFSFNNPFGACPGCTGLGAKLEFDPDLVIPDRSLSFNDGGVIPYNPDSAWNRSRFQSLAKHYNFSLDTPFNKLPKKITNAILYGSDDDIKVRYVNREGTGRFEYQSKFPGILEELKRRYLETQSQGIKDWLEKFMSQKPCEDCGGKRLKPESLAVTVAGKNIWELSQFSVTDSLKFFENIKLSKNENKIAYQIMKEINARLGFMQNVGLDYLSLERKAATLSGGEAQRIRLATQIGSSLVGVLYILDEPSIGLHQRDNQRLIDTLIYLRNLGNTLIVVEHDEQTLRTADHIVDLGPGAGVHGGRVVAQGTPEDVMKVKESLTGQYLAGELKIDIPKKRREGNGAFIKLKGVSEHNLKNINVDIPLGIFTCITGVSGSGKSTLLSDVLYPALANKVYGSNHAEGAYKKMDGAEYIDKVIDIDQSPIGRTPRSNPITYVEGFTAIRDLFANMPESKMRGYKAGRFSFNVRGGRCENCDGDGTIQIEMNFLPDVYITCDVCQGKRFNKETLEIRYKGKNIAEVLDMTIEEAAVFFAPIPQMARKMQTLLSVGLGYVKLGQSALTLSGGEAQRVKLALELSKRSTGRTLYMLDEPTTGLHFADVKQLMDVIQRLVDQGNTVIMIEHNLDVLLQSDHIIDLGPEGGEKGGQIIATGTPEQIAKCGGSYTGAFLAEMLNRNAVRKNKRQ

SEQ ID NO: 89666 - protein, 633 aa, Unknown
  Obtained from environmental sample
  misc_feature (1)..(633): Xaa is any amino acid
MTPKEDDDDPYFRDDPGAGFQHVPIHTFDIDKDFSVWKSWRANDGRILPNPKSRFELINDPFDTGSLILLTIYFDPSIAGKAFGGFGMRAPIDPPIEVDNQTYVEFDLYYPKSAAGKYMRFEIWSTSSGGEGIQSIAGQPGTTKSQVYIRTSELTSLGTILPDWIGFYNGETWYKKTINVVTPVTSGTWEYLNIDLHTENGTKLEGDILMLGNVRITHMDTDGEKIPDVINTKSYLEVEPLKSKYNLNNGSFLIGVTGLGHVEPDSIRGHHYEIFVCEDELKPERHINPPQWLKDEFTYFKFKIDSSLTEGDESEWKLPTEELLSTRNSGKPGEYKLHGHCLAWINQSPPWMRQIIPENIATREWNKSGLFFSGGTNSTGPYLKVNKSIARRIYFNHILYVMRHFMSVNPRYDSSAGRGIIPFHSFDVLNVEIHESRYSEIIKNNPDEWKIALKNVSWLMAMTDNDYSDISSHYVYLLFKYAHIAIPNALMAEKYKAHYNDDNIVSAYMKMDNHDDNGSIDEYVMEAPPILTYNDYEISILSKAKVAYNMIKELNTAWKNDPLYDGRNLIECMGIQGHNLVTTTTASQNQQSLLLFTGLIDEGLLDSVCYSEIDIRQPNEAPGGEALAPAVLI

SEQ ID NO: 89667 - protein, 137 aa, Unknown
  Obtained from environmental sample
  misc_feature (1)..(137): Xaa is any amino acid
MEANFGPEIKSILESKNRNRGEYLDNLRLFYNGYRFSEDPITVYCPFGLLKHFYSGGKFSDYWYETATPSFVVDLINDNKINVVDLKDTVVTQSDFGNYDVDNMALVPLLYQTGYLTISDYDEDSSEYTLDFPNNEV

SEQ ID NO: 89668 - protein, 157 aa, Unknown
  Obtained from environmental sample
  DOMAIN (12)...(139): PAP2 superfamily
  misc_feature (1)..(157): Xaa is any amino acid
GQRNDINAWLTYGIMYTEAFLLTFGTKDLLKNAIVRYRPYMYEGGVPAGQEYDYYNSFPSGSTSLTFLSATFLSTTFLQEYPYSKWKLPIIIGSYSLATAVSAMRITSGAHFITDVLTGAAIGSFYGWMIPFLHKSNSNNNVIVNVAPYGFLVAVKL

SEQ ID NO: 89669 - protein, 1249 aa, Unknown
  Obtained from environmental sample
  DOMAIN (178)...(725): Ribonucleotide reductase, barrel domain
  misc_feature (1)..(1249): Xaa is any amino acid
YDIIWERRKSEIRNPNGKAIFSEDTVVVPAFWSQIAADIIAQKYFRKAGVPSDKIYEWKKWTCRADANPEDPGFSLPEDGAEHDARQVFHRLAYTWMDWGRRNNYFDSEEDEKAFYDETCYMLAHQFAAPNSPQWFNTGLYAVYGIDGPAQGHYYFDPEKNETVKSDSSYKRPQPHACFILSIKDDLVNDGGIMDLMTREARLFKYGSGTGSNFSDIRGMNETLSGGGVSSGLLSFLKIGDRSASAIKSGGTTRRAAKMVTLDVDHPDVEKYISWKAEEEHKVASMVTGSAIVKKHLDGIKKALASFRGPDADKFNIEKNHDLAAVLRAALGDKIPPSYLYQQLRRMEHGDDEVYSQTYSTAWDDEAYNTVSGQSSNNSLRINDEFMWAVMNDGDWNLTSRTGGAVVKTVKARKLWTDIARSSWQCADPGLQYHTTINDWHTCPAGGDIRASNPCSEYMFLDDTACNLASINLGALYNKESKTFSVEGYLHAIGIWTTVLEISVVMAQFPSPKIAELSYQYRTLGLGFANLGTLLMLMGLAYDSAEGRAVAGALSALLSGEAYSQSARMAAELGSFLRYKENSANMLRVIRNHRRAAYGSPDTEYEGLHTIPCGIDGTRCPAYLLDAAKAAWDRALELGKTHGYRNAQVTAIAPTGTIGLLMDCDTTGVEPDFSLVKFKKLAGGGYFKIINQSVPPALEALGYSPQLIEEIIAYATGYKTLNGAPYINPDTLKAKSFTPEAIATAEDAVKTALNLEGVFTTWTLGRDFVEKVLRIPESTWSLPGFSLLKHIGFSAEDIADAELYACGTMGLENAPGLKKEHYAVFDTATPSGKNGKRSISWTAHIGMMAAVQPFISGAISKTINMPNSANYEDVKGAYMLSWKNALKAVALYRDGSKLSQPLSSFAPGTDPLADTILKIERGLTIPPPPQIVDRRTTARGLRKPLPSRRMGYTQKAKISNHSIYIRTGEYEDGSLGEIFLDMHREGAAFRSLLNSFAITVSLGLQYGVPLEEYVDAFTFSRFEPNGPVQGHDYVKMTTSVIDYIFRDLAISYLKRYDLGQVKPEDLVPTATKSDIGDPGEARQRISDKQSSGFRPYVPSVAPPPAAAAGGAAGAGGGTSGALPAGSIGSAGSAVSAGSLPEQKTTPPASPGLSGRGESIKEVTKGLAVDTGSYRPAAKPADGVISTQTVQPPVQVLAQPHPEQSELAKIAQARIKGYEGDPCPSCGSFTLIRNGTCMKCHTCGGTTGCS

SEQ ID NO: 89670 - protein, 280 aa, Unknown
  Obtained from environmental sample
  misc_feature (1)..(280): Xaa is any amino acid
MWNQIYVLLGSYKPDTFYICMFDEYDESTAIMKAGSDYFDIPTDQWFLTLSTDGWWLSSDYYLRVAEAGIKVIKGQATATQTIDLPHSLGPLYYRNSFEKRDGWRNVTNVSASQQAQDVEIPGVRVKVPDLALDPCLKNPARLTNKGSGTVTLTTSDIVKTAGKSGNFLFQLAGNVTGNSSAYYKIGDVKIAPNAALNLKYSLKPLDNAGRNVFVDILFSDNTLLSERNGSGVIAQRGTVNQWTDVTVAIPAAAFSGKTITGVIAGYSGNANFSAQVDDI

SEQ ID NO: 89671 - protein, 287 aa, Unknown
  Obtained from environmental sample
  misc_feature (1)..(287): Xaa is any amino acid
VPPQQYTVTFDKNAGNDNVSNMPAQATVNAGGTVTRPATNPSRQGYTFDNWYTQASGGSLYNFGTAVNSSFTLYARWQAQTPTDPVRPPGLAQPTAFIDFSGYNGAATALTSHQPNPANPGAFTLANGITGSGMRISNSGDSGNVVISQYGDGKAAKNNQNNFLYFFIDNPTVKAATTVTLEIKYYDDIAGNSGLQYRSASEAFRSGGNITKSGSKQYQTAWIALSNCGFNMADQQNQGAQFRFGGGVIIQSIGIIIGGLPDPTTSAPPAFAPQTAMNTIIGKGIAG

SEQ ID NO: 89672 - protein, 570 aa, Unknown
  Obtained from environmental sample
  DOMAIN (1)...(61): Transglycosylase
  misc_feature (1)..(570): Xaa is any amino acid
AKNKILALYAANAPFGANVVGLEAAAWRWFGRSSNDLSWAEAAVLATLPNSPALIHPGRNRETLKAKRDSLLNKLFKKGYFDEETLALSVAEPLPGEPLPLPRLAPHLLDRLVLEAAKKSSLKKSAAFVTTINRDIQLRVTDILNRASDRFALNGIFNGACVVLNTQTGETAAYVGNTNTLHAPDVDIASSRRSSGSLLKPFLYAAMLDSGDILPSSLVSDIPTRIGSFSPENMSRNYLGVVPADEALARSLNIPAARSLRIYGVERFAQFLRSLGLTTLFRPGSEYGLPLILGGAEVTLFEITKLYANLGKTASIDSTYSPLISCGAAWLTLEALVNAARPGEEAIWREYAGARHIAWKTGTSYGFRDAWAIGVTPEWTVGVWIGNASGEGRPELRSAVTSAPVLFEIFSVLNSLGGNRNMWFNKPTTELLQVEVCAFSGFPASINCANIKYVDIPKNAPAAKPCRFCQTVILDDTLSYRIVLKPGVFTTAVERKWFVLPPAEEWYFRRWNLDYKPLPPYFNSRDLSNRGEGMFALFNPEPDSQVYVPRELDNREGKIVFPPPIAMKRK

SEQ ID NO: 89673 - protein, 290 aa, Unknown
  Obtained from environmental sample
  misc_feature (1)..(290): Xaa is any amino acid
SKNWVSYQKNASAQWQVTSNRFTEQAYRLFTLALAGEADLGSMNRLRSHKLPFQASWRLAAAYWLAGQRDTARNMIKGLALPESDYRELSATFGSTLRDKAMILETLILLNSQEDVGRTKQLFEEITKELSRDKWLSTQETAYALIAIVPYMSNNAGSGALSLDYSVDAKTGNIAFNTPVAERSFGNMTGTSAALSVTNRSSSPVYISFTAKGLPTEGKEPALSEGLSLTVEYHDAHNRVIAPESLKLGEDMEISVRVRNTFSQSVEEAALIIPLPASLEIVNTRIGGNA

SEQ ID NO: 89674 - protein, 73 aa, Unknown
  Obtained from environmental sample
  DOMAIN (1)...(70): Uncharacterised BCR, YbaB family COG0718
  misc_feature (1)..(73): Xaa is any amino acid
ITGSAGGGMAEIDMNGKMEVLAIRIGQEAMEDREMLQDLITAAFNNAMEKVREEVNREMGGMIPGGLSSLGLV

SEQ ID NO: 89675 - protein, 299 aa, Unknown
  Obtained from environmental sample
  misc_feature (1)..(299): Xaa is any amino acid
MDKKLLEVLRIGIFYDGYYFYKISNYYKYEHEKKSRISISGLHEFIRSEIASLTNMDVRKCQIIDAHYFKGRSLAKDMGEKVQSERTFEDILMRENIVSHYLPLRYAGEGTIGQEKGIDVWLALEAYELAIYKHFDILVLIAGDGDYVPLVRKLHTLGTQVMLICWDFSYHNENGDIVETKTSRQLLSEVYYPVQMSQKIDQNNNEHLKDLFVTERPQEWTFSFGQKAPLSANAAEKQPEAPSAQWGTAGSIVAARPIPVRDATEFDSTIFSVSPNGFGFIKDEERNNIFFHYSTLINC

SEQ ID NO: 89676 - protein, 93 aa, Unknown
  Obtained from environmental sample
  DOMAIN (3)...(83): Ribosomal protein S19
  misc_feature (1)..(93): Xaa is any amino acid
MSRSVKKGPFIEKSLYKKVLELSKSGERKMIKTYSRCSTIIPEMVGGTISVYNGKTWVPVYITENLVGHKLGEFAPTRIFRGHAGSDKKAAAK

SEQ ID NO: 89677 - protein, 464 aa, Unknown
  Obtained from environmental sample
  misc_feature (1)..(464): Xaa is any amino acid
MVSRGFKKIILFLIGCMFFPLSLYSLGKSEQGKEGAENNNQVVETERPVEQTSPVTLAGTNDGLYSIEPAGLSLLRPGEVKKILHIKPYDSEGNPDGYWAILGGDGILVSADLKKWEQRRQGLPIKTIKVFQDGEKTFLQVPQDIKDLEINPADPQIMVCATKDNVYLSRDQGVSWRSLGAPPYRTNGIKAVAAANMPAANIPGGDLTVFLSHSTYGVFYTQPDRPNARWVELNEGIEPLETTGNTDEVSDIAVILQPGSGGETAVPDIYISQTFRRRIYRLDWNNKTFNLVWSDKSSFGTVDSLFASDNGLHFLYEGTVASIGFPDYTFQKRDDILEAIRKVPAQNRMNCAVLRNDTGLITLSELWLLDEPEPAAPTGRPLVSQVQASSRTFPQVAPIQAAALQAALNKEGLYLPVNHAMDSGSLKPYLDIIEKNGLNMIVIDMKDDYGRLRLPQIIPRLPRK

SEQ ID NO: 89678 - protein, 524 aa, Unknown
  Obtained from environmental sample
  misc_feature (1)..(524): Xaa is any amino acid
MKKISTLLIGICLLLTVIGCQNPFQIDDTHTNNGKGQFVLNIGNNAAGRTIMPAIDQGIAAYSLQFSGAGTLTVDRTSANVGEAVSLQAGTYDLTVTAFTDTAKANPIARGTLTGIVITSGGTTSKSLVLGGIIETGATGTFKYTITFPAAVTATMTITPISEGGTAQQTKPLANGTQADVTLNTGYYRVTFNLDNGTKAVSRDNYLHIYKSMESSFTFTFTDGHFVTMIIKSNTDDGNEVSPANGSLRYAIKNAEENSTIVIDNSITEIKLKKRLYIDKSLNIEGNGVTITRDPSWTTNDGDSQFVYIRKGFDAESVTPQVRISRVHFTGGHSALGGAVCNYNGELWLESCIFSYNKAINGKGGAILNESDAMGLTVNGCTFYGNTSGMFDGNAIRSDANQGYFTLTGNVFFYGDVVVDWTASALVYQYGSIEGTSGGYNVVDGEYAHTIDQMFRNVEPAATDILREEPFVTPVNFKVLAGSAATHVISSLPADYPETDFYGNVISHGANAGAVQAVANGFLL

SEQ ID NO: 89679 - protein, 297 aa, Unknown
  Obtained from environmental sample
  misc_feature (1)..(297): Xaa is any amino acid
MLVFAAGQHITRRDGADAVFQKAQGTVETIKNLSKEEIVRFNTRQYIVEPGVKLGNNTNLMMTQRNQGYVSGIEIMEGYNQFRLKYAALPLDGAKFNTMLDLMNVRYYVNPRLKEGDKDVMLRNETCLPRAKLFYKAVVVDGGAGSIHDSVNSDGIDSLVINYMNSPNYNHRNEVVVTDPNLAKFAGGDGTGEVKIAKYDFNRIELDVDTDKEAILWLSEIWYPAWKATVNGKKADVRRANYSFRAITVPSGHSKVVFKFDSTLFNIGAIISGLTLLLSLAYLIFVWCFPSVRIKRL

SEQ ID NO: 89680 - protein, 280 aa, Unknown
  Obtained from environmental sample
  misc_feature (1)..(280): Xaa is any amino acid
MATAELNALNKAQAYQLADITKTPPQFGAITPRWLIRFLEFKGLEAGIYRVNKVVEGETPLDILCSSEKKSAEIPEGYIQYQQKPREYTLSSISTIINVDTAVQDVYSSPFDQTKEQLHLAIESLRERQESQLINNDDYGLLKNVPDSQRIKPGNKAGSPMPDDFDELISKVWKEPAFFLAHPRAVAAFQRECTRRGVPPATTSVFGGNFILWRGIPVIPTDKLFVDGLKTPKVRAAKPIFFWCVPVRQSAELSVCTRQVCRMNKEEDFPCVSEAWTTKD

SEQ ID NO: 89681 - protein, 241 aa, Unknown
  Obtained from environmental sample
  DOMAIN (13)...(77): Heavy-metal-associated domain
  misc_feature (1)..(241): Xaa is any amino acid
METAEKQDLQKRSFRIGGMTCVNCQNKIEKKLNNMAGVHDVTVNYATGETLVTYDAAEISFEEITAAVKKLGYRTLDGKSENTVTQIIGTLVIILALFMLMRAFGTSDLAASFPLAQAGMGYGMLLVIGILTSVHCIAMCGGINLSQTLRKSGETEPASTFSLLLPGILYNAGRLVSYTLVGGLVGALGSVITVSGRFQGAVQLAAGVFMVIMGLNMLDLFPALRRLNLRMPKVFAAKVDE

SEQ ID NO: 89682 - protein, 296 aa, Unknown
  Obtained from environmental sample
  misc_feature (1)..(296): Xaa is any amino acid
MKKKNKCLLILLFLFAMPLFSHDADIKIEGENLYKSVRLTPQIYNAANRSLSDLLIKNKEENIPFFINSSEGKTNETRETYLMRLINSYIKDDNFYFDYKLAFASDADVIATSIEFSTRNTGFAKSTEVYGSYDDKHWEFVQSDMLYVVDSKSKLEINFYHPQKYTHYRLKFANNLEQISFYAVNLVYSLQISEETFFIESFTPKFTVETKDKITKVLIEDVKNLRLCDLQIETDTMFIRKVKVQNGNEKELYNLSVNGTTYTDTVLPLNRKVSEDDIFTVSISDGDDKPVDIKSV

SEQ ID NO: 89683 - protein, 603 aa, Unknown
  Obtained from environmental sample
  DOMAIN (547)...(585): Topoisomerase DNA binding C4 zinc finger
  misc_feature (1)..(603): Xaa is any amino acid
FYEVTPVAIKEAVANPRPIDEALVESQKARRVLDRLVGYSLSPLLWKKVKNGLSAGRVQSVALRLICEREKEVESFIPEEYWSLEADFKIGRSTFTAQLVKWNGVKPELPNETSAMAIINDLSGADCVVSDIKEVEKTIKPKPPFITSELQKSAANRLGYTSRKTMQVAQQLYEGVNMGSTRIGLISYMRTDSVRVSETALTELREWLGEHYPNELPEKPLEYTSGKKAQDAHEAIRPTYVSYTPDSVAEYLNRDQLRLYTIIWERFVSSQMTNAKTRTVSVEIKAVDGKGEEGLFRVSGTKLIEKGFYKVIKLLSTKEDKGNPYPPLKAGDKVTIEKLHPEQHFTQGPPRYTEASIIDILREKEIGRPSTYAPIISVLLDRYYVTRSNKQLVPTLLGKKICEMLVEYFPGYVDVDFTASMESKLDKVEESQLKWPDMLKEFWGPFKARVDEVGKTLESFKGSLDEPTDFVCEKCGKPIVKKLGRNGFFLACTGFPECRNTRSVPLAVCPKCGGDVVARKTKGRGKEFYGCARYPECDFVSHYKPINQNCPKCGKFMVEKYDKKNGSHKACINPECDFLHTKDDVSDDLGDKRDDIKDENNGE

SEQ ID NO: 89684 - protein, 401 aa, Unknown
  Obtained from environmental sample
  DOMAIN (1)...(240): DNA topoisomerase
  misc_feature (1)..(401): Xaa is any amino acid
MRTDSVRISPTALEELREWLGKNYPQELPEKPLVYSSGGKAQDAHEAIRPTYVNYTPDYVAEYLNRDQLRLYTIIWERFVSSQMTSAKTRTVSAEIQAVASNGDEAIFRIAGTKVIEKGFYKVIKLLSSKEEKGNPYPPLKAGDKVKAEKFHPEQHFTQGPPRYTEASIIDILREKDIGRPSTYAPIISVLLERYYVTRSNKQLVPTLLGRMINDVLVEYFPQYVDVTFTASMEDKLDQVEESQLKWPDMLREFWGPFKARVDEVGKTLESFKGSLDEPTDYVCEKCGKPLVKKLGRFGFFLACTGFPECRNTRSVPLAKCPKCGGDVVARKTKGRGKEFYGCTNYPECDFLSHFKPINQDCPKCGQFMVEKYDKKNGSHKACINPNCDYLHSAEDEESEK

SEQ ID NO: 89685 - protein, 378 aa, Unknown
  Obtained from environmental sample
  DOMAIN (3)...(276): Indole-3-glycerol phosphate synthase
  misc_feature (1)..(378): Xaa is any amino acid
MSILDEIADKTRLRVAKAKNSAPFDQVKEKALALAVEEGSREWGGANKVGVRSWEEARFPFERAIAAPGLSFICEVKKASPSKGIIAEDFPYLQIAREYEAAGAAAISVLTEPDYFLGSDQYLREIAAAVSCPALRKDFVVDPYQIYEAKILGAKAVLLICALLDTETLTEYIKIADELCLSSLVEIHGEAEAEQALQAGARIIGINNRDLKTFKVDLAVTARLRSFIPAGILTVAESGIKSVEDVRAISGIGIDAVLVGESLMRAADKKQFLAELKGVGSRNCSMKDNHVINTTGLQTKTPLPKATLSTPYSLLPIKIKICGLFREQDIDFVNEACPDYVGFVFAESKRKVSAAFAAQLRRRLSDEITPVGVFVNAP

SEQ ID NO: 89686 - protein, 361 aa, Unknown
  Obtained from environmental sample
  DOMAIN (20)...(126): PAS fold
  misc_feature (1)..(361): Xaa is any amino acid
MRAMTEELNFRFEQAKSEGNRLEAILNGMSEAVFAMDNSLKLHLVNPKARELFALGIKEINTMTLLEATRSTELVEIAKKAINGGVPLDTELTFHKGAEQHFHVYASPLINPNNYRDGAVLVLQEVTRLVKLERIRKDFVANVSHELRTPIQLIKGFSETLLDSVSDKKNSHFIEIIHKNAGTMENLTNDLLILADLEDNTVNNRDMEELKIAPLIKEAVSSLETQADKKQIEIIVDCKENLSAKLYGSFIIQALINLIENGIKYSPSKSKIWVSAFTENDELLFEVRDKGMGIPSEHHERIFERFYRVDKARGRFAGGTGLGLSIVRHIALLHKGRAEMESRVGEGSTFRIRIPIHQNLQ

SEQ ID NO: 89687 - protein, 201 aa, Unknown
  Obtained from environmental sample
  DOMAIN (103)...(188): PhoU family
  misc_feature (1)..(201): Xaa is any amino acid
MATRVEENLGKALTALRTRNAELAKEVRADDSEVDALQIRIEDDAAIVIATQQPVARDLREMVTIFKLTSNIERIGDHAVHLARAARKLAKKGDSLFMTQGHFEAMAVTGQEMIRAAISAFMAQDAQAAREAAAMDSKIDDEHKALTEEILKLMKKNPDMVKDALQIIHTSNQLERLGDHITNICEAIIYMIEGKHEELNE

SEQ ID NO: 89688 - protein, 210 aa, Unknown
  Obtained from environmental sample
  misc_feature (1)..(210): Xaa is any amino acid
FWTYFCGLIKNDIKKKSEKLSIDISIFQAVYIIEIISGHFRTLAIKRQEAETAFGNLESQLAKPPYLYTMDQILKFSGPGGELLLGQYTSEELSEWMKRQTTESRNNGLPALLVVNINSKDDQYFLLKEKMMLLCARLLHDGQMVIKRAIIKKWSRLILDFKTEPAMSDHNGFEKILASTGENLCPELMSILADPKLLVVYQEIDSIPYG

SEQ ID NO: 89689 - protein, 474 aa, Unknown
  Obtained from environmental sample
  DOMAIN (1)...(118): Pterin binding enzyme
  misc_feature (1)..(474): Xaa is any amino acid
AGYSINLKDGEAEFLRRASLIRRYGAAVVVMLIDEQGQAVSYERKIEIAGRAYRLLVESGFPPENIIFDPNVLAVATGISESDSCAIDFIRACAWIRDNCPRVQISGGISNLSYSFRGNNAVREAMHSVFLFHAGAAGLTMAIVNPAALIAYNDIEENLRNAVEDVIFNRSPGVADRLLKLAEKKNDTSTPSAPHSPLTNNWRNQPAEARIIHALVKGIDGFIEADVLELMENKGGSTGKTALEIVEGPLMDGMKEVGKRFDEGTIYLPHVIRSARVMKKAAAALEPYMGEVNSANNAPKVILATVKGDVHDIGKNIVGIVLACNGYQVIDLGVMVPAEQILDAAEKEQAAVIGLSGLIAPSLDEMAHIAKEMEKRRMKIPLLVGGAAANLVHTSLRLAPEYSGPVVYVPNAGKSAETVRALLSDSQRPRFLRELEKTYQDAAQRHEEIQSRLEIISLELARANRVPPAIYKPV

SEQ ID NO: 89690 - protein, 81 aa, Unknown
  Obtained from environmental sample
  DOMAIN (1)...(70): MraZ protein
  misc_feature (1)..(81): Xaa is any amino acid
MKVQAFSVEIDPKTGRIPIPAFLRTYANLTKNCLVVSVNNHLEIWNEDYNKNFMEEVRLINKNTHKKLLGNVNFFSNEDEE

SEQ ID NO: 89691 - protein, 204 aa, Unknown
  Obtained from environmental sample
  misc_feature (1)..(204): Xaa is any amino acid
MGHGLNLYAIELSELTHVSISAATPAAAMVSTDDKISAYREFWDALRWDMPLPAGRHIIGIKPLTSGSLSGIPLTVGLYPILMLTEEKPLQMQIMVSQNRLAKFELQKKSGIGIGLSTQNQTIEAALLDAKGKEVAVGSQIFKELDKGAYYVLLSVPSGSTQNGVSVTVRLFGQVPPPAEPPAERIRRIIKDDRDESSESRASR

SEQ ID NO: 89692 - protein, 674 aa, Unknown
  Obtained from environmental sample
  DOMAIN (176)...(468): Glycosyl hydrolases family 2, TIM barrel domain
  misc_feature (1)..(674): Xaa is any amino acid
FELCVSSLIKPGKNLLAIRLDHGSSTPDRWYSGAGLFRDLYLRVTPKLHFATWGLGVKAEIQNEGEDNAGGFAKGQALVKISAEIANTAPEGGDSILRLAVKDPQGRDVTSAEVPFKFSPKSKTLVEHSFQIKSPQLWSAKNPLLYRLSASLGKAIGKDNAGAREATFGIRSIRMIAKKGLFVNGENVKLKGVCLHHDCGILGAAFYSDAWRRRLLILKGLGCNAIRTSHNPQAEEFLDLCDELGFYVIDECFDKWKSLSYGEIFEKNWRQDLTDFIMRDRNHPSVFCWSVGNEVAEQGKPDMIKTGKMLCDLVRTLDDRPVTLALSPHVTDSRPRDLVGAPPEKHVEITARIAEFVDVLGLNYHEPWYPYYTKAIEKPIIGTECYEFYSGTLHSYEDYDRKNPWRYVLEDDNVLGQFIWAGIDYLGEASWPSKGWTGSSLDICGFYKDQTWLRKSYWSQEPVAHICFYDNTLPNNYARGRWNFPYTASHLNLDNLNRRVVNAAVYTNCEEVELLINGKKIGRRKLKDFENNIIEWPFDYTPGDLKLIGFRNGKEVVVQEIKTAGPPAAISLKADKTALEPGSLAHIEITITDAAGLPCPVENLLLGFSLEGDGEIMGASSPSLNNFLGFDLTRVYTSMGRALAIIKAGDSAGKLIFSVYGEDLKTGSLGFTVG

SEQ ID NO: 89693 - protein, 138 aa, Unknown
  Obtained from environmental sample
  DOMAIN (3)...(137): Glycosyl hydrolases family 2, sugar binding domain
  misc_feature (1)..(138): Xaa is any amino acid
VKDAYAQLINRDWKFLLGDPKGAEKIDYCDRTWKRLDLPHDWVIHQPFDKGEGTGWTSEVMQGYFVWKNTGWYRKELLLEDTADKEIFLYFGCAYRNATVYVNGKKAGFHAYGYTSFELCISSLVKPGKNLLAIKLDH

SEQ ID NO: 89694 - protein, 614 aa, Unknown
  Obtained from environmental sample
  DOMAIN (7)...(117): Glycosyl hydrolase family 67 N-terminus
  misc_feature (1)..(614): Xaa is any amino acid
MLNEYDCWLQKRIIAPPKAALDTVYAEKGGEVASQAVEEFRLGVKRLLGFSPAVYFPEDMERKERGVFLGTIPFMDKNFQLPATELETGGFTIKVTDKQLIIAGHDEPGLLYGVFRFLALLALGEIKNGFEINDTPASLLRMINHWDNMEGTIERGYAGPSLFFRNGRIDYEKQRIEDYARLLASIGINRISINNVNVGGNAKLLITPEYLEDVAALAAIFRPFGIRLILSINFGAPWSLGKLPTADPLDPAVAAWWKERADLIYQYIPDLAGFLVKADSEGAHGPFQYNRTHADGANMLAKAVKPHGGEIVWRCFVYNCQQDWRDHSFDRARAAYDHFMPLDGAFDDNVILQIKFGPYDFQVREPVSPLFGALRKTRHIMELQITQEYTGHQIDLCYLPWLWEDIMRFDTAHGFAKGANSRVKDLIGSYAAGHSRIEGFAAVANTGLDRNWTGHSLAQANLYGYGRIIWNPSLSAADIAREWSALSFGPGPVAQTIAGLLLKSYPAYEKYNAPFGVCFMVTPGLHYGPNIEGYEYSRWGTYHRADANAIGIDRTSTGTGYTGQYAAKNAALFADPATCPENLLLFFHRLRYDYIMKNGETLLQNIYDTHFEGC

SEQ ID NO: 89695 - protein, 306 aa, Unknown
  Obtained from environmental sample
  DOMAIN (1)...(261): Phage portal protein
  misc_feature (1)..(306): Xaa is any amino acid
GNAYAQIIRDGRGNAVALYPLLPDRMAVDRNPRGEIIYTYQGDKGQAKLTREQVLHIPGLGFDGLIGYSPIAMAKNAVGMSLATEEYGARFFANGANPGGVLEHPGTIKDIARVKESWNAGYQGSSNAHKVALLEEGMKFHQIGIPPEQAQFLETRKFQINEIARIFRVPPHMVGDLEKSSFSNIEQQSLEFVKYTLDPWVIRWEQSLTQALLLPSEKQSLFIRFNLDGLLRGDYESRMKGYSVGIQNGFYSVNDVRALEDLNLLTEAEGGNFHMLNGNMVKLSDVGTAYVKTEPSKQEANQRKSN

SEQ ID NO: 89696 - protein, 292 aa, Unknown
  Obtained from environmental sample
  DOMAIN (1)...(290): Phage Terminase
  misc_feature (1)..(292): Xaa is any amino acid
VEQCGDLAGLAKLIPSTKRIVFSHTNSFYRVLSSETKSKQGFNVSGLIFDELFAQQTRDLFDTMTKYTGDARRQPLYFLITTAGRDKTSICYEIHCKAKAVLDGSKIDPSFYPAVFGITDDDDWTDEAVWRRVNPSIGVTIPMETVRAAFEQAKQNPAEEMHFRQFRLNEWCNADIRWMPMDKWDACGEELDLEALEGRDCYCGLDLSSTGDLTALVLVFPPVDGDTKYTVLPFYWLPEDVIDLRSRRDHVPYQVWKKMGVFNTTEGNVVDYDYIVAFIAKLSEQYRIREIA

SEQ ID NO: 89697 - protein, 278 aa, Unknown
  Obtained from environmental sample
  DOMAIN (1)...(121): Domain of unknown function DUF21
  misc_feature (1)..(278): Xaa is any amino acid
LIGNTIVNVVTSALATMLFMGLFGAKGVSIASVVVTVLVLVFGEISPKTLAKESPELTALRSAPLLRFFIIIFRPLNYLASAWGNIIVKIFPPNANRHITEDELLTFVEEVRQEGGINRREEHMIRQAIEFDDITAAEIMTPRMDMAAVSETDTAGHIESLFEETGFSRLPVYRDNIDNITGIILLKDFYREVTKKGKSPSEIIKPVVLVTKTMKIQRLLQTLKEKQSHMAVLVDEFGGTLGIVTVEDIVEELVGEIWDEHDRVVEPVKRNSDGSFSA

SEQ ID NO: 89698 - protein, 227 aa, Unknown
  Obtained from environmental sample
  misc_feature (1)..(227): Xaa is any amino acid
LDETVKRPPDPSKAGFVFSGWYTDNDTFELLWDFDTAPNGSMTLHAKWDMSVPAVKTFTVSFNTNGGSYIPSQDLIMDETVKRPPDPSKEGFVFCGWYTDNDTFELLWDFDTAPNGSMTLHAKWDISVPAVKTFTVTFNSGGGSEISPITVESGSVIDKPADPAKTGYDIIFTGWYEDGQTDTFNFDTPITANITLYAKWRPYELGERGPGDGIIFYRSEAGFTMTY

SEQ ID NO: 89699 - protein, 561 aa, Unknown
  Obtained from environmental sample
  DOMAIN (314)...(492): Peptidase M16 inactive domain
  misc_feature (1)..(561): Xaa is any amino acid
MIRYGFTDSEIATAAEMLVSDLQELVQEKDKQQSQKYINSLTDYYLKGGNYADVEWELDAVSRMLPHIKAKDINAAIKDYFASDDIQVFVFAPDSEQDSLPDEARIKQMIAESKKMTIAAPKSKTVEGGLLSSVPERGSVVSESIDAETDAVIWELGNGSRVILKSTKNKNDEIVMQAMALGGTSSAAPEDDVSASLAIEMTQVSGLGPWPRPELTKKLAGKQVSLSQYVYSYYRGFRGSSNSTDLKTFFELLHLTFTDQRIDNEAVQAMMDQYKTSLALRREDPHEVFSDEISRTIYSGHPHFKPLELADLPKVNIETALAFIRKGHNPADYTFVFTGNLELKEMREYAETYLASIPRGKSWNTWTDLNVIRPGKVENIVYKGKEEQSTVYMVWFSKAPFSDELSATAQVLNEYLDIKLDDEIREKLGGVYSISSGINVSPVPQGELSMQIYFSCDPKRAEELQAAIIALLNQTARGVIDRDTFTKAVEAPKKEWEVSIQSNSYIAQSYANSSVLLNLPLSRLDRRPKLYDAVTQADIQRVCARLLQSNGPALVVLMPEK

SEQ ID NO: 89700 - protein, 408 aa, Unknown
  Obtained from environmental sample
  misc_feature (1)..(408): Xaa is any amino acid
VLLGDVQGALLDLETIVLADRNYCIKVYADKDFSGITEQFSTLIKKLKNVAFSSAKKDYDFINTALSELASIGGKTKVTVPATFTEELSYFDVLNYAKDFKRIITIVEKDIAGKKAAIAKAKQEAREAQALVVQKVKMVEARERAAKYQRCLSASSCHTVGLKTTGRVVAIGYNKNGQCNVSDWRDIVAVAAASYHTVGLKTTGRVVAVGYNKNGQCNVSGWRNIVAVAANYNHTFGLKADGTVVAVGDNEHDQCNISGWRNIVAVAAGYYHTVGLQADGEVVAVGDYNYFDHYKYLYWHDIVTIATRGGKHTVGLKADGTVVAVGDNEHDQCNVSDWRDIVSIAAGNQHTVGLKMDGTVVAVGNNEYYQCNVSHWRDIVAVATGCQHTVGIKSDGTVVAVGRNTVYI

SEQ ID NO: 89701 - protein, 149 aa, Unknown
  Obtained from environmental sample
  misc_feature (1)..(149): Xaa is any amino acid
MGRNSLEEWFADAAPSKSEVPEDVPPELVPEEWKTEPKPENKPEAKPEPRPASKPEVKPKQEPKAEKKPEPKPEPKPEPKPEPERALPEIHLLLPEQRERLDGLTAMQRQTVFSWECTGNIARARFVLSRNPNPLQGDAVVEIQNPGYT

SEQ ID NO: 89702 - protein, 473 aa, Unknown
  Obtained from environmental sample
  misc_feature (1)..(473): Xaa is any amino acid
MIKAKSVHITVFIKIFSILLFFSAITPLFGGGRQDADLAKADALIKNKKYEEAISILTTYAKRNPDNFDLAQQRLRKIYQLRDEFNRTADELINTLLNEPENAEKILNLSKQLNSIENDNSPLLVNFVSRTQEIAQFNANRNRLADIFNRGKELLNKGDCAGAIRVYAEGMNFMRDEFFSAGYGTNIESEVSRETERINSIIASFQQTSSQMGAISAELIRAINSSTPAVGINEIVNRLALSADRFIALKQELYATDAVFAGILNVIRAREPEIVDRNHISFIRISINGRADENKQEGMLGAFDVYWKYSIEPVNAAITQFLQKANSAALTSFNDGYYAAAISSLDRMADYTNISPLLFDKHRRLFDGARPQTIALYGNNILREDIPAYLEIKALGEANNIILQASNTGLRQNIDRSSLTRWREGTINATAALSMEQQTRNAITGMQNTINTIRTNANQINTEINTYRNIQYI

SEQ ID NO: 89703 - protein, 279 aa, Unknown
  Obtained from environmental sample
  misc_feature (1)..(279): Xaa is any amino acid
IMIRLCKLLLIILFTIPAVFTLSAQEFFWEEAETFSPHPGKFPVSVNSNDFSVIAWQEVTPNSDTSVTSGGFINIFLAVKEPGKDWVQRGTVGGPYTYLGTEPSIISMVIDNKGRILIAAASGNAQAEILISENRGFSFYKYIVNLGAENSVAPRLYVRADGGYLLFITRGSGQSLSICYSRSDNGINWSPFEFFTQENALSLNFLPAHGSIGHRDIVFYQSLAIGTESISTYQLYYKTSDDGGKTWTEARRFTVFNDPVVQGQTNADSFDNQASPSSK

SEQ ID NO: 89704 - protein, 319 aa, Unknown
  Obtained from environmental sample
  DOMAIN (5)...(169): Glycosyl transferase family 2
  misc_feature (1)..(319): Xaa is any amino acid
MKKISILIPCYNEEENVVPLCEAVVKILEGELSAYDYEIVFIDNNSTDNTRPLLRGLCAGNKRVKAIFNAKNFGQSNSPYYGLCQTAGDCVILLCADFQDPIEYIPTLVKEWEAGYKIVSCIKNKSRENKLMRFLRTCYYKTIIRMSDVEQIEHFTGFGLYDRSFVDILGNLRDPTPYLRGIVAELGFQRKEIFYEQQRRKAGKTKNNWYTLYDLAMLSFTSYTKAGLRFATIMGFIMGGITFLISAAYFVYKLLYWDQFTVGLAPIVIGVFFLGSMQLFFIGFIGEYIMAINTRIRLMNHPLVIEEERINFDPQPEDG

SEQ ID NO: 89705 - protein, 151 aa, Unknown
  Obtained from environmental sample
  misc_feature (1)..(151): Xaa is any amino acid
LSKGHCGVALYVTLAHAGFFPRGQLDGYYIDDGVLPGHLDMSATNGVECSAGSLGHGAAIGLGMAIAKERDGRGGRVYVLMGDGECNEGSVWEAVMLAATLKQKNYTLIVDFNHLQGMGRDVIDQRNLGERFAAFGFHVLEVDGHDTGALA

SEQ ID NO: 89706 - protein, 392 aa, Unknown
  Obtained from environmental sample
  DOMAIN (54)...(298): NAD dependent epimerase/dehydratase family
  misc_feature (1)..(392): Xaa is any amino acid
MPINTPASGIPWTRYTIRTFLAICGQTGTLRGRSGRGNNARLLQRQEGLSYRTHGLQGAWLCRLLAKSGAETVGYALEPPTNPSLFEQIGGERDLYRHAVGDVGDFERLLKVATETMPQIVVHMAAEPLVRASYRDPRKTYETNVMGTVNLLEAVRNTGTVKSLVNVTTDKVYENKEWLWGYREDENLCGGDPYSNSKSCSELVTYSYRKSFFRGADDYCITAISSARSGNVIGGGDYAQERIIPDCVRAAASSNEVIIRNPHSTRPYQHVLECLYGYLLLAKMQYEDPYLEGAYNFGPNEESCVTNWELVSLFCDVYGHGASWRAGDGGGPHEAHFLKLDSSKSKTVLGWKPRWNIKTAVEKTVEFAKAGSDADRLKCVDRQIDEYLTEAQ

SEQ ID NO: 89707 - protein, 154 aa, Unknown
  Obtained from environmental sample
  misc_feature (1)..(154): Xaa is any amino acid
LPHIFDNIRGDNLATALKQTLNGAKRADFCIGYFNLRGWNLLIDSVEQLTSGQLNEKYEDDSTYKARVLIGMQKTPQDELEEYFSLRQTQIDLAAVNEIKKAKAAEFRRQLTIGLPTNKDEATLKKLSRQLREGIVKVKLHLAFNLHAKLYLAY

SEQ ID NO: 89708 - protein, 696 aa, Unknown
  Obtained from environmental sample
  DOMAIN (108)...(690): Carbohydrate phosphorylase
  misc_feature (1)..(696): Xaa is any amino acid
MNISTYTVKPKLPAPLKPLEEIARNLWLSWNYDAIQLFIRLDYDSWMQSRQSPVKTLGMVSQERLAQVANDDSYLAALKEVYDRFQRYKKGETWYKGSHKDVVAYFSMEYGMDTSLPIYSGGLGILSGDHMKTSSDMGLPLVGVGFLYRQGYFTQQLNADGFQQESYPENDWYNMPVERKNGKDGNALKISVDLAGRQAIAQIWEVKVGRSSLYLLDTNLEENAPDIRNVTASLYGGDKETRMQQEVLLGIGGIRALRALGINPAATHMNEGHAAFLGLERVREIMTERNFTFEEAREAIWPTNIFTTHTPVPAGNERFDISLVEKYFRSWPQVLGISWKDFLGLGRINVNDDKETFCLTVLALKMAAYANGVAKLHGVVSRDMWQGLWPGVPINEVPIGHVTNGVHPRTWVSSGMIELLDRYFGPHFEDKPTDLAIWDRMDRISDEELWRTHERRRERMVAFVRERVRQQYKRTGAVERRVRQAEDVLSPYAFTLCFARRFATYKRGNLLLRDPERLLKLVKNNDHPIQLIFAGKAHPHDMPGKDLIRELIHFAEKYDVTSRIVFVENYDMTVAKYLTSGGDIWLNTPRRPMEASGTSGMKAAMNGVLNCSIMDGWWDEAYNPEVGWAIGHGEQYVDEHLQDDVESKALYDLLERDIVPLFYQRGRDGLPREWIKRMKDCMRQIGHSMSSHRMLM

SEQ ID NO: 89709 - protein, 414 aa, Unknown
  Obtained from environmental sample
  misc_feature (1)..(414): Xaa is any amino acid
MQIKENLILDDEGRTLILRGVNLGGDSKVPFCKTGDEIYPSFLDRKMPVSFAGRPFPLEEAESHFKRLKKGGLTFLRLIVTWEAIEHEGPGIYDEAYLAYLRKILLTAENENISVFIDPHQDVWSRWSGGDGAPAWTMEKLGMDTALFDRSGAAVTRQRYGLCHNNAKYPKMIWPGNYNRYAAATMFSLFFAGNTYAPDLRSDGENIQDWLQSRYIAAFKHVQRRLKTCANITGWGSMNEPHFGFIGQKDLNAAENPMIPIGLRPTPWLTIRAASGYQVEVPVYSMISMGKRISHYETFNAEKIPLFKEGFSCPWKQAGVWDNEGGEPKLLKSNHFSLYQNRPAAFADDFLKPFIIKYINAMKEANEQNFFFIEGIPLSTRSESHPSWNKSDPDNVLNAFHWYDGLSLYTKSFR

SEQ ID NO: 89710 - protein, 424 aa, Unknown
  Obtained from environmental sample
  DOMAIN (14)...(357): AMP-binding enzyme
  misc_feature (1)..(424): Xaa is any amino acid
MIFSPEYECMDPQALRKLQLAALKNLVETLYSKVPFYRERLDAAGVTPRDIHTIADIEKLPFTTKDHLRINYPHGLRACPQDRIVEVHMSSGTTGKPVVNEYTIKDIDIWRQSMARTMAGAGCTRDDIVQNCYGYGLFTGGAGAHYGALTIGAEVLPMSSGNTERQIMVMQDFGSTLLTCTPSYALYLAEEARDAGVDLHALPLKKGCFGAEPWSENMRLQIEACYGMKAYDIYGLTEIIGPGVAFECESQNGLHVNEDMFYPEIINPDTGEPVPDGEKGELVFTTITREGTPLLRYRTRDITYLIREPCACGRSTVRMHRLFGRTDDMLIIRGVNVFPSQIENALIEIEGVEPQYLIVVSRGKDHLDELELQVEVKMELFTDEVKNLEKLRDRIEHVMKSKLQISVKVKLVEPKTIERSIGKA

SEQ ID NO: 89711 - protein, 261 aa, Unknown
  Obtained from environmental sample
  misc_feature (1)..(261): Xaa is any amino acid
VEPSPVIFETFSLASFTAGEYIVRVIAKDLADNETVVSRKIFYDPYDIDAQVAIYSPLPGQDHTGPVYVAGLVTGTALPEKVQLMLDGKEFQEIEVDRYGVFRYDISEAELGNNGPHRIYASYKTEKGRTIASASHTVYYARYGPILLIDSHRDGDVITGRPWLRGRAMFARPPRPDGRAYTRGEISQFSVIKVEVSYDNGRTFKLAMGKGDWRWRLEPSDLPPGTQPVVVRATFENGAEAVRRVLLFIDADAPQIGTVSP

SEQ ID NO: 89712 - protein, 457 aa, Unknown
  Obtained from environmental sample
  DOMAIN (138)...(171): Tetratricopeptide repeat
  misc_feature (1)..(457): Xaa is any amino acid
MSAQLNLAVKGKNAADLDKSIEEASKRFSSCGNNCGDAALQLSILYYHQKKYDKAVSALESLKDADKDIRVYRHIAIYNRELQRFDKAAAALEAAVAKFPNDLQAQYELAEAYLSSGNPAKAVKIFTALAPKWKTDVWRLHYQLGYAYMEQNELTSAKAAFEKSMAAKKDNPAARALLAFVLNRMGETDKAVDQWEKTVKEDGNNSTVHINLGLSYESKGQYDKALESYKKAQSLSPSDKAVYINLGNAYQGLGRIAEAFDAFTRGLESSKRELAAYDIFLLSRKRGDADRAEKMYALLKKEFPSSVHFARVSAEMDLARGDTAKALAAYESIKEKDAHDWFAVARISAALGQKAKAEGALAKVPDDGAWKRDKSVVRAMLAFNGGDYRGAYQAYKDAFGASGKDGGADADALAYNMVFAAYKGGMYKEALEAADEAVKKAAGGARAEICRTAGDCA

SEQ ID NO: 89713 - protein, 376 aa, Unknown
  Obtained from environmental sample
  DOMAIN (9)...(329): Aminotransferase class-V
  misc_feature (1)..(376): Xaa is any amino acid
MWRVQLHKINYDEREYQAVREVIDSGWLTISQKTYDFEAAFSTFLGHDAQCLAVSNCTAALHMALLVLGIGQGDEVITPALTFIADQNVTRMTGAENVLADIASMEDWSMDGDDIEARITSKTKAVMIVHYAGYACDMGRVAALCKERNLFLIEDCAHTPGADYKGQPLGTFGDIAAFSFFGNKNIAVGEGGMVVTRNPELFAKLKSLRSHGMTVQSFDRFKGRASSYDVESPGLNYRIHEISSALGLVQLQKLEEANAKRKEIVEHYFKRLDNVSSIAIPYRHFSRGKPNYHIMPILLSDSLDRTAIIESMKQDGVQTSIHYPAIQRFTAYRDKVNNTPKAEYVSAHELTLPLYPSMTHEETDIVCDALIKGIRN

SEQ ID NO: 89714 - protein, 82 aa, Unknown
  Obtained from environmental sample
  misc_feature (1)..(82): Xaa is any amino acid
NLPVRVPANTEAAAMGGAIQALWCLLKNTPGEVKTTIKDLAEEHVALEDGATITPDKKAVAAYNKAYAEYSRYLGALSPLYK

SEQ ID NO: 89715 - protein, 398 aa, Unknown
  Obtained from environmental sample
  DOMAIN (28)...(387): Aminotransferase class I and II
  misc_feature (1)..(398): Xaa is any amino acid
MKYDFNRVIDRSNSYSIKYEPSWRGKPDDVLPLWVADMDFAAPVCVQEALARRAQHGIFGYSEPDAAYFDVTRKWFDERFSWTVEREWMTITPGVVNALYIAVRALTKPGDGIVIQQPVYYPFESSIRKTGRRLLVNELVYSDGRYGINFEDFETKIKQAKMFILCNPHNPVGRVWKRDELERMGEIALRHGVIVIADEIHQDFVFQGRWPDQGHKHLVFADLNRDFADITVTCTSPSKTFNLAGLLCANIFISNKELREKFNREYNGCGLSQPGVMGLVACKAAYEDGAGWLEQLLDYLAGNMLFLKTYLSKHIPKIKLIEPEGTYLAWLDCNELGISANKLDETLINKGKLWLSSGLSFGKGGSGFERMNTACPHPVLQNALERLKSVDCESVERK

SEQ ID NO: 89716 - protein, 815 aa, Unknown
  Obtained from environmental sample
  DOMAIN (306)...(526): MutS domain V
  misc_feature (1)..(815): Xaa is any amino acid
MTTKDSLKEKTQVLLEYPQIMEKAANLSVSEEAASIIRNSSPVYDDSIEKIKSMVHAIFTLLKTRNDEPRLGLPSIGFLIPKIETEGAVLALDEVLAVGLFVERADEFTKWIIKDKNENREQPSEGKEALFSLLENLPVCGAVAAEIFKIIDREGNLRDLPALRAIKKRINTLEKELDKAVSGYIANEDYKRMLQSPLPSQRDGRAVLAVKVNFRGRIPGILHEVSSSGQTVFVEPLDVVDKNNEILVEKRNLDAEVQKILRELTENISVHAESLKKFHQTIIELECLRTKARYSAETKGHFALNTDTGQSLLLKQARHPMLKKAVPINIEMGSSIRTLIITGPNTGGKTVALKTLGLLAMMNQSALALPLDEGSVLPMFDGIYADIGDEQSIDQSLSTFSAHITKISAITAFATENSLVLLDELGSGTDPEEGGAIAMAVLDYLIEKNSRMIVTTHHGILKNYGYTRQSVENASVEFDAQTLSPTYKIINGLPGESRAIDIAAANGLNGVIVNSARKYIDEKKSDISGLIKGLEQKQRELIGIEHKSVIEQNRLKEEKRKADLKELRLRQKEMELKRESLGKLQVFLGESRKTLENLVRELKEGEVNREKTLKVKGFLNDLAHNAEIESAALDEEERLVREQFLKTQKGGEENDSALNSEAKSETFAPGTEVFVGASKQRGVIVRADKKSTTGNSWIVKTGSLKISFPENELVPAAPVNIKKSSSWEVEYNSGEAVFELKLLGMRLGEATEALRRQIDAAVLSGLKNFSVIHGMGTGILQKGIHDYLKNDPAVADYYFARPELGGFGRTEVVLR

SEQ ID NO: 89717 - protein, 375 aa, Unknown
  Obtained from environmental sample
  DOMAIN (26)...(190): Diacylglycerol kinase catalytic domain (presumed)
  misc_feature (1)..(375): Xaa is any amino acid
MAFEEFGSLLSEICSHSPLAADRPFFWTIIANPRAGGFTIKPRWKKHLSQLTEYAGKAAKNPAGKICGPSETARYLGDSGAECGLLFTKAPGHAKQITDALIDEASKASGSGGKRPLHLIIAAGGDGTSLEVMTSLSRIDEKQREDFAVLRLPMGTANDGADSFDLGEALNLIVEPPALQKQRAVRLKTASGKGPFHAFNILSVGLDAFVTNMTNKMKDKLPGDSYKLWVDIAALLYDKIYKVGVMDVHSFDEQGNEIQTLEEKLLLIAMGESGRRCYGSQQWILPDDRNVCAIKQMPLYKKLALKGLLSSGNHAGRDEAIFWNAARIEFQSQYPLLAQMDGEAVLLKENDFPAVIELTEPLINILGKKDRRPWA

SEQ ID NO: 89718 - protein, 127 aa, Unknown
  Obtained from environmental sample
  DOMAIN (8)...(122): Response regulator receiver domain
  misc_feature (1)..(127): Xaa is any amino acid
MDDNSGNKKILLVDDNEVQLSISEVQLNKEYEVTTAKSGKEALDYLFHGYVPDLIMLDILMPDMDGWETFGRLRAISKLHEVPILFMSSINDKNEIDRAFDMGAVDFIIKPCNSTELLERVKKAVKK

SEQ ID NO: 89719 - protein, 435 aa, Unknown
  Obtained from environmental sample
  misc_feature (1)..(435): Xaa is any amino acid
MPPGTSVFLVTRTAPRVNLAGMIYRDQIFDISENDLRFTESELAQYFHSRNNYIQPESLREIMRDTGGWAFAINLIARSYQKAPGYGGYLQSAMKTNIFQLIETEIWDEISERLQSFLVRLSLIDHLSVDLIFLLAEEDETLIAELDRQNALVRRDSYVNAYLIHPLFLEFLRKRQGLLSEDQREKTYAIAGDWCSKNGFRIDALSYFEKIKDYKSIIFILFGLPAQIPDEISRYAASIFDRAPAEDFDKVEFLAEMHLRTYMCQGNWQKSLELVEYYEKKFLKLPEENLVARRTLARLYVCWAYIRALVGLTDDVYDFDIYMAKACKIISPSIDPGKFGPHCPGAWMNCVGVSRKGAPEDYIAALERNQVNISPSYISGYMAGEAELACGELAFYRGDAAAAIPHVTLALKKSRDKKQPGLIHRALYCALRIAA

SEQ ID NO: 89720 - protein, 98 aa, Unknown
  Obtained from environmental sample
  misc_feature (1)..(98): Xaa is any amino acid
LRIIKGDASILLLVVIFLLLAFGVVFSVMAFRSNPVEDAFSDNRVVNTLFVIEDHKMPISTYVLMYYPVTKRAAIFDIPENLGLLIAKINRVDRIDRV

SEQ ID NO: 89721 - protein, 324 aa, Unknown
  Obtained from environmental sample
  DOMAIN (152)...(267): HD domain
  misc_feature (1)..(324): Xaa is any amino acid
VDTIEDITARYLPDGKPALIIGDDLAADFPKWRDSIKILELADIVIVRRKNPVSGNSQAVYPFAHTLLDNEIMDISSQMIRDKIKTDQDWRSLVPAGARAIIEDRRLYGYKGSGLYSNIKFSNIKFGDEKDCTREVIIRIEEEARRVLTIERFLHSRNTALLAHDLCLRFGIDPKAGYLAGIAHDLAKQTEPKLLIKMVKDDGLPVTDIEKGKPNLLHGRAAAVLLKERFCIHNKDVLEAVAFHTSGKENMSPLAKVVYIADKTEPSRMIEPALRKMCREDTLDNILIAVIEKTIIKLRAKGQDLSQDTVLLLNKIRKGKIENN

SEQ ID NO: 89722 - protein, 84 aa, Unknown
  Obtained from environmental sample
  DOMAIN (2)...(81): Ribosomal L27 protein
  misc_feature (1)..(84): Xaa is any amino acid
MARKRGGSGAKNGRDSNPKYLGIKSADGTFVKAGTIIARQRGTKIHPGTNVGCGGDFTLFALADGKVTFHQRRGRKLASIVNEG

SEQ ID NO: 89723 - protein, 464 aa, Unknown
  Obtained from environmental sample
  DOMAIN (146)...(329): Trypsin
  misc_feature (1)..(464): Xaa is any amino acid
LERVAQYENEAIKNLCLMQEKAIEQNKWEEAISLGRSISSIGIKTANTGMESAFLLADAKKKLSENNTLGAFLSAVKSHELRPLDLGSAMLFLEKAVEIKQRRTASFFLSAAESAGGRNIPAKLREYALGRDNPAEMIKGVATVLVDRGVRIERGMGIPDRVLGSAFFVDASGFLITNYHVIASEVDPKYKGYSRMYIRMGDSTSSRIPARVIGWDKAMDLALIKTEIECEYVFSVVDRVIPRVGDTVLAMGSPVGLEKTVTSGIVSALGRRLLQIGDVIQIDAAVNHGNSGGPVVDNEGRLVGIVYAGVDQHQGLNFAVPAETLTAALPAMIKGGKSQRPWLGMTLCETYSEAEIIYTAPNTPAAYHKVREGVFIKTVNGKPVIAPNGGVISALQNMIFTCGPEELVVLETIDKNTEEVKKKVMMTVPRPDLPLLDAAKIDKRDRIAAPLFGMLLTPLQNTVF

SEQ ID NO: 89724 - protein, 488 aa, Unknown
  Obtained from environmental sample
  DOMAIN (313)...(401): Hpt domain
  misc_feature (1)..(488): Xaa is any amino acid
ETFLLRYSATNCALNKFLTTFYPTAFKYTESGKVSLSISKEPSDKESTISLAFSVKDTGQGMTREQLDKLFDEYTRFNLEANRSTEGAGLGMNITRRLVELMEGEISVESEQGKGSTFTVRLPQGVVDEGILGKAIVENLMRFRLGKMSQIKKTPQVVREYMPYGKVLIVDDVETNLYVAKGLMSPYGLTIDTAGSGFEAITKIKSGETYDIIFMDHFMPKMDGIEATKNLRELGYTQPIVALTANALTGQTEVFMANGFDGFISKPIDIHQLNAMLNKLVRDKRPPEEIEAVRQSNSSTALTAEQQQIANAELIKVFLRDAEKTVALLETIQRNNYRRADDTQMYIINVHAMKSALANIGEVELSAAAAKLEDAGRDQNIAEISNDTPGFISALRAVIQKINPNKDSDNKADIIISEEERAGLLEKLFVIQKASIEFDKKTVKKTLSQIKEKTWPFTVNKLLESISEHLLHSEFIKIANLIDNYKNS

SEQ ID NO: 89725 - protein, 121 aa, Unknown
  Obtained from environmental sample
  DOMAIN (1)...(121): Phosphoribosyltransferase
  misc_feature (1)..(121): Xaa is any amino acid
LTNIKTAMEYHLNSLTKPLGSLGSLESYCVKVAQIQKRVPPNIEKKGVYVFAGDHGVAAEGVSLYPQEVTRQMALNILTGGAGINALAGGTGWEVILVDSGICGDDFPADSEIKPVCRFMR

SEQ ID NO: 89726 - protein, 295 aa, Unknown
  Obtained from environmental sample
  misc_feature (1)..(295): Xaa is any amino acid
VGQTGPNQTPTAADYDISTNLIQTAGSVTPVTVTPKPGKSSGARTVKYNDSTTVPQEVGSYTVTFDVAAATGWDAANGLPAGTLVVNNLKTPVLDDYTIIGTWTQTAGSVTAVTVTKKDETKSPGAVTVKYNDSTTVPQTEGTYAVTFDVAAVAGSWNPATGLIAGTLFVDNPPKNFVSGADALSWGISSSASVLTLGLTPGKDTTEINLNWYSTGTSAGKVAKVRFSRGTFVAGTELIEKDDGEAKDAGTYTQHKATVTGLKPGASYEYAVSSDGTNWSDPYNFKVPAAGRFQF

SEQ ID NO: 89727 - protein, 353 aa, Unknown
  Obtained from environmental sample
  misc_feature (1)..(353): Xaa is any amino acid
IADWLVYQGFQTDIANSQASIQTAEEQILRSKELDQNIDAAERQESDNAKELAVAYSRLGNLLLDENSGQYAAFCAPYRDQNEALLDKVSSLGERLDELEKKEGGNVFTWIGKGAQGLVLRSFMTKAQENLEQLRKNVGESYSRKCKSSEDGGGVPAENSGIEALCAEIEGKRAYSNTLSSDIAVLKEERRKINNSFSAEGGPVKHINTIRSHIVNVQNDLKALYRRMGAECASIEQKDAARGGAERNPAERNSAERNPAERRQTLDSFLLPQDAEVMESASRIDRTIHDCEEEVKKLEASLAIDDEKAKIDKLRKMIQEKRDKITKAEQDIAEYEEGIRDSEGFIQKLQNLL

SEQ ID NO: 89728 - protein, 643 aa, Unknown
  Obtained from environmental sample
  DOMAIN (571)...(635): DNA gyrase B subunit, carboxyl terminus
  misc_feature (1)..(643): Xaa is any amino acid
MAVKAKKTGKQSPTKVVAKKGKEKISGAPATAGAESAPGVYDESKIKTLSSLEHIRLRTGMYIGRLGDGSNPDDGIYVLLKEVIDNGIDEFIMGNGKNIEVAIKDGAKQGAASVKVRDYGRGIPLGKLVECVSVINTGAKYNDDVFQFSVGLNGVGTKAVNALSSHFRVVAVRDGEFAEAVFQRGDLVSERKGRLKEKQKNGTYVEFTPDAEIFGTYEFYPEFVEKRILNYAYLNAGLTLSYNGKPYVSKRGLFDLLSEETGDDCIYPMGYYKGEHIEFAFTHTNNYGEEYFSFVNGQFTSDGGTHLSAFKEGFLKGIQAYFKKDYRSEDIREGTAAAVAVKLKNPVFESQTKNKLGNSDIRSWIVQEVKDATEDWLHKNIEAAKKLERKILANESLRTELNQVKKEAREAAKKIALKIPKLKDCKYHLEDGEEGELSTIFITEGDSAAGSMVSSRDVMTQAIFALRGKVENVFGKKRAAIYKNEELYNMMMALGIENDVSGLRYARIVIATDADFDGFHIRNLLLTFFLSYFEELVTSGRIYILETPLFRVRNKKETSYCYNADERDTAVYALGSQAEVTRFKGLGEINPKEFGQFIGEDMRLVPVSVSTLKTVPQVLNFYMGKNTPERREYIMKNLIEDAG

SEQ ID NO: 89729 - protein, 102 aa, Unknown
  Obtained from environmental sample
  misc_feature (1)..(102): Xaa is any amino acid
VWTGFYYSDTLKIAILKTSLAGNRQFYKNTLTIGFPIALQNLLVTSASMVDTVMIGTEGELAVAAVGVCALFSMLLFSAYFGFCNGGMIFFAQYWGAKDENG

SEQ ID NO: 89730 - protein, 445 aa, Unknown
  Obtained from environmental sample
  DOMAIN (90)...(231): Histidine kinase-, DNA gyrase B-, and HSP90-like ATPase
  misc_feature (1)..(445): Xaa is any amino acid
MAVKTKKTVKQSPVKGGVAGKGILARGIAKSGDAKGRVKETPRAVATKGNIAAKGSPGVYDESKVKTLSSLEHIRARTGMYIGRLGDGSNPDDGIYVLLKEVIDNGIDEFIMGNGKNIEVAIKDGDKPGAASVKVRDYGRGIPLGKLVECVSVINTGAKFNDEVFQFSVGLNGVGTKAVNALSVYFRVVAMRNGEFAEAIFERGKLKSERKGKLKDKQKDGTYVEFTPDPDIFKDYQFNVEFIEKRMQNYAYLNAGLTLSFNGKHFVSKRGLYDLLCEETGDDCLYPLGYYKGEHSPNGQLEFAFTHTNNYGEEYFSFVNGQFTSDGGTHLSAFKEGFLKGIQTYFKKDYRSEDIREGTASAIAIKLKNPVFESQTKNKLGNSDIRAWVVQETRNAVEDWLHKNPEAGKKLEQKIISNESLRTELNAVKKEAREAAKKIALKIPS

SEQ ID NO: 89731 - protein, 271 aa, Unknown
  Obtained from environmental sample
  misc_feature (1)..(271): Xaa is any amino acid
MLAELCRRAEENAGFLREYRDIVIETAEFMKSFIHPEPLPGAQTAGADAKEQSSDRYRYVLGPPYIPAQERHDPNKVLNASFELEYFRLGFRIADEWLQRLGEQTRYGKIAEMLTLPSIKDGVYLAHENCPDTFSKLPFYTDHPSMLAMYGVLNSDKTDNAIMSATLDKVLSVWDKKTFYGWDFPMMAMTACRLGRYKDAIDILLMESPKNTWLENGHNKMTGDDALPLYLPGNGGLLLAVAMLAVGYGEKKGASFPDGFAVTTEGIIPYI

SEQ ID NO: 89732 - protein, 306 aa, Unknown
  Obtained from environmental sample
  DOMAIN (268)...(291): 4Fe-4S binding domain
  misc_feature (1)..(306): Xaa is any amino acid
KILGKRSGHVQVAGENSPDSAIKVIGEFLNIESEKTENKTVQVKLPPLPVRPPVLCAGCPHRASFFAVKEAAKGRKAVFTGDIGCYTLGNAMPLDMVDTCLCMGAGITVAQGLKRVEPDAVHFAFIGDSTFFHAGITGVINAVYNQTDIIVVVLDNSTTAMTGNQPHPGTGVTMMKTQTGKMDIEKIAKAFNVSGVVRVNPFDQKAAKDAVRSLMEQKGVRVILFEAPCVVVSKPAGRSLVNADKCTGCQLCIKKLGCPALGLENGKALVNSGLCAGCGLCASVCAANAVCSAEAVCKTDVQAGEK

SEQ ID NO: 89733 - protein, 294 aa, Unknown
  Obtained from environmental sample
  DOMAIN (2)...(267): PHP domain
  misc_feature (1)..(294): Xaa is any amino acid
VVDLHTHSNASDGDFSPAQLIREAKKKGISVLALTDHDTLGGLKEAQNEADAIGVRFIPGIEISINWKRNEGVCGLGPGGEMHLLGLGIKAPSPAFLAGIAELSRRREERNLIILDNMNALGIEASLDDILAEADSSANHNGRFSIGRPHFASFLVKRKIVRNRDQAFRRYLKPGKPLYAPKAGLPFGQAVAIIRESGGIPVLAHPMSLYVAWGCLPDLVKVLKKQGLMGIEAWHPIAKANACRRLEEMGRSLGLYITEGSDFHGTTRLGRHLGLSNKGREISEAVLEAIPELL

SEQ ID NO: 89734 - protein, 363 aa, Unknown
  Obtained from environmental sample
  DOMAIN (45)...(319): Amidohydrolase family
  misc_feature (1)..(363): Xaa is any amino acid
LEYTLTGGILVSHGRKTRTGSLSVKDEHIVSSQGQVSVDLKGKSYIYPSLINTHDHLQGNYRPPVGPKAGNYYLTWQPWDNDLKASELFKERSNLSREDLYALSGYKCLFSGVTTVNDHFPQKINSEILPTLPIRAFLEYGLAHECSSYDLKWGDGIEIEHERAVKNKWPFITHLCEGFDEEAMHGIQTLEKLNVLDSHCLLVHCIAFSDADIKTVAKAGASVSWCGFSNMSMFNVTAKIRKMIKAGVNVTIGTDSSASGSANLLAELKYDRELYRSMYGEDLPAKKMFEMVTYNAAKAFWMEDRIGTLDEGKLGDILILKARHDDPYENLVNASMKDIELLVLAGAPIYGETRFTDIFGGVL

SEQ ID NO: 89735 - protein, 207 aa, Unknown
  Obtained from environmental sample
  misc_feature (1)..(207): Xaa is any amino acid
MNWDWDKLQEKRQRQPRPGGGGREPLPGGGDNEPPRRRDMGGLPPDPLRKVREFVTPGGKTLWWLAGGVCVLWLLSGIYIVEPDEEGVVLRFGEYNRSVPPGPHYRMPFPIESVDTPKVTQVQRVEVGFRSLAKTGGQTQVRAVPEEAYTLTGDENIVNVQFSVQYRIRDAVEYLFRVTNQASVVQSAAEAAMREVIGTSEIDSALT

SEQ ID NO: 89736 - protein, 177 aa, Unknown
  Obtained from environmental sample
  misc_feature (1)..(177): Xaa is any amino acid
MKINYCEKNEITNFREICIGNIKNGIIYRGSYPIFRIDKKRDEIYNELVFDASINCIINLAGNLNEIKRIASLVPWYSKLLKSNNVIGLNIQFDFNFSDKYEYDKFNCKLRKGFKFLIKHDGPYLVHCNAGIDRTGFVAAIIELLFGASIDEVIYDYLLSYGKGFANAKNKEINFIT

SEQ ID NO: 89737 - protein, 169 aa, Unknown
  Obtained from environmental sample
  misc_feature (1)..(169): Xaa is any amino acid
MAYRFMKANQGRYAIKEMAMLFGVSRSAYYLWARNGASQRRKATDAELVRLILEIVAKHHRRYGSPRVRRELRDAYGKRVSLKKVARLMRENGLNARRGRKHIPTTDSNHTFTVYENILSREFYAESGGVKWVSDITYLRTENGWVYLTVVLDLYDRKIIGWALSLGME

SEQ ID NO: 89738 - protein, 491 aa, Unknown
  Obtained from environmental sample
  misc_feature (1)..(491): Xaa is any amino acid
MTRLYSTRAKNQGFINVISENYLLRAYMVDKDNAQIFSADPKAIPSFVPDHIRTERNTVIALIMRMYKGKVSEAELKYKLTLAGIKYDDDKAYEKFCELVKKHCNVENIDLVTAYRDEDGALCLSIHDNDSKIESYARALSNAYFIIEDDKDKKNYLGAMLYGHVFQKYLPGQMLAYSGKYYQVQTITTESGVVLRRAADHITGRKIYRQRRKYMLFGFSPDPAMGSCRTSRGIEVRRGFCDEISVKTYGYYELASLDNLAYAHQVDVNNIPRRDYKNKAVLCVKLLDISEDVRFTIALLLNEIFITLYPESYHYITAVIKMKSDTESNISALLSPVQLQGFDDEESIYIIEDSEIDLGLLVSVERNFIRMLEIIADFLAWHGMVLAENKDKGQTEPKDEVKGTVDKVEEKSEEVKTTEEKKEEANTVEDKAEEKIIEEKEKEEKISAEPVKETVSDTKNEPDVTAVEPIVEDNNTDLSPPETEELYDERD

SEQ ID NO: 89739 - protein, 71 aa, Unknown
  Obtained from environmental sample
  misc_feature (1)..(71): Xaa is any amino acid
MSGNVWEWCWDWYGAYSSDAQTDPVGPSAGGDRVLRGGSWYYDASIARSVVRVDYYPGNGDNDNGFRLVRP

SEQ ID NO: 89740 - protein, 407 aa, Unknown
  Obtained from environmental sample
  DOMAIN (28)...(144): HD domain
  misc_feature (1)..(407): Xaa is any amino acid
MVKVRMDSLIKSIATALDIVEGELIGTSTNHGKRIAVLCAKMGKALGKNTEEITALTVCALLHDSALTEYILSERMDGDSDTAMKKHCEIGQRNVDALCFKTNVKNFVLYHHEHADGAGPFGIREGEGPLEAELITIADSLDAKYHLQRLTQEELPGIRDIIVNETGKHYSKKAAQTMLEILDWTAVLSLKDDVIKQTAIDSMSPWTVDVQTETVLGLAAFVARIIDYKSVFTQKHSTQIANKAWFMGKHYKYGPQELAEVYLAASLHDLGKLTIPSDILEKPGKLTSEEFDIIKDHVKLTWELLSDIEGFETICRWACNHHEKLDGSGYPFGRKADELDFNSRLLANLDLYQAISEERPYHPGRNHADTMKILYEMAGTGKIDGDIVNDLNIVLAPYDGKDLPPPD

SEQ ID NO: 89741 - protein, 605 aa, Unknown
  Obtained from environmental sample
  DOMAIN (374)...(486): Pyruvate kinase, alpha/beta domain
  misc_feature (1)..(605): Xaa is any amino acid
MNIRNRKTKIVCSLGPSSSEDSVIRDLILAGMNVARLNFSHGDNNTHRASVEKVRRISGELGIPVALLLDTKGPEIRTGIVQNDGKITINKGDHVIVSTDDCFTTAAENGSPAHISLSWKEAGARLQCGHRILIADGLLELEVIDTAGGIKCCANNTAVIGSKKNVNLIGVHANLPIIGDKDKQDIEFGIEMDIDYIAASFLSFPHEVTDIKKFLESHSSHIKIIAKIESGEGLENIKEIARLADGVMVARGDLGVQLPPEQIPLAQKHIINECRWAGKPVITATQMLDSMIHNPRPTRAELTDVANAVLDGTDAIMLSGETAQGLYPVEAVKTMDTIACTIEQSEEFRKRMKKLHDECHSEVHNPKENLGIIMSRAGVETATSVNAKAIVTPTRSGNTARILSIFKPNEPILAVTTDERSERIMQLYWGVIPCITTKVGDSDSMIRNTMKLVSETGAAGISEKIVLIAGLPLESPNMINTVRVIIIGTVLARSNAGGYANPDLTRAHGRIIHTANPDEAGKKVMSSGQEGILVCKVLTDEYTPVIRMVKGIICEGVSEISEQKLRQINPNLVWLTHIRDAAKKLEAGLTVTIDGKELLVYEGTI

SEQ ID NO: 89742 - protein, 523 aa, Unknown
  Obtained from environmental sample
  DOMAIN (9)...(471): RecF/RecN/SMC N terminal domain
  misc_feature (1)..(523): Xaa is any amino acid
MIRSGCEDAEVSGSLDIENIHHKLREFLREAGIDAEDGGLIIRRSISKSGKNKIHVNQIPLPLSTLKTLGDLLIDLHGQHDHQSLLNEETHADIVDTLPEASAAKVGYISSYNAYTAAAQELRDAQRAARELTDKKDMLEFQYKELSALNPQRGEETALEQELSLLSTAAERSECVNDILTLLGSNDTGTASGGESIQKRLAQINRKLETLCKHDPSAAPYINEIESAMSICADLDMFCSRYLETTDGATGGENKIEEINSRLAKIQRLKKKYSCTVDELIDKREQLEKDLSLLNNTDADMELLEKKAAKARKECVDAAAVLTSSRKKALHTFDKEVTRRMELLGFTGGSLTTEIAPLSEPGPNGMDAIRFLVRTNPGEPFLPLAKTASGGEASRLMLAVKSILAEHDEIPVLIFDEIDTGIGGVLAGEVAKALYSLSSTHQVLCISHLHQIASAADNHYLVAKRVDGGRTITEVKRLDGERRTLEIARMLGGAGSEVVLKHAEELLKSNNKNRGFRNDGGKV

SEQ ID NO: 89743 - protein, 127 aa, Unknown
  Obtained from environmental sample
  DOMAIN (1)...(126): Putative undecaprenyl diphosphate synthase
  misc_feature (1)..(127): Xaa is any amino acid
MPDGIRTDALALQEATSAAGRMVFHLAVNYGSRMELVMAARVCLEDGLSAADVDEAAINARLWTAGVPDVDLLIRTSGEQRISNFLLWQCAYAEFYFADAHWPDFDAEQFRLALAAFATRERRFGGV

SEQ ID NO: 89744 - protein, 453 aa, Unknown
  Obtained from environmental sample
  DOMAIN (8)...(111): DnaB-like helicase N terminal domain
  misc_feature (1)..(453): Xaa is any amino acid
MAKLRENVPPHDDELERAALGSLLADSQAIDAVRQNHLRQEDFYSRAHQRIFETISALDIHNLTPDIQTVIQELKQNGKLDEAGGAAYVASLTSVVPSSANIEYYIESVLDHSLRRSLLRVASDIGVTAYDESMESHEILDKVEESIYKLRDERQAFPYKKLSEVLLPTFDKIEEVYRTKNALTGIPSGFEKLDEMTTGFQPADFIIIGARPSVGKTALALNMAAHIAFKNNIPIAFFSLEMTDMSLAQRLISSAAQVDGNKMRSGHITSDDFRRIRDTLGIFCDAPFYIVEIPNKELHELRSQARKLRSKEGVQIIFVDYIGLIVHENSKLPRHEQIGEISRSLKGLARELDIPIVALCQLNRDMEKTGHGQQPTLANLRDSGSIEQDADLVMFLHRKPPSKDKKGAEEEPVTNIEGIPTELIIAKQRNGPVGFIDLMLQAKYTRLSPGKRS

SEQ ID NO: 89745 - protein, 400 aa, Unknown
  Obtained from environmental sample
  DOMAIN (189)...(289): 5'-3' exonuclease, C-terminal SAM fold
  misc_feature (1)..(400): Xaa is any amino acid
GRLRFNLPLLFRVFTNPLRNSSGKNVSALFGFSRTVISLLEDGAPLADKEGKLKNKLEKPLRLAAVFDSRTPTFRHQMYPEYKANRQKAPDDLHEQVPLVEEFLSALGIKSIKIEGFEADDIIAALAEKCRSEKRQCYILSSDKDLLQLVGGGIYELRPSKINRSGGASGSEPAWELIGPEEVKTEWGVEPEKVLDLLSLTGDSSDNVPGVKGIGEKTAVKLMARYGSLDEIYKNIAAIEGATGKKMAEGKESAYFSQSLIRLRDDVTLPVTSIDEFSTESLNRNAGASVLMREGIRKSAKQLDPSVKPVSLGEQNNNSQPVDNTDMNTPDETQVTEAATFVSAAADQNLLGDGTYKTILELEELSSLLEKAKKQKFLAIDFETDSLDAWNSHPVGISLA

SEQ ID NO: 89746 - protein, 547 aa, Unknown
  Obtained from environmental sample
  DOMAIN (207)...(515): Aldehyde ferredoxin oxidoreductase, domains 2 & 3
  misc_feature (1)..(547): Xaa is any amino acid
LPLYARIDLSTGKTEDFPISEEYFKKFVGGKTIAAKLLLDLMPPGLDPFDPKAMIIINTGPLNGTGAPSSSRFNMTFKNVLTGGIASSNCGGNFGFMLKRAGYDGLIISGKASSPSRIEIIDGKISILSAQELWGLDTEKTQEELPTHHGKLVIGPAGENLVRYASATSGERVAGRCGGGAVFGSKNLKALSAYGTRLPRLHNPKKFKRFLKKWIAFLRNHPMTGDALPHYGSMGLMNKANASYALPTHNFKYGFSDTADNVSGETLAETLLVRNSGCVSCPIRCERRVIKEGREIKGPEYETAGFFGPNMDASTMEDVIDLNYTCDLLGMDTISAASSIAFAMELKERGMADFGVEFGNVKNLDELLHKIARREGGVDGKDPPSDLAEGSKRMSEKYGGAEFAMNAKGLEMASYEPRRSVGMGLGYAVSNRGGCHLNGGYLALLESVGVISADAQDPRGKAELTVFMQDALEAVSAGGFCLFSAQTFIPSIFFNLGPNHFVTRLVGKVLTRAGMAVRLMLAAKPLLHFNSFFLLPHAEAIRLAPDS

SEQ ID NO: 89747 - protein, 166 aa, Unknown
  Obtained from environmental sample
  misc_feature (1)..(166): Xaa is any amino acid
LIFNLKNTWAAQSPYERFFDFIAPEADRFAVLLDHIQKMGLNSLVISIEDNRHFFIFPKGINLKLSSGSAFPFNGESPTVLTAHYDRVPGSPGANDNSAAVFQLLKTALKLDELDLGDWIIIFTDKEELQSGEGFMEQGSYSLAKKLRQMGLINAQIFNFDACGTG

SEQ ID NO: 89748 - protein, 93 aa, Unknown
  Obtained from environmental sample
  misc_feature (1)..(93): Xaa is any amino acid
MEAIMIKNFLRKIRKFWLKPLLLSTSVCRRNDQEYENIRKFNDPLHLDRFGYKVYSKDDEDGIIQEIFKRIGTTNKIFVEFGVQDGVESNCHY

SEQ ID NO: 89749 - protein, 589 aa, Unknown
  Obtained from environmental sample
  DOMAIN (110)...(167): Threonyl and Alanyl tRNA synthetase second additional domain
  misc_feature (1)..(589): Xaa is any amino acid
MSENKQQSEKLAMIRHSVSHVMAQAVVSLFPGTKVAIGPSIENGFYYDFLLPRPVSADELVTIEAEMKRIIDSKQDFAAITVSREEALRVFAAEEFKTELINDLPGDAEITIYENRDANGKALWADLCRGPHVANTREINSAAFKLQSVAGAYWRGDEKRAMLTRIYGTAWETPKDLKAYLAFLEEVEKRDHRRLGKELDLYSVHEEAGAGLIYWHPNGGRIRVAIEDFWRKEHYRNGYEILFTPHIGKSWLWETSGHLGFYKGNMYSPMQIDNQDYIIKPMNCPFHIMIYKTKGRSYRDLPLRWAELGTVYRYERSGVLHGLLRVRGFTQDDAHIFCTPEQMEDEIREVLRFSLWIWKQFGFKEIKAYLATKPAESVGEQSRWDAALESLRRAINAEGLGYEIDEGGGAFYGPKIDLKIKDALGREWQMTTIQFDFNEPERFDMTFVDADGKQKRPYMIHRALLGSLERFFGVLIEHFGGAFPVWIAPEHIAVIPVSESYNEYAKKISTELRDQDLRVTTELGDGRLNAKIRDCQNRKIPYMLVVGEREEKEGTVSVRFRDGKQIPSMKFEEFISYAVKKAKSRDLEL

SEQ ID NO: 89750 - protein, 128 aa, Unknown
  Obtained from environmental sample
  misc_feature (1)..(128): Xaa is any amino acid
MHNDNLPELLSPKVDVIFKLLFGDERYKDLTISFISAVLGYKDGELEDISFYDTHLKRENPNDKLGVLDIKAKLSNGSVIDVEMQSRNVSDMKSRISYYRSNLLTEQIGTGDPYSKLKPAKSIIVADF

SEQ ID NO: 89751 - protein, 439 aa, Unknown
  Obtained from environmental sample
  DOMAIN (55)...(429): Aminotransferase class I and II
  misc_feature (1)..(439): Xaa is any amino acid
MQHYFNMNPLATELNEILEETVAGRLFSNLGKRLYFPKGIIAQSAEAKKSASMANGTIGMAYKNGKPLILSAIADNMAAFTPEEAVAYAPTAGIEKARTAWRDQMIQKNPSLDPEKISLPAVIAGLTAGLSCTADLFIGKGSNLIASDPCWDNYSLIFETRRQAHLVPVQFLGQGPGQGLDMEAISAAVRQEAKSGAVRIIFNFPNNPSGYSATMQEAQTLVSLLKETAENGADVLVICDDAYFGLFYEDDISKESLFAKFANLHERVLAIKLDGPTKEDYVWGLRMGFLTFGSKGLNQTHYDALVKKLMGAIRSSVSCSNTSAQHLMLKAMEDSRTPKEKAAFRDMLRRRYNLVKDFLKLNPNHPVLEPMPFNSGYFMSFRCKTDAEAIRQELLQKHGIGVISLGKQCLRVAFSSIDEEKIPAVYGQIYKTAAELGNN

SEQ ID NO: 89752 - protein, 135 aa, Unknown
  Obtained from environmental sample
  misc_feature (1)..(135): Xaa is any amino acid
MEARQTVNSPSFETVWAALQEVTTMQKESARRQEETDRQMKETDKRLEKLSNRMGEVVKHIVAPNLRKKFRELGLNFPKANTNSDISDYDNKIFLEIDVQLENDDKAMLVEVKSKLTAEDVKDHIKLLKKCAYMP

SEQ ID NO: 89753 - protein, 208 aa, Unknown
  Obtained from environmental sample
  DOMAIN (2)...(143): Methyl-accepting chemotaxis protein (MCP) signaling domain
  misc_feature (1)..(208): Xaa is any amino acid
MNSIASQTNLLSMNAAIEAAHAGEAGMGFAVVADEIRKLAETSGKQSKTTASMLKKIKSSIDNITKSSNEVLERFGTIASGVNTVSEHEQNILHAMEEQEIGGKQILESIGRLRDITASVKKGSDDMEESGETLVKETDAFIKTSKETVEGMNEILSGINQINVSVTHVNEMSLENNRNFESLKQETEKFNDRTGSEKKKILMVDDDT

SEQ ID NO: 89754 - protein, 239 aa, Unknown
  Obtained from environmental sample
  DOMAIN (71)...(140): HAMP domain
  misc_feature (1)..(239): Xaa is any amino acid
HRIIHAKAEEIINHVKIGERDTAVKKFTEELLPTLKEFIVNLEKIETRYGVLLNDIIIENNRLGEISERIIVIVLLIAIIVSVLLALIITSTITKPIVKVADVLKIVAEGDLTRSVNVESKDEIGDLAHDFNSTMGKIRNLVSSIKYKINGLNHTSFELSVNMGKTSTAVEQITSNLDNMKNTMIKQEDGAEEAGKAVEIIKENIDSLKKIIQEQTESVDRSSSAIEEMTANINSVTRR

SEQ ID NO: 89755 - protein, 125 aa, Unknown
  Obtained from environmental sample
  DOMAIN (22)...(125): Response regulator receiver domain
  misc_feature (1)..(125): Xaa is any amino acid
MAIRHSIDLNSPCIARLWLPGCKVLVVDDLPANLQVTRGLLAPYGLQVYTAASGREAVEMVKTNDYNLILMDHMMPEMDGIQTAAVIRTIDGYAHTPIVALTANALKGMKELYLENGFQDYLSKP

SEQ ID NO: 89756 - protein, 119 aa, Unknown
  Obtained from environmental sample
  DOMAIN (5)...(119): DeoC/LacD family aldolase
  misc_feature (1)..(119): Xaa is any amino acid
MTDQEIFSCIDHTLLKAVSSWEEIKILCDEALRFKTASVCVPPSYVKPIQNTYGTAINICTVIGFPLGYNITAVKNLEAERAVFSGANEIDMVINIGDVKNGNFDYVLEEIKILKKTCG

SEQ ID NO: 89757 - protein, 107 aa, Unknown
  Obtained from environmental sample
  misc_feature (1)..(107): Xaa is any amino acid
MATVRMDSLIRSISTALDIVEGELVGASTNHGKRIAVLCAKMGKLLGKNTEEITALAVCALLHDSALTEYILSEKSDGNQELAMKKHCEIGQRNVDALCFNTNVRGF

SEQ ID NO: 89758 - protein, 91 aa, Unknown
  Obtained from environmental sample
  misc_feature (1)..(91): Xaa is any amino acid
VKKHFGPETAERLGLITKIINGIDEFIHTNIDTAYHSAAESQSIQLSALIHPTRLAVSGVSAGPGLFEMMEVIGKDVVLRRIDKAVKWIGR

SEQ ID NO: 89759 - protein, 428 aa, Unknown
  Obtained from environmental sample
  DOMAIN (5)...(414): EPSP synthase (3-phosphoshikimate 1-carboxyvinyltransferase)
  misc_feature (1)..(428): Xaa is any amino acid
VDVKIFPAQLNGAVNAIPSKSQAHRALICAALADKPTRVECNGESEDILATAACLSALGAGIERESGTYVVRPLNRGREGNGDIATLPCGESGSTFRFMLPIVCALGRKVCFTRKGRLPERPLSPLYEELVSHGAELSPQGSVPFYADGRLTPGRYSLDAGVSSQFISGLLFALPLLDGDSELSLTGNMESFPYIELTMAMLKEFGVKADFSGGAFSIPGGQTYRSSGVMHVDGDWSNAAFWLGAGAIGSCGVTCAALNLQSRQGDRAILDLLARFGARVEGNGSAVTVSGGKLQGMEIDARDIPDLVPILAVIAAAADGTTVIRNAGRLRTKESDRLAAVSAMLRGLGADVSETEDGLIIHGGAAFKGGEVLSYGDHRIAMAAAIAATVCARPVVIRGAQAVNKSYPGFFDDLRLLGGSVDAVSNEE

SEQ ID NO: 89760 - protein, 335 aa, Unknown
  Obtained from environmental sample
  DOMAIN (1)...(300): 3-dehydroquinate synthase
  misc_feature (1)..(335): Xaa is any amino acid
GGGLLSQAGGMIAAACGGESAALVTDDVVNGLYGDTVEQSLRAAGYEVTRFVFPHGERSKNTDNYVSLLCALAEANLTRSDIVVALGGGVVGDLAGFAAATYLRGIPFAQIPTTLLSMVDSSVGGKTAVDLPAGKNQVGAFYQPDIVLCDVDTLRTLTAEVFRDGCAEMIKHGVILSAELFELLKEPIQQRMEEVIARNITIKRDIVAADEKETGIRQILNFGHTIGHGIEKHSNYGVTHGKAVAIGMVIASRGAARMGLCREDCHTEIVDAVRRYQLPIETDITPESLIEAAFFDKKRSGQRITLILPERIGKCVAKSFSMDELANFIRLGMSK

SEQ ID NO: 89761 - protein, 295 aa, Unknown
  Obtained from environmental sample
  misc_feature (1)..(295): Xaa is any amino acid
MGVLLSQKISTYYERFKDIDVTFTKDMIQITGLLTQEIHLKCGNDFFPCVVYTTSFSGAKVVANVKTGLLAKLQTTNNFVSLRLCFREPGETNTVTFFVSARVTANAPYGNSQDVNMFTIQFSNRPPDDFIEIIGRILDANVNSKKRKDDRVPLTPDNLRKLNMTSTETVVFIENVPRRCILRDLSFSGSKVIMLGVPKFLLDKEGSLRLDFNDPRMSYTIKGKFIRAEAVEGKKEMVALGINFEENSVPMGFKIRLNDMITSVRADLITGAEAHAAPAPAPAAHAPAAQRSEPK

SEQ ID NO: 89762 - protein, 666 aa, Unknown
  Obtained from environmental sample
  DOMAIN (390)...(415): NAD-dependent DNA ligase C4 zinc finger domain
  misc_feature (1)..(666): Xaa is any amino acid
MNSKKDRISELETQIQRYQASYYNGEAEISDGEFDLLWNKLKALAPESEILKKVGTGTDTDGFPKARHLIPMGSQDKASNPHEFMEWAEKMGLDTKEDAPLTNKKNKLTKKFIVQYKLDGASLELQYEKGKLIRAVTRGDGIIGDDITDNALRMKGVVKKIDISFTGGVRGEVVMTHDVWNKKYPSKANCRNAANGLMRRKDGEGCEDLQVIVYDAAASDDDRFFKDELQKLKWLKECGFKTTETKSFTTAKEIIAYREKIAAERYKLPYDIDGLVVKDIETDMSDLRKARPEKQIAFKFELETAFSVLREVIWSESGATYTPIGVVDPVRLAGTTVKRANLNNPDMIRSMGLKIGSTVSVVKRGEIIPKIEGLAPVQTKEKTLEIDFPKICGVCNTELVDAGTRLYCPNPACPKRLLHRLEKWVSVLDIRELGEKLLRQLFEKNRVTHIHEFYTLTTGELAEFDRMGELSAAKVIRHIQTKRELSLAVFTAGFDLEGVAETTMEKIAAAGFNTLEKLRAASVADFASVYGLGEITASVIVDGLKECAAEMDAVLKTKIITIAPPPSEESQPMRGLSFCFTGELKSMKRGEAEEKIKSLGAQSKSSVVKGLSYLVTNDPSSGSSKNKKARELGIKIIDEDEFLALLNSEPKKQPISKPGRIVLKIF

SEQ ID NO: 89763 - protein, 73 aa, Unknown
  Obtained from environmental sample
  misc_feature (1)..(73): Xaa is any amino acid
MPKITFLPENITVEAEEGSPLLSAARSAGIFVETPCGGKGMCQKCRVKISAPEGGEKSVKDALIAKPPFRANQ

SEQ ID NO: 89764 - protein, 264 aa, Unknown
  Obtained from environmental sample
  misc_feature (1)..(264): Xaa is any amino acid
RALQPHEYGKVIPFFTVIKRFSDTLLPFRKKVQEAYEKHKKLEVKDTFLTKASGYSFYNVSPFSFNELLNDPENIEVNLRSYINSFSQNVQDIIEYFKFDEQIAKLAKGNALFIVIQEFCSQKAYLGADVISSTEMGLIFEHLIKKFSESYNEEAGAHFTARDIVYLMTDLLIEGDEEDLKGEVITKTVYDMAMGTSQMLGCLTERINAINPKAEVTCFGQEFNDETFAIAKSDMLIRGGDANNMKYGDTLDDDKFSGYTFDYI

SEQ ID NO: 89765 - protein, 131 aa, Unknown
  Obtained from environmental sample
  misc_feature (1)..(131): Xaa is any amino acid
AAGVFEVGDHNSTFGGNPVAAAAGLVVLETVNKPEFLAEVSRKGEKIMAAIRGWNHSAIKEVRGRGLLIGIDIDRDAWPVLEKAIARANGKNCGLLILSAGTKTLRLLPPLVISDSEIDQGLEILREVMNN

SEQ ID NO: 89766 - protein, 284 aa, Unknown
  Obtained from environmental sample
  misc_feature (1)..(284): Xaa is any amino acid
MESLGEKLKTARNEKELTIEQISRDTNISIRYLEALEAENFAIFPGEPYLIGFIKNYGSYLELDNQKLISLYRALRIQEQPIPVEQLLKSPPRLPGFILPVLIILAVLGGGGWLVRSIIINRQNNPIQKKTDSQTSTEYVMDGNSMKRRLYKNDTVLITVDNETYKLELYNMGEAVTIRTPAGQEILDLSQEITIDLNNDGIPELRVTLIDFAKNKADMGALLDFYLMDAAAYTGTEPEQNVQRRDNTVTAASTTIFPASPSAYPFTLQIAFQGYCMFRWEILN

SEQ ID NO: 89767 - protein, 407 aa, Unknown
  Obtained from environmental sample
  DOMAIN (1)...(57): Uncharacterized protein family UPF0004
  misc_feature (1)..(407): Xaa is any amino acid
VVNSCGFIESAKQESINAVIEWRKFYPNKKILLAGCLAQRYAKELAGSLTEADGFFGIENIADITNVVSKITGGAQDKPANDDKPETGKRPLLSLPGSAYVKISEGCNNCCSFCAIPLIRGKLVSREIPDIVEECRILLERGIAELCIIGQDIGAFGKDTCAESKLPELLKAISSLEGHFWVRLLYIHPDHFPLQILDLMEKDTRFLPYFDIPFQHASSKILSAMNRHGNTEEYLALLKIIRAKLPNAVIRSTFLLGFPGETEQDFAQLLDFQQKANLDWLGCFVYSREEGTAAYSMKGRASAKTAKERKQIIEERQIPITEKNMDRFVNQNLDVLVEEEIAASETGSASSEENETLWLGRLYCQAPDIDGAAVIVKSEASEINPQLGTFTKCKVMSRRGFDLEVSV

SEQ ID NO: 89768 - protein, 57 aa, Unknown
  Obtained from environmental sample
  DOMAIN (1)...(49): ErfK/YbiS/YcfS/YnhG
  misc_feature (1)..(57): Xaa is any amino acid
DSYERYVYIHGTNREDKIGTPFSHGCVCMRNDDIITLYSMVEEGTYVYIDGRFDSAQ

SEQ ID NO: 89769 - protein, 291 aa, Unknown
  Obtained from environmental sample
  DOMAIN (12)...(116): Mur ligase family, catalytic domain
  misc_feature (1)..(291): Xaa is any amino acid
MSMPEHELKPQTVHFVGIFGSGMSAIAQYLAGTGVGVTGSDRLLDSPDTAKIKDALLSCGCVIHPQDGGGITSDTSSVCVSTAIEETNPDIAAARALNIPILHRSDLLAAIVKGKKSIAVAGTSGKSTVTAMIFELLTGCGKSPSLISGAALRSLERRGLFGNAYCGDSDLLVVEADESDGTLVKYEPYASVILNLSKDHKPEDEVLEMFRRLASQSKWSAVNADDSKLCGLTGASTSFGFGGSAAFKGAITETAPLSTTVAVGGADMTLPLPGTHNASNLLAALCVCKHL

SEQ ID NO: 89770 - protein, 92 aa, Unknown
  Obtained from environmental sample
  misc_feature (1)..(92): Xaa is any amino acid
MLKYLLFDLDNTLYSRHYGLENNVSRRIFEFASALLGIPPEEVRRQRMEMRKQYGTCLEWLMTEKGFTDVEAYFAAVHPPGEADILVPNAEL

SEQ ID NO: 89771 - protein, 149 aa, Unknown
  Obtained from environmental sample
  DOMAIN (15)...(149): yrdC domain
  misc_feature (1)..(149): Xaa is any amino acid
MPLLKVSDESIRQAAALLVQGGLAAFPTETVYGLGGDAFNPLALARIFEVKGRPRFDPLIVHIAAFETLEKIADLSLLDTPGRKNLAALTKQLWPGPLTLILPKQKAVPDLATSGLPTVAVRFPAHDAARRLIESSTGAVAAPSANPFG

SEQ ID NO: 89772 - protein, 400 aa, Unknown
  Obtained from environmental sample
  DOMAIN (131)...(397): Domain of unknown function (DUF323)
  misc_feature (1)..(400): Xaa is any amino acid
AIFTISGGEISGNEANNGGGVYIDSGTFEMKGGDIMNNTASERGGGVYIDSGNFKMSGGTIYGNDDTAKTNMVTGSATTKGMALYKASATIGTAKYDGDYGGGKYAADNIIPTSENTIPPLKAGDILISDIGIKMVWIPAGTFMMGSPETESGRVTDAVETQHEVTLTKSFYMGMYEVTQKQWVDVMGDGENRATTDYAKGDNYPIYYVNWYDALVFCNKLSMAESLTPVYSINGSTDPAVWGGIPTESYNETAWKAVEMDRSKNGYRLPTEAEWEYACRAGTTTAYNFGDDASSLGNYAWYGVSYDDGGKTHEVGKKPANAWGLYDMHGNVHEWCYDRLGSYGTDSVSDPVGADTGVPRVLRGGGWSHSARMLRSAYRREFYPAETQNFTGLRVVRGLD

SEQ ID NO: 89773 - protein, 295 aa, Unknown
  Obtained from environmental sample
  DOMAIN (50)...(277): FGGY family of carbohydrate kinases, C-terminal domain
  misc_feature (1)..(295): Xaa is any amino acid
LEKYLPPLTPSDKTAGKVSKAAAELYGINEGVLVSSGGGDNMMSAIGTGAVRDGFLTMSLGTSGTLFGFSKKPVIDPTGNLAAFCSSSGGWLPLLCTMNCTVASEEFRKLMELDVKAFDAEAEKSPIGADGVVILPFFNGERTPNLPNGRASVNGITAANFKRENLARAALESAIFGMRIGLDGFISLDFKPKEIRLTGGGSKSKLWQSIAANIMNLPVRPPSGSEAAAMGGAIQALWCLNKNSADSKKTTIEALADEHVALGDTIAPDKKSVEQYKKAYDVYSKYLGTLSPLYK

SEQ ID NO: 89774 - protein, 75 aa, Unknown
  Obtained from environmental sample
  DOMAIN (44)...(67): 4Fe-4S binding domain
  misc_feature (1)..(75): Xaa is any amino acid
MARKGKVIIDPELCKGCLLCLRACPVKVLEADTELNSSGCHPSKAAHVDKCIACGNCYEVCPDVCIEVYEIEGAA

SEQ ID NO: 89775 - protein, 174 aa, Unknown
  Obtained from environmental sample
  DOMAIN (32)...(174): Domain unknown function (DUF388)
  misc_feature (1)..(174): Xaa is any amino acid
MKRTLFLVGAVIVVLLLLFPFPPGIMIGGIHMTRHALLFIFGLVMLIAAAVIHAQGFRGPGSPPPPPHGGPGFGPPPPPHGGLGFSPPPPPPGAQGTQGQYGFTGPVRTVSVEEAKTFAHRTPVIISGNIVQAIGGDMFQFRDSSGEIVLKIGPREWMYYGATISPQDTIEISG

SEQ ID NO: 89776 - protein, 290 aa, Unknown
  Obtained from environmental sample
  misc_feature (1)..(290): Xaa is any amino acid
ATSNGRAIYFNSTGTLTISGGVVSANTAGYAVANISTGVVSISGGEIKATTGRAVYNNSTGVVTISGGEISTTSGYTVYNNAAGTVSITGGEISTTSSGYAVYNNSTGPVTISAGTLSAAGSTGRAVYINSTGIVTVSGTAKLTAANTQNNLSPGTIYLTGGTGTADRLIIEGGTVVNTSSGYSTVYNNSPGGIRISGGTVSTTSGYAVRNYSTGALTISGGTVEATTGSAVYNDSTGKITISDTAKVTSANTSVSNGTIFIASSGTATEERLVITGGTVQNTSTAANGN

SEQ ID NO: 89777 - protein, 87 aa, Unknown
  Obtained from environmental sample
  misc_feature (1)..(87): Xaa is any amino acid
MPAIRKSADLRNNYSEISEFCHNYREPIFITKNGQGDLAVMGIETYEEMNGRLELYQKILIGLNQIKKGETVPEEKIMKKIKRYAGI

SEQ ID NO: 89778 - protein, 749 aa, Unknown
  Obtained from environmental sample
  DOMAIN (83)...(504): Alpha amylase, catalytic domain
  misc_feature (1)..(749): Xaa is any amino acid
SGQLEYMRKHWGMILGRFASRLLFGLDIISEEEKPGFMGPGPSEVMSFAGLDEYERFSPDQEWMPNTVLIAKSTLVWLFQISQKYGREITQLDQVPDEELDELARRGFTGLWLIGLWERSKASRTIKQWMGNPEAAASAYSLYDYDIAGEFGGWGALANLRERCMKRGIRLGSDMVPNHTGLDSRWMIEHPDRFLQLPYPPFPTYNYNCGNLSGRDDVTVQIEEHYFNHSDAAVVFKRIDNNTGHTRYIYHGNDGTSMPWNDTAQIDFLNPEAREAVIRTIIGVCQQFSIVRFDAAMTLAKRHIQRLWFPVPGTGGAIASRAEHSISNDEFNRRIPNEFWREVVDRCAAEAPHTLLLAEAFWMMEGYFVRTLGMHRVYNSAFMNMLKNEDNAKYRATIKNTMEFDPEILKRFVNFMNNPDEETAVAQFGKGDKYFGICTLLVTMPGLPMFGHGQIEGFEEKYGMEYRRSYRDEAPDGYMVERHERDIFPLMKRRYLFSGSENFRLYDLYCGGSVNESVFAYSNRVKTGLGDERALVFYNNSYYETSGWIKVSDPPIPCQDGTRRDSLSEALLIHGDARYFTLLREQKSNLWYIRSSKAISENGFFVGLKGYETQVFLDIYEVEDDGKGRWARLNNDLEGRGVSDPLAAIKDIFLGELYYHFMEMFKPEIVEKLCTLKDKNSAAGDIKEDAGEFFITASFFMDGANGSYDEWAAFDEKGVKRKFTVISNDDILLEFNSFLERMMTIREML

SEQ ID NO: 89779 - protein, 257 aa, Unknown
  Obtained from environmental sample
  misc_feature (1)..(257): Xaa is any amino acid
MSVPSQGQLGGLTNQVFADNGWNRMEAEEAQRGGGNEAIPKRLGAPSPIKHVFLVVKENRTYDQDLGDLGEGNGDPADAQFGAPITPNQHALSKDFSDFDNFYDDGSQSADGHQWIVQGNDNEYNEAWNQDEWVRSYPYNGGDPMSIQPDGFIWNAAEKAHQTVKNYGEYEAFSENAGHSWREWWQDAKVMEGKESGPLDVPLGSYRFYSDVPSLNEITNPNFPEFDLESPDQFRVDVWEEDFKKAEETGNLPNLTI

SEQ ID NO: 89780 - protein, 125 aa, Unknown
  Obtained from environmental sample
  DOMAIN (2)...(115): Response regulator receiver domain
  misc_feature (1)..(125): Xaa is any amino acid
MIRTLIVDDSAVVRSILKDFLESEGSFEVVGEAEDGRDSVDKARNLNPDLITMDFEMPVMNGLDAIVEIRKFSQCGIVVISTHDTAKMAYEAAVMGAHEFFAKDNFTSKIIDVKRSEIFNTLKHI

SEQ ID NO: 89781 - protein, 157 aa, Unknown
  Obtained from environmental sample
  DOMAIN (18)...(153): CheW-like domain
  misc_feature (1)..(157): Xaa is any amino acid
AEAEELEQESAETVNGEKFLVFSILGKLYGFPSRLIGEIALFDKVFPLPLMPSYVLGVVNRYSAPYALFDIGLLFQKTPSPRNKIIILKEEIDRIAFLIDDVAGIADIQNNDLFTVERNIDSTDLTDIICASFKWEDGDVFVIDANRIIGRVSREIV

SEQ ID NO: 89782 - protein, 196 aa, Unknown
  Obtained from environmental sample
  misc_feature (1)..(196): Xaa is any amino acid
MAYAPYGAGGVIIRVEADIRRGIPGIDITGLAEGAVREARERVRAAFRNSGFTFPQDRILINLAPAGLRKEGAALDLPIALAVMAAAGLAPVPPNILVMGELELSGNIRPVRGVLAAIAGGLKEGITEFIVPAENKGEAAILYAAGKNPVMRFRAVSSLREAVDALFIREETGELSVPRDADDCVSTELTENTNSN

SEQ ID NO: 89783 - protein, 471 aa, Unknown
  Obtained from environmental sample
  DOMAIN (26)...(225): haloacid dehalogenase-like hydrolase
  misc_feature (1)..(471): Xaa is any amino acid
YKKVDEIPFDFNRRRMSVAVEGSSGKVELITKGAVEEMLAISDQAGYQDTAEPMSGELREKILATCRKLNEQGMRVLGLAQKTVTLPATLSAADESSMTFIGCLAFLDPPKESAGMAIKALGEYGVKVKVLTGDNDSVTRTVCHTVGLDVGHILLGSELEDMNDEALKKAVDEVDIFAKLSPSQKARIVTALRNDGHTVGFMGDGINDAAAMKAADVGISVDTAVDIAKESANIILLEKDLMVLEEGVIEGRKIYANIIKYIKMTASSNFGNMFSVLAASAFLPFLPMMPLQILILNLIYDISCIAIPWDNVDLDFLRKPRKWDASSISRFMIWIGPTSSVFDITTYLLMFFVICPRFVGSPWGADLSPENQVLFISLFHTGWFVESLWSQTLVIHMIRTPKIPFIQSRASAQVALFTTLGIATGTIIPYTFFAEHLKMTSLPSYYFAYLAGIILAYMLLATLMKKVFVWK

SEQ ID NO: 89784 - protein, 424 aa, Unknown
  Obtained from environmental sample
  DOMAIN (101)...(293): ATP-grasp domain
  misc_feature (1)..(424): Xaa is any amino acid
MKVLVIGGGGREHAIIKALKKEARISKIYAAPGNGGIGVDAECVPIKAVDIPKMTEFAVENKIDYVVVAPDDPLVLGMTDALTAKGIRCFGPDRAAARIEGSKVFAKNLMKKYNIPTAAYETFSSPEKASDYLKQDGLSFPVVIKANGLALGKGVIIAEDLKQALDAVDSIMREKKFGDSGSSIVIEEFLTGPEVSVLAFTDGKTVVPMVSSMDHKRAFDGNTGPNTGGMGVIAPNPHYTDEIAAVCEKTIFLPSIRAMREEGCPFKGCLYFGLMLTKRGPAVIEYNCRFGDPEAQAVLPLLETSLLEIMEAVTDERLSEIEIRWKNAHCACVILASGGYPHGYKTGFAISGLTAAENSGAVVYHAGTEYRQAENTGSFYTTGGRVLGITALAPALDAALVKAYKAVDLINFDGIHYRRDIGKY

SEQ ID NO: 89785 - protein, 297 aa, Unknown
  Obtained from environmental sample
  DOMAIN (31)...(186): Archaeal ATPase
  misc_feature (1)..(297): Xaa is any amino acid
MKLSEIQDIAESQKLALDRQEKGLKRQLLPELPDIQSHALVVSGIRRCGKSTLLRQFVHKLKRPWFYLNFDDVRLASFSHTDFVLLDKVIAESGANLIFFDEIQGAQSWELYVRQKLDEGFQLAITGSNASLLSRELGTRLTGRHISKELFPFSYKEFCDFLKIKTGSESLADYLEKGGFPEYLKTGNTDILAQLQSDILYRDIAVRYGIRDAASLRRLFVYLVSNPAQLFSPSKLTGVVGVKSPTTVLEYISYFEAAYLIQLLPSFSWSVKAQSLSPKKVYIADTGLIKTGAVSFG

SEQ ID NO: 89786 - protein, 400 aa, Unknown
  Obtained from environmental sample
  DOMAIN (226)...(400): SRP54-type protein, GTPase domain
  misc_feature (1)..(400): Xaa is any amino acid
MAEILVVRGASRGDCVHKIVNQYGIYFNILRERTISPSGLHKLFSRKEEVELEFSLYPQLGQGGLNIPARQPQSGRQPASIAENEENDPNLVDFTERKKQMLTVLGKDPNKVMRQIKEHEDREASQQLILEKLNEIMEKQEQIGARSAPKQDHSSLLRITQMLRQNEFSDRYINGLLDRARKELPLETLDDFTAVQNQFLVWIGESIQIYSMPRREEGSVDFNVPAGRIMVLVGPTGVGKTTTIAKLAVVYGIGSVERPPLSVRVYTIDTFKIGGTEQLEKYCEIMEVPFGIINNKDELRKEIDMYREETDLILIDTIGSSPNDSVKLGEIKALLNACGLKADIYLVLSASTKTNDIEHILRQFEPFNYQAVLLTKMDETRTVGNIISAFAEKGKQISFI

SEQ ID NO: 89787 - protein, 274 aa, Unknown
  Obtained from environmental sample
  misc_feature (1)..(274): Xaa is any amino acid
MKSADKLAEAVVEEFRQKVKDLADDLNAQEIANIDPKYFSFVQNDMKEAERSGYSNYSYWGSTLRMFFKNKLGITTFCILIILIGFSLIQPFLPNQKLATYINQHSVLRSNGQYYDEQIRNHPPFNKDFWFGTNAIGQDLWARIWSGTRTSLRIGVTVAFINMIIGIFYGMIWGYVRKLDWLLTEFWNVINNIPNTIILILMSFILRPGVGPIIFAMCIYGWVGMARLIRNLTVIIRDREFNLASNCLGSGVFKIILRNLLPQMISIITLHFAL

SEQ ID NO: 89788 - protein, 337 aa, Unknown
  Obtained from environmental sample
  DOMAIN (158)...(326): GAF domain
  misc_feature (1)..(337): Xaa is any amino acid
MAIGRKIVVMGSMPNDDAELVGAAAERYGSELSATLRLVGGVLAGSNEYPAGVISYLPCSHEKISHFFAVQHIDFVDDIPFYQCVGEGAVPPYVYDLPVSGVFVSPLSEAAAASLVLSIVRSSAALSKRMALEAQVMSDRNHKDRLASIGMELCYENDFPALLGHILTVNREAVYADAGCIYVRDRMVDNSLCDTLRFMLCQSDSFAGGAGTAPMIKVNTDTLVGCAVYTGQFIEVDDVERIRPDAPFKADRSFICSPDYHCKSVLTMPLINVEDEVVGVLQLINRKSDRSVTLTSADQVKAYACPFSTDDIGVIRFLSRYAALSIDRISLYNSADI

SEQ ID NO: 89789 - protein, 208 aa, Unknown
  Obtained from environmental sample
  misc_feature (1)..(208): Xaa is any amino acid
MEAVKTARHPQDAAPPSFESVWAILQENAQGMKELRESQKQLTESQKQLTESQKATDRQIQKTDSEIGKLSKRMGEVVEYMVVPNLREKFRELGYDFPKANPNSDVSDRKNNIFLEIDVMLENGDKAMLVEVKTKPTTEDVQDHIKRLEKMRVYADLHSEKRTFLGAVAGVVMSDNEKEYILKQGFFVIEPSGETFNIIPPNNKPKEW

SEQ ID NO: 89790 - protein, 526 aa, Unknown
  Obtained from environmental sample
  misc_feature (1)..(526): Xaa is any amino acid
LGPWLRYEGPIPLPRIAGVFGISLAEAEDAVNALAEVEEVVCDVRLAGDTSPLICDSRNFEMLLRLSRRKQRPEIIERPAALLVPFIAVRQNLLIGNREQRAKPNQIAQSNEATIKKLYACCALVKLWETEFLTARCDHYSPEIINSEINEGRLVWYGAGKEKIGLCRPEDLELVNVNPVHKSGQKIHSEDGFLARLIDNGFFDRPRDFWEIKDAINVSVGQSINSKDCAKALWQTAWQGRLSSDSFEPLRRGIQFGFTIKNTETVEQQPPSSSGSPRMPHIPRSLRDRWRDGAPVSGRWFSIVLDENTAQDQWWDDPLDEEGRNKDRVRLLLERWGILCRPLLEKYSGISTSKSDPSPFSWSGLLPTMRRMELAGELVAGRFFAGINSLQFASPAIARELENAEAVDGIYWMNAADPASPAGINIEGLDPRIPDRLPSSRIYFRGTQLIAVSNRNGKEQHIFIAFNDPDIPALIDLIKIPRTRKVLPDNKIVVDMINDKTAGQSEYAKVFQDCGFVCDRGRLCLW

SEQ ID NO: 89791 - protein, 249 aa, Unknown
  Obtained from environmental sample
  DOMAIN (45)...(192): Phosphoglucomutase/phosphomannomutase, alpha/beta/alpha domain I
  misc_feature (1)..(249): Xaa is any amino acid
MEKSAVIERAKDYIAREKDANFRAEVEKLLEKEDFKELEDRFYRDLEFGTGGLRGVIGGGYNRMNTLVVKSATQGLASYLLKAFPERAKKSGALSAVVAFDSRHYSAEFSEAAALIFAGNGIKCFLFSSLRPTPELSFAIRHLGCDTGIVVTASHNPPKYNGYKAYWIGGAQVIPPHDKGIIDEVNSVTEIKEMGRDEAIAKSLLVIIDKEVDEPYQNMVRSRLFRPELIKEKAGEVKIVYTPLHVTLV

SEQ ID NO: 89792 - protein, 520 aa, Unknown
  Obtained from environmental sample
  DOMAIN (201)...(472): ABC transporter
  misc_feature (1)..(520): Xaa is any amino acid
LSVEASVKFFNELELSEKEKRIGAEIFREIKGRLGFLQAVGLGYLTLNRGSATLSGGEAQRIRLAGHVGAGLQGVLYVLDEPSIGLHARDNERLLALLEKLRAQGNSLIVVEHDEETIKRADCIADIGPGAGSEGGLLVALGNIKDLQKNPASLTGAYLSGKKKIEMPKKRREVNKETPRIKILGARANNLKNINVEIPLTVFTVVTGVSGSGKSTLINHILKKALAKKFHGAYEEPGPHKSIEGLEHIDKVIEIDQSPIGRTPRSNPATYTKVFDEIRNLFASLPESKVRGFSKSRFSFNVHGGRCEKCCGAGVVEIEMQILPNVQITCDECGGKRFNDATLEVFYKGKNIYDILELSISEALEFFKALPKIAKPLNVLKDIGLGYVKLGQPSTTLSGGEAQRMKISTELRRPGTGKTLYLLDEPTTGLHFEDINRLLECLQKLIENGNSMVVIEHNLDVIKCADWIIDLGPEAGEAGGYVIAEGTPEKIVKNPKSQTGKFLYSHCAIFTRNKRIIKSL

SEQ ID NO: 89793 - protein, 99 aa, Unknown
  Obtained from environmental sample
  DOMAIN (36)...(98): Hsp20/alpha crystallin family
  misc_feature (1)..(99): Xaa is any amino acid
MTLTNYSPVHNLNRVFDTLMDYARGEEAKAYAPKSYLAEKDGVYTLEVELPGVKKEDIQINVEANLLKISAIRKRENEEYKYEREFHLSDEVDSTNIKA

SEQ ID NO: 89794 - protein, 125 aa, Unknown
  Obtained from environmental sample
  DOMAIN (2)...(117): Response regulator receiver domain
  misc_feature (1)..(125): Xaa is any amino acid
MIRILIVEDQTMLRESLEHVIGGQDDIEIAGTTDDASRTPELCRELQPDLVLMDVVTKNNTSGIIYTAQIRAEFPNIKIVIMTGFLEITFIDEARKAGAHSYVYKNSGYEHLFYVIRNTMQREQH

SEQ ID NO: 89795 - protein, 286 aa, Unknown
  Obtained from environmental sample
  misc_feature (1)..(286): Xaa is any amino acid
AGTYTTRAPVSSSSVWTKDGGSSGGGGTADVYVAGTDYDNTTYHTIASFWKNGTQQILSYTSSSANSVYVSGNDVYVVGRVRNDSNSGDIATLWKNGTAQTLITSASSASASSVFVSGSDVYVAGQVFNSGSGYRATLWKNGTAQTLSASFSSYANSVYVSGSDVYVSGYACSGGDGSSIPENARATLWKNGTAQTLYSSASVAYSVYISGSDVYVAGIVGSGGTDAKATLWKNGIAQTLSNEFSTTNSVYVSGTDVYVVGGTKDAGYDNLTNPTLWKNGVAQKLN

SEQ ID NO: 89796 - protein, 261 aa, Unknown
  Obtained from environmental sample
  misc_feature (1)..(261): Xaa is any amino acid
ALEPVAKETAGLDKWSVSGKDIKVSDTRRTFAETVTYQGKSNVFHINPKYNASTYDHFVMEYDLSAFIGKKIGVEMSFDVWINKGARIAWQMLVSPDYPVVAGYIEPTYFLPANTWNTISGNTIVTVPQSGILYLSGMQINGAEAYFANASLTITEGTSAPDTAVTLNSVTADGSASAKTTQLTLTFSQAITGLNAANINLGSEISGLTKGTLSGSGPTYTLPVTGFTSGGTLSVSVTKLGYNITPSKTVTIYGGSGSGGG

SEQ ID NO: 89797 - protein, 403 aa, Unknown
  Obtained from environmental sample
  misc_feature (1)..(403): Xaa is any amino acid
SCGAKSAVQMPAVQNPAVQKHVVQNPVKGEDKKKDAEIEQGYGSEYKTIQGMSDKQKVRRIYENKNRLDKLLGQKDVKQEEVTEALVDTTKSAALINHSALENAIYHADDVAKKLTQDLVDSTYEMVKSSAQLISEDIFKNELMNTMLEKSNGTVIQHMTRVYLNGIAFLSYYNKLVSGSSAIQKLRINFAAEYREYYHALLPHVGIDNVNLERVFYGGMRAITPEDYMKWAVGFLIHDIGKAPAVEYHEGESSYDRNIVIDHVKKGYNYAITKTNYPKEASLIIGYHHEYYGDPDGYGFFRAYFAKYKKENPLAKQDYCIGYELEPVMDFEVLAYFPAKVLEIIDVFDSLTDPHRAYRHPMSHKEALKLMREEFINKHHKLDLVLFDIFVSFIKEKEKEEEK

SEQ ID NO: 89798 - protein, 360 aa, Unknown
  Obtained from environmental sample
  DOMAIN (6)...(336): RmlD substrate binding domain
  misc_feature (1)..(360): Xaa is any amino acid
VRKLTNILVTGGAGFIGCNFIRYLLEKAEGFSGRIINLDALTYAGNRSSLADIEAKYGQAKQVRYFFEKGDICDRSFVESLFAKYEIDTVVHFAAESHVDRSILGPEAFVKTNVMGTFTLLDVARNAWNNDNGVLFHHISTDEVYGSLGETGYFTESTPYDPRSPYSASKAASDHLAMAYNHTYGLPVTLSNCSNNYGPYQFPEKLIPLMIMNMLEGKPLPVYGDGKNIRDWVYVEDHNNAVWTIMQKGKVGEKYNIGGENEWENIRLLNELIEIVAKKTNKDTDKIRSTITYVKDRPGHDRRYAIDCSKIKRELGWKQNVNFNQGLERMVDWYLANREWIDIIRSGDYKRWIEKNYEKR

SEQ ID NO: 89799 - protein, 460 aa, Unknown
  Obtained from environmental sample
  DOMAIN (38)...(458): Aminopeptidase I zinc metalloprotease (M18)
  misc_feature (1)..(460): Xaa is any amino acid
MDSNIKDKLLFPRKDASVSLTREEIKTADEYCKAYISFLNNAKTEREAVSAAVALAEKEGFFHWEKDMEIKSGDKIYFSRRGKAVVFCTIGKKKFSQGISIVASHIDSPRLDLKMQPVYEDSGIAFFDTHYYGIIKPYQWTGIPLALHGFIIRADGQELAIQIGEDQDDPRFFIADLLPHLGEKNPAKDPVPAENLDVLAGLNCAPGESGAGTVKLNILRLLYEKYGITEKDLISAEICAVPAFPASDLGFDRSMVGAYGQDDKACAYACLTAFLSAREPEYTSCLVLADKEETGSVGISGMQSAFFSGFISELIEARDNSATVHEVFSNSLCVSADVNTCWHPLYKEFLDEHGEAKLNHGVILFRYWGEKGKENTNDADAQTAAALIKILDEAKILWQTGEGGRVDAGISGTLSRFLANLDIPVIDLGVPLLSMHSPLEGAAKADIYMAHRAFTAFFNR

SEQ ID NO: 89800 - protein, 373 aa, Unknown
  Obtained from environmental sample
  DOMAIN (1)...(288): Bacterial extracellular solute-binding proteins, family 5 Middle
  misc_feature (1)..(373): Xaa is any amino acid
SGRIISKAYYQKHEKNFGTAAGGIVATGPFIFHKWTSGREIVLKKNYNYWDKERQARNIIDTLVFKIIPEDTTRVIALQTGSVDFCVNLPEDMLDQLEANKNLTFTIMDSFKLTYLALNTQRAPMNDVNVRKAISRAMDIPEFQKNIIKTAGTAGTILPFGKALYGENSAKWEAYLKNTQGYTYDLAAAKQYLARSAYPNGFDCDLIVNENSLANQRALYIQEALKALNINVNIKKMSGDEQDTYQMGGILDADGKRDYDMLIGGWEADYPDLNGNIEIMFVESQAGEDGYNAAAYINPAVDAMVVEQRTIIDPAKRFEVQSKMMDIIVNDVPYIVFDYANRQSVLNKKYAGLAISSSWLWVLPAQNVRAVTK

SEQ ID NO: 89801 - protein, 48 aa, Unknown
  Obtained from environmental sample
  DOMAIN (3)...(48): GTPase of unknown function
  misc_feature (1)..(48): Xaa is any amino acid
MGLTAGIVGLPNVGKSTIFNALCSGSGHAEAANYPFCTIDPNHGVVPV

SEQ ID NO: 89802 - protein, 156 aa, Unknown
  Obtained from environmental sample
  misc_feature (1)..(156): Xaa is any amino acid
MKKFLYFAVILALAILTVFAGGRHDADSFSIRKPVGKLRIYTSMYEDVIKSLDTVLKKQFPDCKIEFLYGGTSQIQARIATEQGTGRLGCDILLVAEPSYSLELKQKGLLHRYISGEACNLAFGYDREGYWYPVRVSAMVLAYNPEKNARNSVPNS

SEQ ID NO: 89803 - protein, 333 aa, Unknown
  Obtained from environmental sample
  DOMAIN (105)...(227): HD domain
  misc_feature (1)..(333): Xaa is any amino acid
YSEGDSSKEYANKAGETASTATVQEEGMGLSQQSDSDKLKKAEDFYTSFIFFVENMFVKASVSDDLEEKTVSEKIKEIIEYIKEDRRFLMRVIKNIEPAEGKNYLATHSVRSTIIAIIIGTYLKLPNYRLIELGVAALMHEAGMLKLPSTIYLSQRALNPQEQKAILTHPILGYSMLKSLDFSLPVCLSALEHHERENGTGYPRKLLSEKISLYSKIIAVACSYEALSSKRPHKEAKDGYTGMLELLKNEGKQYDDTVVRALVLSLSIYPIGLYVLLSNGKKGQVIDVNPENPKFPIVEIFGDVTPDGRNKTVQTSANELSIVRPLNRSEIES

SEQ ID NO: 89804 - protein, 289 aa, Unknown
  Obtained from environmental sample
  misc_feature (1)..(289): Xaa is any amino acid
NVAYLRQQNEHYKEHRLVTEITHEIRKMLIDHIVKKFNEEMVHDFANYDSAITNANAQLFNGNPDKALKIIEPVINEVEIFREFVLADDSATIYRIFYNVVEEGFYLKVIHGDSKRKIYLMPERFFRAYLLYGTALVGLERLDEAKTVLVKAWEINPVYADVYFELGEISKIQKDQKEFYRLTQEAHKVAYTKAKLARCYRNFGYYFIEQEKFDDAIAMYYASLSFDSTQAKKVLSELDYIQQFTKKPVTKKPSKEQIMAVFKKHNIQYGVDENLYNLIYSLGRALEAE

SEQ ID NO: 89805 - protein, 647 aa, Unknown
  Obtained from environmental sample
  DOMAIN (13)...(72): TGS domain
  misc_feature (1)..(647): Xaa is any amino acid
LKNFYLTPYMSQINLTFPDGSEKSLESGITGLDIAKSISEGLARKAIAVKLGEKILDLNRPITTNGTFRIITASNEDADALYVLRHSCAHVLAEAICALCPGTRLAYGPPVEDGFYYDLATPEPLTHADFERIEKKMAEIIKEDRPFTRIDVSKEEALKRTEGDKYKRDNVDRAIERGDTVFSFYANGIPNEGWEDLCAGPHVPSTGKLKAFKVLSLAGAYWHGDQKSDQLTRVYGTCFADKAGLDAHLKFLEEAKKRDHRRIGQEMDLYHIEDHSPGMVFWHPHGAVLVNVLKDFVRKEITKRGYKEVITPEIVDKSLWIKSGHADKYDSNMFKTLAGEKDMAVKPMNCPCHIEIFNQGLKSWRDLPLRFAEFGKCHRNEPAGTMHGLMRVRGFVQDDAHIFCTEEQITQEVSSFCTLVKDLYKVFGFEKITVKFSTRPELRIGSDELWDKAEHSLEEATKLAGLEYKLNPGEGAFYGPKLEFVLKDSLGRDWQCGTIQVDFNMPGRLGAEYVGKDNQKHTPVMLHRAALGSLERFIGILTEEFAGDFPFWLAPVQVRVLPVSEKFSEYAEKIRTELVEKGIRAEIDNSNEKVGYKIRLGELAKIPYLLVVGEKEIAENAVSVRKRKEGDLGKKNLDEFLKEIALS

SEQ ID NO: 89806 - protein, 387 aa, Unknown
  Obtained from environmental sample
  DOMAIN (163)...(303): ATPase family associated with various cellular activities (AAA)
  misc_feature (1)..(387): Xaa is any amino acid
MAKILVVDDEEIMRDMVADSLELNGHRCTVAANPQIALEQISVVNPDLIISDYKMPGMTGLDLLKAVKKERPSQPFLMMTAFGSIEMAVEALQNGADHFIEKKDLEHAEIIEHAVAMVLEKYKYRTENFALRKKLCEKNFIGHGEKFLALNKFVETVAPTNASVLITGESGVGKEVLARAVHYQSLRAGGPFVKINCAALPESLIESELFGHEKGAFTGALKTRRGKFELADGGTLLLDEIGEMPLAAQSKLLRVLQERVIVRIGGDDEIKVDVRIICTTNRDLKQEVENGTFREDLFYRLSVVPVHIPPLRERKEDIPDLLNYFIGKLNEENGYAVEEASEETVAMLHKQTWPGNIRQLENAIERAMVFLQSGILKPDFFDIEPAA

SEQ ID NO: 89807 - protein, 408 aa, Unknown
  Obtained from environmental sample
  DOMAIN (94)...(216): Response regulator receiver domain
  misc_feature (1)..(408): Xaa is any amino acid
YSQLDTRANRKIEGTGLGLAITKNLVEMMGGSISAKSEYGKGSAFTAEIIQGVVNTGVDNTPIIGEETAETLRNFRYASERKEKSVVPSWLPHAHVLVVDDLPANLLVARGLLAPYGMQVDTAASGREAIELVRNHNYDLIFMDHMMPEMDGVETAAAIKKLGMRNEEIGKSVTQTPIIALTANALRGMKEFYLENGFQDYLSKPIYPEALDEIIRKYLSEKLKVKSEKLPLHFSLEIMAQRLDILNHYLVSFTYVPETDWQAKFDAAYFERFTALIKSLNTAGTPAELREQQELLAGAGQKEDPYAIREALPAFCDALRKWREQEQNTADNEYNKLPDEILSRLKKALLAGETETAEAAIGELGEKALTPAGRELYFRLYALMLEGNTEKIMEAIKELAPPKESRHD

SEQ ID NO: 89808 - protein, 110 aa, Unknown
  Obtained from environmental sample
  DOMAIN (2)...(106): Response regulator receiver domain
  misc_feature (1)..(110): Xaa is any amino acid
MIRILIVEDQTMLRESLALVIGGQDDMEVAGTTDDASRAPEMCRELRPDLVLMDVVTKNNASGITYTAQIRAEFPKIKIVIMTGFAEITFIDEARKAGAHSYVYKNSGYD

SEQ ID NO: 89809 - protein, 715 aa, Unknown
  Obtained from environmental sample
  DOMAIN (136)...(201): His Kinase A (phosphoacceptor) domain
  misc_feature (1)..(715): Xaa is any amino acid
MAYVTYLLAYEIIYFHLWNRHKDKVFGTKAFEEEPKGSVPIDSILVGMAICYLCGAFDFIHNTFFKDNSSLFSYSVFAVYVGMVFALSKRFSAMYGQLEQSNAVLETTVKERTRELEEQTAIAVEQTEIAVQASRAKSEFLATMSHEIRTPLNAVIGLSEIELRDGPSGSSRENIARIRQSGASLLGIVNDILDISKIEAGSFGLVPSEYETAPFVSDTVNLNMVRFGSKPIGFALEIGGDFPAKLIGDELRVRQVLNNLLSNAAKYTDEGTVALKIAWSIHSAGKVKLAFTVRDTGIGIRAEDIKKLFASYAQLDTGAKRKAGGTGLGLAITKNLVEMMGGSICVESEYGKGSAFTAEIIQGIAEYKPIGEETAEALRNFRYAPEGKEKIITRSWLPHAQVLVVDDLPENLLVAQGLLAPYGLKVDTAASGREAVELARSHSYGLIFMDHMMPEMDGIEAAEAIRKMEGHAHTPIVALTANALRGMKELYLEKGFDDYLSKPISPEALDAIVNKWLNEQIIMNNEQLSESLGQNAKPSDDNSLFIANRSLLIEIEAQRLDKLNHYRAAFEISKTSAGLEIDAEYYRRFTSLVGSFDALPVGLRADKELLTEAGRNEDAQKIREMLPAFCENLAAMHLRKADNGVKEDENVGLLLKRLKKAIQDGDSAASKKIAAELGAKSLSPRERELYLKLYDLRLAGNTEKALEVLDSYGGG

SEQ ID NO: 89810 - protein, 108 aa, Unknown
  Obtained from environmental sample
  DOMAIN (23)...(52): IstB-like ATP binding N-terminal
  misc_feature (1)..(108): Xaa is any amino acid
MLNNATLSQLKELRLSAMADSFKEQSEKRNIASLPFEERFALLVEAEWLHRRNKRTECLIKKAGFRFTAAVEDIDYTNKKGVSKGEIIKLSLGAHIKKAQNVFFCGPT

SEQ ID NO: 89811 - protein, 175 aa, Unknown
  Obtained from environmental sample
  misc_feature (1)..(175): Xaa is any amino acid
MEKAKEILRLSQMGLSQRDVADGTGCSLGMVNAVLARVKGAGILDLLSLGTKELGSIIYPPGKSNEKTEPNFEQVDREMKKKGVTLFLLWEEYKMTNPEGCMYSQFCAKYREYRKMNSVYMRKIYKAGERMLVDWAGLTMKYSNGKDKEETVYIFVAVLPASSFLYAQPLRDMKM

SEQ ID NO: 89812 - protein, 534 aa, Unknown
  Obtained from environmental sample
  misc_feature (1)..(534): Xaa is any amino acid
MNKRQTTIITALSIIAFFLAFMVCNRIWFRLDLTKSRAYTISKVSRNLHTEIPDYVNITYYLSNKLKSIVPAPGEIEDTLREYAAFSKGKIRVTVRDPLKANLATQVEELGLQPKQVQTVDKDQASLVTVYSGIVIEYLDKIEVLPWVISTETLEYDLTSRIRSMVNDTERVLGVIIGDGFRQWREDFAYLNQTLAGSGYKVRLISPGDEIPDNIPAIFVLGGVEDLDNWALYRIDRYIQQGGRALFAVKGVFVDTIRGSIEARPQEDKGLLEMIASYGVLIRPELALDRNALTLQYQTRTSSGAVQLRIVRYPLWIGVMQNNGNPQHSVSANFSGLDLYWSSPLELHPSDKVQAVTLFTSSPEAWVMRGEFYTSPEMPFFLERNAEETRGKKDLGAALTGEFPSFFKGSPKPVREGSDETLPDMPMYANQSRIIVVGDTDFATNMISASNARQNLDFLMRAADWLVSDEDIIKIRSKQPHVGRLDKIFDSDKKAAAIRFVQIINVGIIPLLVIACGFYLASRRKKRSNEAETV

SEQ ID NO: 89813 - protein, 512 aa, Unknown
  Obtained from environmental sample
  misc_feature (1)..(512): Xaa is any amino acid
MNEACSAGTGSFLEESASGDLSIHSAKDIGPIALEAGAPCKFGEHCSAFINSDIRKAVQQGAGRENITAGIVCSIVANYLNRVVGNRTIGGKIFLQGGVAKNPAVPLAFAMLLNKEILVPPSPELMGCFGVALLAQRKHADGLLEEQSVIIDDIINREIGYERVFTCNACENRCPIQVLNVNEHKYMFGGRCNKYTNMRKHVKDVPVFDYVEKRQKMLFEEFAAPVENKEQLTVNNEQRKADKRNFVIGIPRAFSVHTLYPLYSWFFHELGIKTFLSTEVAHAGVARAESTYCFPAEIAHGAVQDCLDKGADYVFLPHFRDMPSYEENVHANFCPITQSLPYYIEKAFPDIDKKRWLPLVVSFKFGDGKALELFCEMTKRLGIGEAETKAAFTVAMSKQQAYFDAVHKMGQEALEDARKSDRPVIATLGRPYNAFTPEANMGIPRKFTTRGYSIVPFDILPFHDEEIFPNMYWYYGQQDVKAANLLKKEDNIYLTFISNFSCAPDSFFCICQ

SEQ ID NO: 89814 - protein, 1269 aa, Unknown
  Obtained from environmental sample
  DOMAIN (140)...(399): BadF/BadG/BcrA/BcrD ATPase family
  misc_feature (1)..(1269): Xaa is any amino acid
MKSDCTHRLNKREATKDDIVLSLSDVMAVKVIDFLKRAKVTEGRVVLTGGITLNRHIIRFIREKAPQIEFIIPETAPVFEALGAAVLAPQSGSNLPTADKLLKINEIRFGVLGALKDWKNKVKFFEKADGKVRADRRYILGVDGGSTTTKACLVDMETYEIVASHYGRTHGDPVKALKECLAIIQEKVVADTGGKKIDIRLVSTTGSSREILGVFLETPGVYNEIIAHSVGTTYFDKEVETIFEIGGQDAKYVLLKNGVPIDYAMNEACSAGTGSFLEESASGDLSIHSAKDIGPIALDANAPCKFGEHCSAFINSDIRKAVQQGAGRENITAGIVCSIVANYLNRVVGNRTIGAKIFLQGGVAKNPAVPLAFAMLLDKEILVPPSPELMGCFGVALLAKRKNADGLLAEKSIVIDDIINREIGYERVFKCQSCENFCSIQVLNVNNNKYMFGGRCNKYTNMRKKVVDVPVFDYVEKRQKMLFDEYAAPKTSPSGFSKNFSVGIPRALSTHTLYPLYSWFFHELGIKTFLSTEVAHEGVARAESTYCFPAEIAHGAVQDCLDKNVDYVLLPHFRDMPSYEEKVHANFCPITQGLPYYIEKAFPDVDKKRWLPLVVSFKYGEAKALELFCEMTKRLGIGEDETKTAFDKAWAKQQKYFDAVQKMGVEALQEARKANRPVICTLGRPYNAFTPEANMGIPRKFTTRGYSIIPFDILPFHDEEIFPNMYWYYGQQDMKASELLKKEDNIYLAFITNFSCAPDSFILHYVKWLMGQKPFLVLELDSHSADAGIDTRVEAFLDIIDGYRAKKNEIETERYDNGWRFVTEKLATGKFDLRIDNIKTGEKVPIVGNKRVKVLLSNMGNISTEYMGAAVRSLGINAEAFPVATSKTVQIARAHASGKECVPSHLVLGSALEFFFSEKYRKDELYLLFVPITTGPCRTGQYYVYYENLFRDLHLENVVIFILSSDNSYTELGSEFSKQMWIGLVLSDYLKDIQCSLKACAVDPAKAQEEYEKSWRRVMHAVEHNPKNLGKELKHVARDVKRIPLKRNVHDCPRVLVVGEIYVRRDDFAVGELIDLMSERGIVVKVAGISEWIHYLDYMREYSLNKLINLRPRGKKLFSDPWKKLKILQIEKLWKHHIEKKTLAILKPTKLIPETPHDMRHIMTFTREHFVNLELNSEIAVSSGSAAAAMDAGYSGIVNISPFACLIGRVIEGLFTPWARERNYPILSVEVDGNLLPPNIVNKLNIFMVNVLRFKGGSDLSSLVDGASS

SEQ ID NO: 89815 - protein, 280 aa, Unknown
  Obtained from environmental sample
  misc_feature (1)..(280): Xaa is any amino acid
MLNEHKEYFQNKMISWISLKDSNYYVNEQFMEKYSSSNPNHSWFFETLKYENPPLIKVDFDYLTRQIYDLYINYPVYYENKAIGTVGSRFSLTEFMNDLDLPENVYLFGKDGVVIGAANEKIAKEKKTIMELFGSMGEEVYEKALSLGKDSSEILYYGKNHYSISSVGSVNLFLVSKNEMNIKTIIHDKASIVLFLLLLLMALAFVVFNMFISYILKPMNKNMQSYIESSLLDELTKIPNKRFFNMRIEDEWNRATRGQYPISFLMLDLDKFKRYNDTYG

SEQ ID NO: 89816 - protein, 272 aa, Unknown
  Obtained from environmental sample
  DOMAIN (105)...(146): Putative Ig domain
  misc_feature (1)..(272): Xaa is any amino acid
IGTVGDSYWKELEATGGAIEWSIVSGAVPTGLDLHYDGYVYGTLEGAGTFTFKVKAENVAGFDTATFVVTVVAPSIPTITTASLPNGKIDRHYSKYLEATGGGVEWSKTTGTLPPGLQLDDDGEIRGYPTTAGTYTFTVKATNTLGSVTKQFSIKIDPAELPVIVVSAVPNGTVGREYSQYLVTSSLEDDVIWSKSSGTLPPGLQLDGDGEIRGTPTTAGTYTFTVKATNTAGSATKELTMKINATLQVPTITTTTLPNGKKDEEYLQLINA

SEQ ID NO: 89817 - protein, 254 aa, Unknown
  Obtained from environmental sample
  misc_feature (1)..(254): Xaa is any amino acid
MEQVLTDIAAKLGECFAESTSSVFSMLTGREFTVSPKLDEVASDGDLLAKLPPDSIFVKTAYTKGVTGAALFSLPLKESTILVDLMLGGEGTPSDSLAGDSKDALSETFNQVMGSANQTLSDQAGETLSISGLEIIEPSGIDAAAMTKLIGEANFLAIPLATAQDTLNTDIYIVTSSLLNEQLKYKLGLAFQEQEQPAAAPAAGGGGPQQFSQAAPAAGYESNVDMRNLDLLLDIELPVVVRMGHTEMSLGELL

SEQ ID NO: 89818 - protein, 188 aa, Unknown
  Obtained from environmental sample
  DOMAIN (94)...(188): SRP54-type protein, GTPase domain
  misc_feature (1)..(188): Xaa is any amino acid
VKFGERLKNFFSGGFAAGNTAGITAVSEELLEDLCDILIEGDFGAQQAYQTTELLKDRCKKEKVQDVPLKLAEILEEELLKAKPHEAVSSTPSKFTAILILGVNGAGKTTTAAKLASLYKQEYNKKIILAAADTFRAAAVDQLKIHGQKLDVRVVAHKQGGDPAAVVFDALEAAMSGGADVVIADTAG

SEQ ID NO: 89819 - protein, 345 aa, Unknown
  Obtained from environmental sample
  misc_feature (1)..(345): Xaa is any amino acid
SDDISGWIEQAEFTLFAKAKEMMLFNFFVMVKSGFLPPSTPRFNRLNSIIKQCGKPKGVRLYEPYNADGEDQVVNYLGMIGIPFEPSPDFDEKDSSDSAESEESAESVVFLPLSAAKDAHIMQKLEKFVRNGNTAIITAGFLKECLERGLKDMTSVRPTGRTVNGNEYSVQPYDERRLVSSGAKKIQLEALDYKTNASWCEVAMMTEYNSFPILTVDFYGKGNLFIFNVPNDFGDLYSLPKEVTGYINKVFANGGPYIKSSPRTCMFMYDNDVIGVYSQEPHADDVEIILPVKYSMMRDIETGAEIALISDLSKKRFIGEHGVPFKTARVYIPGGTYRFYKLEKQ

SEQ ID NO: 89820 - protein, 233 aa, Unknown
  Obtained from environmental sample
  misc_feature (1)..(233): Xaa is any amino acid
MRVLLLCDDYWHPGQVPIDGVAPLAGQGFQFDIITNANEFKTDMLSNYPVVLMAKSDQASREDDKTKWKTEAVQQAFISYVENGGGLLLIHSGTVTGKETEALDRLIGCRFITHPNACPVTVQPIKPHPVTEGVGMFCETDEHYRLEILAQDVDILIASYSPDQGEPEKYQEDPYHNTKAWICPAGYVRTQGKGRICTLTPGHLLPVWQNPQYQRTIANALKWCHRVEANKGN

SEQ ID NO: 89821 - protein, 283 aa, Unknown
  Obtained from environmental sample
  misc_feature (1)..(283): Xaa is any amino acid
SIFVGYRYYDHGEKPVAFPFGHGLSYARFAYSNLKLSISSFKSGDKLEVSFDIKNTGDVAGAEIAQVYVAPKNTAIMRAIKELKGFEKVFLQKGESRTVKVSLNARSFAYYNVPKGTWAIEGGAYDILVGASSRNISLRGEVQVTGDGYETLLKDQRKNTPEYFNLGAAKGLKISDASFEVLYGQKLPSSKREAGQIDINSTVGDIKHTGLGKKLEAYVYQEMSKMFTGHNPDDLRIELERMLTEKPLRTLARFGKGKRMTPSMIEALVDVLNGKPCSDSELP

SEQ ID NO: 89822 - protein, 144 aa, Unknown
  Obtained from environmental sample
  misc_feature (1)..(144): Xaa is any amino acid
AAAWGKAFSLDRSNGLYAASAAKAFEQTGKRVEALQHYVDGAQCFLQQKDYAELEALIPKLLAAGKNKHLDPKFAEVLQAALKALPDNKDLLAYAAADKPPKPVKTRKAPVKKPEKKVVKKPTVKTKAKAKAKPVTVRKTVRKK

SEQ ID NO: 89823 - protein, 363 aa, Unknown
  Obtained from environmental sample
  DOMAIN (14)...(324): D12 class N6 adenine-specific DNA methyltransferase
  misc_feature (1)..(363): Xaa is any amino acid
SSENDYLTQQLITYIGNKRALLGFIGDGIRKVQEKLNKEKLRMFDVFSGSGIVARYFKQFSELLLVNDLEKYSTLINECYLSNDNERNEFILRKYYYELIEGAKNGLVKGIISELYAPKNDKDIKQNERVFYTTRNAMYIDTMRQLIDNIPKEYQKFFLAPLLSEASIHANTSGVFKGFYKNRETGIGQFGGINKDALFRITGDITLPFPVFSNFNCETMIYNGDSNEIIHSSPETDIAYLDPPYNQHPYGSNYFMLNLILEYQYPQNASTVSGIPSNWNRSGYNKEHKALRLLADLVTGIKSKYVLISFNSEGYITIEQIRNMLNNMGTVEIMEIKYNTFRGSRNLNSREIYVKEYLFLLEK

SEQ ID NO: 89824 - protein, 522 aa, Unknown
  Obtained from environmental sample
  DOMAIN (231)...(408): Radical SAM superfamily
  misc_feature (1)..(522): Xaa is any amino acid
MNTLSILYAGNLSGFAFDPVFDGKNAIQLSVEQAKKFPGAGKTVLLARTDADFPGITDIQIEKKDIWTKRALLEKISELQAGFDFTFFAFADCPFLDPVLAGKIAERHIQGKAEYSYADGFPFGLAPEILSPGTAGILAKILGDDDGPIERDILFSVIQKDINSFDIETEISSVDLRCHRINLCADTKRGLFLLKNFISASNGKIPAADEVENIVKNQPEILRTLPAFYPIQVYGGCPQKCAICPYPVFTDVMGRKDFMDCEKFSSLLDKITAFSGDAVIDLSLWGELSLHPEKMKLIEEVVRRPELALIIETSGIGWKNEEIEKCAELCGGLEKSAGFRKNALAPLSWIVSLDTSDPQRYAELRGAGFAEAETFAKKLFSLFPNDSYVQAVRVKGSEDDTEKFYRYWKTASPKSEKNIIIQKYDDFCGILEKKQASDISPVIRQSCWHIMRDLPVLINGDVPLCRENLSVLKGEKKDILGNVFADSLETIWQNGDKYYKEQCMKKYTGLCAGCDEYYTYNF

SEQ ID NO: 89825 - protein, 447 aa, Unknown
  Obtained from environmental sample
  DOMAIN (345)...(411): His Kinase A (phosphoacceptor) domain
  misc_feature (1)..(447): Xaa is any amino acid
MRGEYINSPLSGLKKNERSFLNSYGMKSIVIIPMFLEDKFWGFFSVDDCRHERTFSDDEMHILASVGLMMSNAVNRNVQSAKMRDADERMQIMFNTMPLGAIIRNENSDYFYCNESIVNMFELSGKQEFTDKFDQLSPEYQPDGRLTSEKMGEFVRKAFIDGYCRFEWMHQKLNGEPIPCEVTLVRFKYNNEFNLTAYVRDLRELKTSIELVNESEKSLSILRNIINSIDAQVYVTVPHSGEILFVNDYMKKEFNVGDECIGNTCYKIFLRDAYNICDFCPCYKLDKDPNSTVVWEMRNPVTNRIYQNTTRYIEWFDGRTVQIQHSVDISEVIAAKEQAEQSSRYKSQFLSRMSHEVRTPMNAILGITEIQLQDEKIPPGKREALEKIFNSGYLLLGIINDILDLSKIEAGKLEISPIGYDILNLINDTVPLTVMQYEQKPIELKSE

SEQ ID NO: 89826 - protein, 262 aa, Unknown
  Obtained from environmental sample
  misc_feature (1)..(262): Xaa is any amino acid
MINIDHPGKIADFIASILNIDKAEMQKILEILNVRKRMEQVLVFIKKEQELLRIQKKIQKEINEKIEKSQRDYFLKEELKAIKGELGMTTDAKSSDYQRFKDIIEGFKFEGEVKEAVEQELEKFNLMEPNSPEFVVTRNYLDLIVSLPWKDPEPENFSMKNAKAILEADHYGLEDVKNRITEYLAVRKLRGYNDKSAPVQPVAENREQGTENGELANKVGAGTENREPVADKIPPRVSVDAPAGSIICLVGPAGVGKTSVGK

SEQ ID NO: 89827 - protein, 112 aa, Unknown
  Obtained from environmental sample
  misc_feature (1)..(112): Xaa is any amino acid
MLDFQRQMKERRRRDNMESIFGVEEIPSDTQIRTLIDRIEPDMFGGVFNESLLTADEYKVLDSYRVLDGGVLIALDGVWYYSSENIHCKRCLHKTKDGVTTYYHSVLAGTIV

SEQ ID NO: 89828 - protein, 270 aa, Unknown
  Obtained from environmental sample
  DOMAIN (2)...(132): Toprim domain
  misc_feature (1)..(270): Xaa is any amino acid
MLILCEKPSVAKEFAALFNAGHGKGHYQAGDTVITYCVGHLYELLPPEGYDPKYKKWTLEDLPVIPPSFVYRENEPTSGQASIVTDLLKRHKNDDVLVATDAGREGELIARIAMLMAGISDTGRFRRFWVSEALTPSVIEAGIKNARPLSEYDSLAAQGFARQRADWLVGMNLTRFMSVGNPPPPLSVGRVQTAVLAAVAARNGEVKNFVPVPYRKLEASVKSKDGVVIKAFLENPKGSAIHLSLNAIGHTFAKPWKTAKTASSASIPWT

SEQ ID NO: 89829 - protein, 77 aa, Unknown
  Obtained from environmental sample
  misc_feature (1)..(77): Xaa is any amino acid
IRKNTEEIAKPGWHVLDTHMGSGSSAIACHRLGLGMTACEIDPHYFNAAKKRIDAETAQRELFLPELQRFRESHLFE

SEQ ID NO: 89830 - protein, 321 aa, Unknown
  Obtained from environmental sample
  misc_feature (1)..(321): Xaa is any amino acid
YANGPAHGQAGTFEGGVLAPNGKVILAPCYVPHIGIYNPIANTYTNGPAHGLKIEGEDQAFQGGVLAPNGKVILAPASSQYIGIYDPVANTYANGPAHGQGIYAFQQAVLAPNGKIILVPYRSPYIGIYDPVANTYANGPAHGQGKAAFEGGVLAPNGKVILVPRGSVNIGIYDPVANTYANGPAANGFNGGVLVPNGKIILVPYGSPYIGIYDPVANTYANGPAHGQGKAAFEGGVLAPNGKVILVPANSANIGIYDPIANTYADGPALDKLADAFVGGVLAPNGKIILVPANSANIGILSIPGLERSLALCLSPFIHKF

SEQ ID NO: 89831 - protein, 162 aa, Unknown
  Obtained from environmental sample
  DOMAIN (101)...(128): NHL repeat
  misc_feature (1)..(162): Xaa is any amino acid
MVFLFSLLPLYASPTNYTYNYDFWEEQVASPDAYHVGAYILGTSLGIGNFNDPQGLFVRDNRVYICDSGNNRIVLLAYENGEHRLVSEANSVTINGVASPFKYPMDIFESRDGFLYIADTNNHRVLKLDRNWNYVSSILKPDDESIDKDAEFLPLKLVVDFA

SEQ ID NO: 89832 - protein, 291 aa, Unknown
  Obtained from environmental sample
  DOMAIN (188)...(291): Transketolase, C-terminal domain
  misc_feature (1)..(291): Xaa is any amino acid
GIEQVNKSKKSFTESFSGSLLEAAAKDKRIVAVTAAMKTGTGLSVFAQNFPNRFYDVGIAEEHAVTFAAALAARGLRPVVAVYSTFIQRAVDQALHDAALQKLPVIFALDRSGLVSVDGETHQGLFDITLFRSAPNMTLLCPASDNEMKLMLDYGISIETGPVMIRYPKALCPHETEAFSKPLEKGRGTWVSKSENAQVCLAFTGSLYREAVDAAIILKEKGIEADLYNLRFLKPVDEDYLTDLMNKYKLIAFIEEGMREGGFGEYAASLALRRSCSARVVVIAVESAFLK

SEQ ID NO: 89833 - protein, 345 aa, Unknown
  Obtained from environmental sample
  DOMAIN (1)...(315): Basic membrane protein
  misc_feature (1)..(345): Xaa is any amino acid
VTSGSANDMGVTVRLLTDSSGVDDKSFNAAAWRGILEFFGDTAANPRQKGKAYDWVVTQDQSMFVPNLRMVTDQGYDLIIVNGFSWDESLTIVSKDNPSQKYLIVDVDWVEAGDVMQAAYAEHEGSYLVGVAAALKALEDGVASPRFGFIGGMPSPVITKFEVGYVQGILSIIPDAEIVDYYVNSWDEPALAKTQAMIWYDSGVYAIFSAAGNSGNGTIAQAKEYRAMGKNVWAIGVDSDQYEDGLYNSKDSAVLTSMLKRVENSVIYALNEVKNKTFKPSVIVFDLKADGVGYSAMNPALGKNIIDRLELIKTQVSNGNIKVAATLADSMRLPGFPKNLRAIDD

SEQ ID NO: 89834 - protein, 536 aa, Unknown
  Obtained from environmental sample
  DOMAIN (246)...(417): 5'-nucleotidase, C-terminal domain
  misc_feature (1)..(536): Xaa is any amino acid
GLLGFDATTLGNHEFDYRTQGLTDMLNTAVASGERLPFIVTSNIDWDRTLADEKRASKAAELQKALNSYGAAEYTVIEKGGVKAAFFGILGKQADSYAPLSGLYFKDQIEVSKKIVAKIKAETSADIIICLSHGGTDDNPQKSEDELLAAAVPEIDVIISGHTHSTLKEPIIIGNTIIVSCGEYTHNIGRLTLTRNGNRYSPSEYKLLPISGDLPKDADVEAAVQKFKSLADKNYFSRFGYSYDQIISYTDFDFTPVENFGKVQGEDTLGNLISDSYIASIKKAEGANYRKIDVSVVPSGVVRGSFSKGPITTADAFNVSSLGIGPDMIPGYPLVNIFLTGKELKTIAEIDASVSTLMGEARLYTSGLTYTYNPQRLLLNRVTDVKLMNPDGSLSKLSNKKLYRVIGGLYSCQMLGAVEAHSFGLLKVQPKDENGNPITDYEKHIIYNGDMELKEWAALANYLESFEQSGGVSKIPEYYNQLHGRKIEVTSRAPWAILKKPNKIFFMLLGVIIVVLAIIAVPVFFIIRAIRRAKKR

SEQ ID NO: 89835 - protein, 310 aa, Unknown
  Obtained from environmental sample
  misc_feature (1)..(310): Xaa is any amino acid
VKILTMHAAKGLEFPVVFLMNRDSPKSVQCPDTLLWTDADKKRRITPCLSVKDLRDGKINLESLERYQTSQEREHRRLLYVAMTRPQAMLFVPMRSGEKKGKVDNDITPRLDELLERKTNIVEIFNDAVWNRGINNIGNTNINEASLTPLDDIPTLSLQKFISMETSYSQISRELKAASHDDDIPALITDDGDDIIRTDEHHVEDIDTDVDKNQPLPAGRTTGDALHRAIDELMRSNDINAIINDSDTLYKLVERHLKRGGILDLPSTTAPLAAVKQASSYIKTGVNATLPRPKRRRHHHHFRPTKSRPR

SEQ ID NO: 89836 - protein, 360 aa, Unknown
  Obtained from environmental sample
  DOMAIN (82)...(316): Methyl-accepting chemotaxis protein (MCP) signaling domain
  misc_feature (1)..(360): Xaa is any amino acid
MSAVDEIGDMAFYFNLTLEKIKNLVLIIKQQTAVMSQIGSNLSKNMSETAAAISEITVNIRNIKSRVVNQSACVTETNSTMEHITENIDKLNEHVEKQSSSVSRSSAAIEEMLTNIQSVTSTLIKNSESVEALTEAAGVGHSGLQDVATAIQDIARESEGLLEINAVMENIASQTNLLSMNAAIEAAHAGEAGRGFSVVASEIRKLAESASSQSKTIGTVLKKIKGSIDNITRSTENVLNKFDAIENGVRTVAEQESNIRRAMEEQGIGSKQILEGSGRLNEITRQVKDGSNEMHEGAKEVIRESESLDKATIAITQGMNEMAAGANHINSAVNHVNEISGRNREAIDVVIKEVSRFKVD

SEQ ID NO: 89837 - protein, 270 aa, Unknown
  Obtained from environmental sample
  DOMAIN (80)...(174): Methyltransferase domain
  misc_feature (1)..(270): Xaa is any amino acid
AIEYGKEYFFEQYQKQYGKTYIEDFPNLTAMAKRRLAEIKKIGNKEQGTGNREQSIKLEGEYRLSDNKPRTPNPEPRTLLDIGCAYGAFLAAAQEEGFSPQGIDPAEDAVRYVTQTLGIPARQGYFPFPNPVPRTLNPDYEVVTLWYVIEHFRDCVSALAEIKKLLKPGGTLAFATPSFAGISGRSSLKRFLENSPQDHWTVWSPAVCRKALGKAGFKVKKIVGSGHHPERFPFLGKFAHNKKSLLYRLLMAASRIFALGDTIEVYAVKN

SEQ ID NO: 89838 - protein, 284 aa, Unknown
  Obtained from environmental sample
  DOMAIN (7)...(283): Pyridine nucleotide-disulphide oxidoreductase
  misc_feature (1)..(284): Xaa is any amino acid
MYEICCDVAVIGGGPAGLAAAVAAKKQGARKVLIIERDNALGGILQQCIHPGFGLTYYSEELTGPEYAARFITEARELGVESLLNTMVLELASDQTLSRIICTNSEYGITEIKARSTVLAMGCRERTRGNIQIPGTRPAGVYTAGAAQRLINRQNAMVGREVVILGSGDIGMIMARRLTLEGAKVLAVVEIMDYLTGLTRNRVQCLDDFGIPLFLSHTVTWIAGNRRVEGIKIAKVDEDKKPILDTERFIKCDTLLLSVGLIPENELSRSTSITMDTVTCGPVV

SEQ ID NO: 89839 - protein, 53 aa, Unknown
  Obtained from environmental sample
  misc_feature (1)..(53): Xaa is any amino acid
ILREGAVNVMGNGMVIDIEHLNGEIKSLREKGIEISPDNLKISDKAFICMLFS

SEQ ID NO: 89840 - protein, 223 aa, Unknown
  Obtained from environmental sample
  misc_feature (1)..(223): Xaa is any amino acid
AKAWLTAALIVIVVLSGCKTTDKAAKDISLKSTAKVETIEHKGTAFGVTDVPKWLSTFIQGNGTRSVEALPDYKDKYVIIGQANGTGLQQVETWAKNFDAQQQIGATIQTRVASMFKAHENLLPGGADAKRKYDNAIHTLITAIYTGARQEADWWLHQKITEKGKKEPETRYTSFVLFTIDKTVLDQQIRDQIKKLRDDGGKEMNEFFDAITKQLLEKGLEWE

SEQ ID NO: 89841 - protein, 313 aa, Unknown
  Obtained from environmental sample
  misc_feature (1)..(313): Xaa is any amino acid
MPLYEKFTGRHRDDFATLEDLQKNYKLTVPNNFNYAFDCLDALAAESPDALALLWVSNEGKEKRFTYEDIRRLSVKAANFFIAQGIEKGDMVMLTMSRDWRYWPVLMGLHRMGAVAVPATYLLTKKDLEYRINAASIKMLVTTPRFGVIQAMEEALPACPTIKKLAVFGGNLPNDRWVDLDAEWEAAPETPVKRNNVKTDMMLMAFSSGTTGYPKMVWHDYTYPLGHIMTGCFWHRCEEGGLHFTISDTGWLKSLWGKMYSQWLAGSAIFTYDFDKFIASDILVKMEHYKIPSFCAPPTMYRYLIKEDLKNYD

SEQ ID NO: 89842 - protein, 493 aa, Unknown
  Obtained from environmental sample
  misc_feature (1)..(493): Xaa is any amino acid
TLLVTMPGLPMFGHGQIEGFEEKYGMEYRRSYRDETPDWNLVNRHEWEIFPLMKKRHIFSGSANFCLYDFFDPNGHVNENVFAYSNSAGEERALIFYNNCYYQTSGWIRRGAVAIPQKNGTFRQDFLSEALGLHEESRFFSIFREQRSNLWYVRSSKDIAERGLFAALNGYETQVFLDFQEKEDADGAQPGIWESRWALLNHELNGRGVKSLDETLLDIFLKEIYSPVREILSPDHMEKLSNFFSPPKNKVVSDPHSPFPTPHDFIESFREPVKNFEAAAKKYLDGADGKFEPWGRSVLKSGEKKSSGKTKGKAATVKDPNSDPFSEWSSFFGNLLALAETSDRKEHKFLHELKKKISDQPAMLLMALGYNTLTLLRPILNGIDGVDDNSGKEAAALALHWQLDRILAECWESAGVPSAEARRAAEIAIAVLTRTGASVPESCRNAKTSSAIAASIILENYNESDFRKILAVNRFEDVTWFTRKPLKKRCLWH

SEQ ID NO: 89843 - protein, 90 aa, Unknown
  Obtained from environmental sample
  misc_feature (1)..(90): Xaa is any amino acid
RQGNDDIKAGSLLWVNGNDLYAIMVDLEKNKYYIGRFNTNLEVQAVSSVTVHPESSVLIQQGALLTQREDGSALLLNPADLTENLKAPAK

SEQ ID NO: 89844 - protein, 197 aa, Unknown
  Obtained from environmental sample
  DOMAIN (140)...(192): BFD-like [2Fe-2S] binding domain
  misc_feature (1)..(197): Xaa is any amino acid
MSDWIYSDTVKEHFTSPRNVLLEDEKDFAPDSKGQTGNIKCGDQMMMLLKIKDDVITDVRWKTYGCASAIASTSMLSETIKGMKLEEAYKIRPEDLVAKLGGLPSFKIHCSVLGDKALRAAIDDYLSKTGRPGLFVEETVVICHCLGITDKDIEDAFHNGARNWEQLQQATKIGTVCGSCKEKAVDILHGFEHIYGN

SEQ ID NO: 89845 - protein, 520 aa, Unknown
  Obtained from environmental sample
  DOMAIN (1)...(394): CO dehydrogenase/acetyl-CoA synthase complex beta subunit
  misc_feature (1)..(520): Xaa is any amino acid
KEDTHAEFGGQKTIAFEYVTSAEYDEITDGEIQIIGPDIDTIKPGGLLPLGIWVEVAGRKMQSDFEPILERQVHHLINGAEGIWHMGQRDIVWTRVSKSGFAKGLRLKHYGEILHARLLADYPAIVDKVRVTLITDQAEVEKRIAIARKVYDERNRRLEAMTDESVETFYSCLLCQSFAPNHVCVITPERLGLCGAYNWLDGKAAYEIDETGPNQPLKKGECLDPVRGIWSGVNEYVYTNSHKTIDSFCAYSIMDRPMTSCGCFEAICAYVPECNGVMVVNREFLGDTPIGMTFSTLAGSVGGGQQTPGFFGCGKVFLTSRKFLYAEGGYARIVWMTKDLKDLLRNDLLRRFDEQKLPGFIDQIADETVAVTAEDVRKFMEKVKHPALKMEDMTHFAQSEQAGEAEAKSDAVKKDAPSGESASAKTEEAGSIPANIDIAAITEKIKADVTKEVITGIIDILSERFLGKAPSSANSDIKTESANVIKTPRISASDRISAIKSFALPVDSASCSIYSVKLGN

SEQ ID NO: 89846 - protein, 269 aa, Unknown
  Obtained from environmental sample
  DOMAIN (13)...(268): HMGL-like
  misc_feature (1)..(269): Xaa is any amino acid
MRARRYILDTTLRDGEQTPGICFTREQKLKIAALLEESGVHQIEAGVPAASKEEKEIIIKIIENRKNAVISVWGRLVPSDITHAVDCKPDIIHISVPVSDTHIYSKLKKDKDWVINQLYACLDLIKKYNIPLSVGFEDAFRSDPVFLRTVAKILLDFGAKRIRLSDTVGIATPSVIRNVFTELSSHLQGKAEFGFHAHNDLGMAVANTVEAAKCGCLYTDVTVYGIGERAGNCDLAKLVAASSNVFDWGITPEGALKLQRDIFSIISRR

SEQ ID NO: 89847 - protein, 307 aa, Unknown
  Obtained from environmental sample
  DOMAIN (4)...(52): Prophage CP4-57 regulatory protein (AlpA)
  misc_feature (1)..(307): Xaa is any amino acid
VSNKSALSAQDVADMLNVSKNTIYNMIKKGELKSYNVGRKVRFTESEVNAFINRSQISLDAQQTSSALPNGVQTNNGFIICGQDIILDVLSSYMRSYGIPALRAFIGSYDGLMLLYKNKVSVASSHLWDSETNEYNIPYIKRLLPGTSAVVIQLTYRMQGLYVQKGNPKNIKGWEDFGRDDITIINREYGAGSRVLLDENLKLLGITGSSIKGYTTEKQTHLDVASSVSGGKADAAVGIEKIARQVDNIDFIPMKKERYDLVVKKEHINSHEVSAMMNIINSDAFKQEFANIGGYDTSGIGKIIAEI

SEQ ID NO: 89848 - protein, 189 aa, Unknown
  Obtained from environmental sample
  misc_feature (1)..(189): Xaa is any amino acid
MSGLTKLLLMLGNNETQAYGEVKGAYRGEEDLFGSHSNLQPPPANRYNQADLEFIAAFYSLGFNSNKLEEPARRFFELSADAFTAFVNAWMSELPIEKEMLAFGRGILTARDRREAGIAASDRGNDDTRAVLNASGKVQGEIHRMYGLLRFFPGSEGEYIARFIPDFLILPALWEYFTVRFGETPWVIY

SEQ ID NO: 89849 - protein, 541 aa, Unknown
  Obtained from environmental sample
  misc_feature (1)..(541): Xaa is any amino acid
SIRSIKSARPIRAERQKELTVIALRALASAQTNGMLDSFNYVATAKAPVWSGGGSGSVYWLEAAETRNPASALLYALRGRAAQQSVDPGDIDWPSLEAFYTWCDQKDEDGDYKYTCDAYLSESVTIAEIMRMIGNTARADILRIDSKISVVQDIERPSPMQLFTPKNSVAYSIAMFNADVPGAIALQFIDEAAGYAQSELKVYNTPDGNPANNTGPETVQKAGLWGVANSKQARRIGMYNYACLKNRPFVHTIEADIEYLICNKGDWIQYAGDIALAGSAQGRIKGVIWSDGVCVGVDTDEPMVMADGKQYAVRIRRSDGTIILKDVVFSLGKRREKSITYYPGEGQELYDPFIGPLYVVDENDNVYYEPENVLFFIEPFEEADAPKAGDIYAFGERGYEALDLVITDIQPGQNLSAVLTCVEYSPEIFGVDQDGFVLPDFVNKITPVSGAVDSGVVNPDRWRSFSTYHDGEDEPARPSGDGQGGGWHHVETFRSVWQSTKVAESAESGEWGLPVRIRAERGADDVTPIWLSLSPQNIPSI

SEQ ID NO: 89850 - protein, 72 aa, Unknown
  Obtained from environmental sample
  misc_feature (1)..(72): Xaa is any amino acid
MVTDYVTSPVTEKGKIIFGIGVGVISMLIRKWGIYPEGVCFAILIMNAVVPFLNKLLPKKYGYVRRKKEAAK

SEQ ID NO: 89851 - protein, 240 aa, Unknown
  Obtained from environmental sample
  misc_feature (1)..(240): Xaa is any amino acid
METSISCIICIADMNIVPALDQTLAELALPEVFIQRCKQTFLQDRRDFLGLRPVVKLGESRALIYRMYVPAMYEESVMRSIIDVTDLGMGGRGSIFSQHIGILRGTPLSFDMEKLDSLCEKKEKLSIEEHALISCTVSRGSGDALARAILELGIGVPVVFFGTGAGLRDRLGLMRITIPIEKEIIWFLVSRSDADLVEKSIIPRANLDVPRHGFLYRCFVHAPFGKLADQARRACSCCNY

SEQ ID NO: 89852 - protein, 236 aa, Unknown
  Obtained from environmental sample
  DOMAIN (13)...(165): Phosphoglucomutase/phosphomannomutase, alpha/beta/alpha domain I
  misc_feature (1)..(236): Xaa is any amino acid
MAVHDEIGSFLSTMILSHSGWRGVFSVSGDEEDRTGVISEAQGLIAAAAARVFAEYLKHGAAADKPPTVLVGRDSRPSGARLADIVNAALMTHNCEPRFAGITAAPEIMAWARSRGRNCGFIYISASHNPIGHNGFKFGLTDGGVLPAQEMAVLAANLRSLLADPDNAARLEELIKSVMERESAESAMTEAKKEALDSYFKFCNEVAWGLLRSGDGTAAAFRKGIAARPLGLCCDL

SEQ ID NO: 89853 - protein, 293 aa, Unknown
  Obtained from environmental sample
  misc_feature (1)..(293): Xaa is any amino acid
MGDVTEGWSYQEIEAKWGFVDQLLPQNKFGKDGFSKDGTVSDWVLPQAYGPDFYYHGHTRPAGMTEDGHERHRLCVSAIIKKGGRITLEDLAKTWLEDIDPSKFGYVLGCQDQVIYYSIKAGIPPWEIGRYAVWPGLIGTSKMILPIGMVNACNPGRAAQDALELGRLKDIRGVSGNYAIEVCSAIAAACAEAMKPNATVDSIIETALSYLSKRPKAEVEEGLNWAKNANSWKDLRPLYAEKYEGCSMSNAVEVLSGALACFYLAGGKPRESILYAVNLGRDCDCKAYIAGGL

SEQ ID NO: 89854 - protein, 332 aa, Unknown
  Obtained from environmental sample
  DOMAIN (34)...(221): ABC transporter
  misc_feature (1)..(332): Xaa is any amino acid
MNTAVCAELRNISKTYSENAKKANNNISLRLCKGEILCIAGENGAGKTTLMKILCGLEAPDTGDIFINGKKEKINSPLAAKKLGIGMVHQHFMLFPEFTVAENIAMGAEPRKLGLFFDAKKARWNAEKTLIEHNFAVNSGQLVKELSQGQMQQVEICRVLAHNARIIILDEPTAILTEQETLSLFNTLKKLVSKGISLILITHKLREIKQICDRVAVLRKGELIGVRGAADIDEYEIARMMMGENYVPAEKENKPEKVNSQVQDVIVFENVTVNKKGQKRPLLDKVSFQARKGEILGFAGVGGNGLGVIEAVLGGFLHPSQGKIFHNGKDIP

SEQ ID NO: 89855 - protein, 85 aa, Unknown
  Obtained from environmental sample
  DOMAIN (9)...(54): SpoVT / AbrB like domain
  misc_feature (1)..(85): Xaa is any amino acid
MLKTKATVSMWGNSQALRIPVEMTRSLGISANDEVVLEVRENVLTVSKPETPREGTIEYLFKDYSGESFKTELTNPIEPIGNEKW

SEQ ID NO: 89856 - protein, 293 aa, Unknown
  Obtained from environmental sample
  misc_feature (1)..(293): Xaa is any amino acid
MASLFDYISWRGDLEFDKLPFNPVDNIVFSQLSYLPMEGIVPGPKDHDTITVEELAARYAIKQRDNPSEIPNDITVIDATSVINAIGSAPRYKNCKLFAYTNNIDLDQEKQFAAFCAIIGRRRLTRKMLVVYRGTDMTLIGWKESLNLSFITSIPSQKEAVSYLERTARRCRYPLIIAGHSKGGNLAVYASAFCRKRVQNRITVVYSNDAPGFHKQVIESEGYRAICPRICSFIPQSSLVGMLFEHGETPMVIKSTASGPMQHSLVSWEVTYNNMADGGELTEQSRLIDNIIS

SEQ ID NO: 89857 - protein, 316 aa, Unknown
  Obtained from environmental sample
  DOMAIN (30)...(312): Succinylglutamate desuccinylase / Aspartoacylase family
  misc_feature (1)..(316): Xaa is any amino acid
MIKHVSVAALPVAEDFIIQKNRIENNAVAGSKRVCIVTGTHGDELEGQYVCARLAKILNDGKQKLSGIVDIYPAVNPLGIDTVTRGFPMFDLDMNRIFPGSSSGSLAEVAAYDVIRDIEGADMCIDIHSSNIFLREIPQVRISEQNEAELLPWAVMLNVDLVWIHASATVLESTLAHSLNMRGVKTLVVEMGVGMRITESFCTQLVDGILNLLRKLGIWNGAGERAHPEIRAPLVSKDHSVGFLNSDAGGIFLPRAAHASHVSSGDCIGIVIDPLTGNVVEETLAPCDGLLFTLREYPVVFGGSLLARIMEDSKNG

SEQ ID NO: 89858 - protein, 289 aa, Unknown
  Obtained from environmental sample
  DOMAIN (184)...(289): Transglycosylase SLT domain
  misc_feature (1)..(289): Xaa is any amino acid
NRSGESPLTAHYAWIIGRIIEEGIFSPKEAVPDEKFAQVYMRIAYNAAQSVSVIPSYYRSLSAAALGAAFLALPEELPLKALPAPQKSSRKTARQKTPAVENVSDMMQFLMGFFEHDTARYAPRYIKAAEGDLTPEELRRLAEVLGAAGQYQESMRLVSLYANRSGYRLTRQDLELLYPCPFKDLVEQYARETGIEPSLLFGLIRTESAFNSDIVSRAGAVGLSQLMPATAEEMAVRIRRRGGPDYISGEDSPVDLRDPAVNIHIGAVYLAYLNERMEDPLLALLSYNG

SEQ ID NO: 89859 - protein, 515 aa, Unknown
  Obtained from environmental sample
  DOMAIN (283)...(395): PAS fold
  misc_feature (1)..(515): Xaa is any amino acid
MFPEHKYYIEYDSQEEVWSSLKLDNEVDVIFGCNRRLITYTNFYEDAGYRLNLILNYTFDASMGFNKNAAVLKSITDKALGIINVNNIANQWMHKSYDYRKKLTEAQRPWFIGAAGLFLTVLVLTLFFLRKSRSFGRQLEKVVKERTGELSYRTSQLQMMLDTIPDLMFCKDNDLKYTQCNKPFENFIGVPEAKLIGKTDSDGSWLEVESEKKISTVEKTVLEKKEIMKYQEHVSSPISGKNCYFETIKAPLVKDGVVVGLMCIARDITGRKTMAKEIALQASLLKTIINSLPDSVFCKNLELKYTLCNKYMADLFGREINDILGHNDMQAFGFTKEAMEIANNADRIALNECRQVSFEEWMVCGDGTKRLFETVKVPLILDEEIVGILGIGRDITQRKAMEEEVRAASVAKSDFLANMSHEIRTPLNVVIGLTDLVLEDGSLSKEVTGNLIKINNAGSTLLSIVNDILDFSKIEAGKLQISPVEYYVSSLLNDVITLVVTRIGEKPITFSLNIP

SEQ ID NO: 89860 - protein, 300 aa, Unknown
  Obtained from environmental sample
  DOMAIN (34)...(300): Aminotransferase class I and II
  misc_feature (1)..(300): Xaa is any amino acid
MPIAAGIRNALGSSSMIRKMFEEGSLLKKQHGADKVFDFSLGNPDLEPPPEFHRVFLKLAEEDAKGSHGYMPNAGFADVREALARKASREHQVSIDGSHIVMAVGAAGGLNAVFKTICDPGDEVIVMRPYFMEYRSYTGNHGAKLVEVDSLPDFNLNIDAIGAALTPKTAAILINSPNNPTGKVYPAQSIAALAGLLKKHGEKTGRLPYLVSDEPYREIAYNVDVPPVLNAYSESIVVNSYSKSLSLPGERIGYIAVSPDITDKADVMNGLIYSTRILGYVNAPALMQRIVAELTEAVVD

SEQ ID NO: 89861 - protein, 450 aa, Unknown
  Obtained from environmental sample
  DOMAIN (23)...(184): tRNA synthetase class II core domain (G, H, P, S and T)
  misc_feature (1)..(450): Xaa is any amino acid
MAPFIEPKLLKGFRDFLPPAEMIRRDLTEKIETSFRSFGFVPIDTPALEYAEILLGKGGGETEKQIYRFKDNGERDVALRFDLTVPFARFVALHQAELIFPFKRYHIGKVWRGENAQRGRYREFTQCDFDIIGSDSPAADFEILLMIRATLLNLGVNVTIRINHRGLFNRFLAHIGQREKSVDVLRAVDKIAKVGYDETAAALAAITGDANAKKILDFTAAVSGETFEDTLNRITELSGGPSPESERLSLLRRFMSDALSDGDSANGGFMLDPSITRGLDYYTGVVFETFITELPDIGSICSGGRYDNLAGLYSKSNTAISGVGSSIGLDRMIAALESLNKLPATASYTSAAIACIKLEDSGLYQALAQQFRQQGVPCEVFLEAPPAGTTDSADSKQLVKQFVLAEKKGLRWMIIPGADPLRDPLTLRNLAARQNREGLSVTEAVRVINT

SEQ ID NO: 89862 - protein, 405 aa, Unknown
  Obtained from environmental sample
  DOMAIN (262)...(337): Mur ligase family, glutamate ligase domain
  misc_feature (1)..(405): Xaa is any amino acid
MLLESEAGGHTDKILDYELIILSPGVRGDLDILKSAASKGIPVWSEMELGYRVSAAPFLAVTGSSGKSTTVSLLTSAMRAAGFETALAGNIGTPVIDVTPFLSKEAVVVAEVSSFQLETIDKFKPKVAAVINLMKNHLDRYDCEEDYYNAKKLIAKNLTMGEYLVLNADDSRLSRWADEFKGQTRIFMFGSRDCGGDCVYLSGKGINYRMNGVSGVIIDDTSAMKIAGRHNSINACAAAAAALCAGADPKLIGGGLCAFGGLPHRLEIVGEVDGVSFYNDSKSTTAESIECAVNAFGSKIVLIAGGKDKGCDFASIVDSVRQNVKSIVLIGEAKERMAAVWDGAAPITKAAALEEAVDIAFKSAAGGGQVVFSPGCSSFDMFRNFEHRGDMFRETVNRLASRKAR

SEQ ID NO: 89863 - protein, 102 aa, Unknown
  Obtained from environmental sample
  misc_feature (1)..(102): Xaa is any amino acid
MKIETIEIHNFKAFQNAKIENIRAMGVFLGENGTGKTSLFDVFGFVKDCLTENVRSALQKRGGYSEVCSRKATGDISILFKYKPKPESYALHLRIANRIRWK

SEQ ID NO: 89864 - protein, 197 aa, Unknown
  Obtained from environmental sample
  misc_feature (1)..(197): Xaa is any amino acid
VINKEKLSYRRGAGIGKPWDFINFSKGRGQAITNEGTLKFSLAAPDILAIKSLGQMARFGAVVEFRKFLEDWFIADFQIDKMRFAQETSYNESLNRRGDNIANVAQYLYDQHRDKFNSILKKMQERIPGIKKVEAKTTEDGNILLKFHDGRFTDPFSAKYVSDGTIKMFAYLVMLADPKPHKLLCIEEPRNQLYPHL

SEQ ID NO: 89865 - protein, 542 aa, Unknown
  Obtained from environmental sample
  DOMAIN (266)...(512): FGGY family of carbohydrate kinases, C-terminal domain
  misc_feature (1)..(542): Xaa is any amino acid
MDVKQAIIENKTSLGIEFGSTRIKAVLIDTNYAPVAQGSHDWENKLENGVWTYHLNDVWKGLQDCFKELALDVKNRYDLTLSSVGSIGISAMMHGYLVFDKNGDQLVPFRTWRNTTTEKAAALLTEKFKFNIPQRWSIAHLYQAVLNGESHVKDIDFITTLAGYVHWKLTGKKALGIGDASGMFPIENGKYNPIMLKQFDELINSNNYSWKIANILPSILNAGENTGGVLSAQGAKLLDPSGCLRDGIPLCPPEGDAGTGMAATNSVAERTGNVSAGTSVFAMIVMEKELSKVYPEIDIVTTPAGKPVAMVHCNNCTSDIDAWIKLFGELLDINGAKSDKPDKPDKPDKTELYNMLYNKALEADNDCGGLLSFNYFSGETITGFEEGRPLFARLPDGNFNLANFMRTLLFSSMATLKYGIDILTKKEKARIDSLLGHGGLFKIKGVGQRFMAAVFNAPVSVMDSAGEGGAWGIALLAAFINQQGGTLEKFLAEKVFAGKTGTKIEPDPKDVESFRKFMERYTAGLKIERAAVENLKRSDYES

SEQ ID NO: 89866 - protein, 519 aa, Unknown
  Obtained from environmental sample
  DOMAIN (128)...(281): AIR synthase related protein, C-terminal domain
  misc_feature (1)..(519): Xaa is any amino acid
DSEPWLLLFKNETHNHPTEIEPFGGAATCLGGAIRDPLSGRAFVHQAMRVTGGGDPRSGLRDTMPGKLPQIKIALEAAAGYSSYGNQIGLATGQVAEFYHSGFLAKRMELGAVIGAVPEAWVRREEPVPGDLVILVGGRTGRDGIGGATGSSKVHTGESVESAGAEVQKGNAVEERKLQRLFRKSEVSRLIKRCNDFGAGGVSVAVGELAGGLDINLDAAPKKYAGLDGTELAISESQERMAVLCSSGDAEAFIKAAAVENLEAVIIAKITSGNQVTSENRLRMIWRGKTIVDISRDFLDTNGAPRTAKALLPKASHKNGVIDADLPAGVQAELPAGVLIDNLERELVSLRSGSRRGLQERFDGSIGANSVLFPWGGSEQGTPECGMAALLPSLGKQSLTASLMTFGYDSDLLSIDPYSGAKGSIREALAKFACLGGDPFIARLSLQEYFRRPETPETWGTPAAAMLGALEAQLRLGVPAIGGKDSMSGNYRDDSHGIDLAVPPTLVAFAAGTVAAEKV

SEQ ID NO: 89867 - protein, 92 aa, Unknown
  Obtained from environmental sample
  misc_feature (1)..(92): Xaa is any amino acid
LEEALTEIGLIPEWLERGRIQGREEGLEQGREQGREQGLERGREQGLERGREQGLVTAARNAMSKGLPIDVIHDITGLDIETIQALQTNPYS

SEQ ID NO: 89868 - protein, 640 aa, Unknown
  Obtained from environmental sample
  misc_feature (1)..(640): Xaa is any amino acid
MNETFADIAEECGCGRREGLEAFAAALKAQRAYFAEQRKRGAEILKELESDPTRTAVVLLGRPYNAFADEGNLGIPGKFASRGVTVIPWDMLDYDGEPCSMEMNWAMGQNILRSAKVIVRHPQLFGAYITNFSCGPDSFLVGYFRDIMKDKPSLTLELDSHTADAGVNTRIEAFLDIVARYRALNIPAGADAPFPKAFIDYSGRKPMFVASDGARAPLTDKKVHVLFPSMGSLTSDIFAAAFSGAGINASAIPVYDTEVLKVGKGHSSCKECLPLILTTGGLLHYLATRRDKDEYLIYFMPTCGGNCRFSQYNVYIRSVLEKKRIKDVTLLSLTNENGYAGLEVKDTLNVMKGTIVSDVMEDIKNALGVLAKDKPSAMKIFYGEWERILALFRTGKTANLYKLLVDVVAKLKAIPIKYPLREAKVISLLGEIFVRRDYFAVQDLFERLEKREIIVKRAHLLEWLEYCDWNVQNGIFEADFNFLGKLKFRAQRILQLRAEKKIKSILAKSGLYMYELTEMDKVIEYGREFFDPRLTGEPIIVAGTFFKAILQSIHGTIQIGPFACMPTRVVEAVLTAEATVDNKKLLDKKLLGDDRLWDNISTLPFLSIESDGNPFPAILESRIEAFCLQVERLHERVSRR

SEQ ID NO: 89869 - protein, 132 aa, Unknown
  Obtained from environmental sample
  misc_feature (1)..(132): Xaa is any amino acid
MDKKLLEKFDDKNAFIKVTEPSPVNGTDKAALNRKGNQKFNEGDIEGARRIFMTTGYSDGLSRTGDFYKSKDRPLEALRMYWMGHDKNKSLPLIEQLSFLLQDIIHSEDEGVEMDVNPVNEAVQGEQEVKNE

SEQ ID NO: 89870 - protein, 295 aa, Unknown
  Obtained from environmental sample
  DOMAIN (44)...(281): RecF/RecN/SMC N terminal domain
  misc_feature (1)..(295): Xaa is any amino acid
VKAAKDTKETKPTKTAKPAKPAAPAKATRKPNGAKASNDPKPQKLKKIEIKGFKSIESASVELRDLNVVIGANGAGKSNLIGAFTLLERYASGCLSEYVAGKPDRFLHHGSRVTPVMSLNLVFNKQAYSIALKATPDGLFPVKFSSQFKAKILLNADTPNALLTGSLPDSKDDFVTLARAVALSNFVVYHFNDTSTFSPMKKTVDLNDNRMLHPDASNLAAFLYWMQEKEPLSLRMIEEHVRLVAPFFDKFNLAPLKLDPSTLALEWRQKGSTAYFDAHSLSDGTLRFICLATLL

SEQ ID NO: 89871 - protein, 417 aa, Unknown
  Obtained from environmental sample
  misc_feature (1)..(417): Xaa is any amino acid
MENDIAKIIDVSKKPQKAYGIAVDIGTTTVALWLVDMEDRKVIAVHNAYNDQIECGSDVISRINYAKKFLPELKKRILKTINELLIAACKDAGIEANRVICVSAAGNTTMIHLLLGVIPEYIRLSPYTPAVFLPQCYTAGQVGIGACESAPILFAPSVGSYVGGDITAGLLCTALSSPKKYSGVILFIDIGTNGEIVLGNNDFIFACACSAGPAFEGGGIKHGMRACSGAIERVVIDENGKPQIFTIGGAEPIGICGSGVISAIAELFRKGIIDSAGKFSQKKGEYFLCDGISLNENDINNFIRAKGAIFSACQIMLDNAGMSFNDVEKFYVAGGFGRFLDLEDARTIGLLPRLPNEKFAFLGNTSVLGAYLSLVSEESRKRIHGLAGKITYLDLSSEANYMDRYTGALFLPHTDKE

SEQ ID NO: 89872 - protein, 394 aa, Unknown
  Obtained from environmental sample
  DOMAIN (251)...(309): Transglutaminase-like superfamily
  misc_feature (1)..(394): Xaa is any amino acid
ASRETGGVFFAWSAETLAGAQTITPPGFIEVFQSELGYESWSEREIRVRIPDGAISGNLEVRTARGNSRPVYFEITGKPGTKIFKDKKTYTVSYSAEIQIEQAGIPNALYIWMPRPALSASQRDVSLLSRSSAPFVDNYRGSSLFQFHDTHSGTNLDISLSYETDVYAVETNIRNTAVVRLNRPSPMGSAVSLPSALIPSEEQAVRAQVRTIIGNERLPFPRAQRIYNWLVSNVKIQVEPLLNNVTEALENKTADNFSASLLFCALARATEIPAQPVAGVIIDRWGIATKHYWAEFWLDGFGWVPLDPALGAGASPPDFNLREDHASYYFGNLDNQRIAFSRGEHFLPQMTPRGRIASHDREYSLQNIWEEAAEGLESYSSLWSDVTITGMRIQ

SEQ ID NO: 89873 - protein, 118 aa, Unknown
  Obtained from environmental sample
  misc_feature (1)..(118): Xaa is any amino acid
MVTVISLGGSIVAPDGVDEVFLKDFTALIGEFLERDEKRRFIFVVGGGGPARTWQKAYRAVCSSPVDEQADWIGIMATRLNAQLVRSIMGEWCTQEVVTDPTQVEPLMGRVLVAAGWK

SEQ ID NO: 89874 - protein, 88 aa, Unknown
  Obtained from environmental sample
  DOMAIN (1)...(84): PTS HPr component phosphorylation site
  misc_feature (1)..(88): Xaa is any amino acid
MTTQTITICNRAGIHARPAALLVQATKDFSCNIYIEKGNDRINAKSIMGIITLGAAYGTELKIIADGEGEEAAVQTLVRLFESRFEEE

SEQ ID NO: 89875 - protein, 307 aa, Unknown
  Obtained from environmental sample
  DOMAIN (1)...(307): Adenylosuccinate synthetase
  misc_feature (1)..(307): Xaa is any amino acid
VDFLTKYADIIVRFQGGANAGHTVKADDREFIFHLIPSGIMHPNKVCVIGNGVVFDPKQAILEIKDLVSKGISVENRILIAENAHVVLPWHIACDKLKEAKAGKSAIGTTGRGIGPCYSDKVNRHGVRVGDLLSEQELRARIEDIASFRNEEFKKMFDAEPIDPEPVIKEYLDFGKQLKAYICDTVSYLFESLKNKKKIIFEGAQGTILDVDHGTYPFVTSSNTVAGYASCGSGIGPTTIDQVIGVVKAYTTRVGNGPFPTELSDETGDKLREIGGEYGATTGRPRRCGWFDAPVVRKAAAVNGLTH

SEQ ID NO: 89876 - protein, 364 aa, Unknown
  Obtained from environmental sample
  DOMAIN (40)...(221): ABC transporter
  misc_feature (1)..(364): Xaa is any amino acid
MEKKKSVSVSLEGVTKVFKNTKGKSDVIAVHESNFTVEAGELVTLLGPSGCGKTTTLRMIGGLELPTSGKIRIGSEDVTMLPPNARDTATVFQSYGLFPHLTVGENVAYGLKLKKMPKADIDKKVMEFIDMVGLGDLHDRPPGQLSGGQQQRVALARSLIVEPSVLLLDEPLSNLDALLREQMRVEIRRIQKSLGTTAVYVTHDRVEAMTLSDRVIVMRDGKIQQIGTPQQIYEDPDSKFIAGFVGKAAFFPVELLEKRGKTAETASGSSGSSSWACKLKNKTFELSRFASDVELGKEAVIMARPESLRLVESGVGAVEGIVKMNVYLGHSIESFVETSDGEVLIQIDDPATKKIYRRGRKNFH

SEQ ID NO: 89877 - protein, 321 aa, Unknown
  Obtained from environmental sample
  misc_feature (1)..(321): Xaa is any amino acid
LFLEMDGNYDFFPVSGDALARAIWESNKDSGDFKEGMKSVYYLLPYTVSHSFKVSELHALPGVDPAEVNSGGIVSSMKVHLLPVPDESGYDIKGAVLVAAPEENAQGFEQLLRNLSILAWVIFTVLFAVAVLARDPITGYSAIFLFAFAIAFVAYPLFESFRLTLVQEGNFTFNVWKEAFNHRNLQALWGSTKLGIITASVSTIIGFIFAFLVERTGVRHKKLIGTMATMPVISPPFSLTLSVILLFGNNGLITNQLLGLKNFSIYGLKGLVMVQTVGMFPIAFMTISCILKSIDSTMEDAAMDLRATRLTTFLTVTLPLS

SEQ ID NO: 89878 - protein, 202 aa, Unknown
  Obtained from environmental sample
  misc_feature (1)..(202): Xaa is any amino acid
PTTPAAPSAPTIPAALSAPTTPAAPSASNAQAAPSASNAQAAPSAPNAPAAPSASNAQAAPSASNAQAAPSAPNAPAAPSASNAQAAPSASNAQAAPSANSVQDIQTDLNNQKIPTEQKKQKKQKLQPANKEQILQDEQDGQIKHDIQRFNLAIPKELHDALKAISAARQLSLTKTINLAIKEYINDNRLLIEKYEQLFKLL

SEQ ID NO: 89879 - protein, 206 aa, Unknown
  Obtained from environmental sample
  misc_feature (1)..(206): Xaa is any amino acid
AKDSERLAIQKAEAKKLVSEAAAEKERLIKEGQEEAEKIKTEAINEAQFIKEDAQDIKDAAFETGNIIINDTDKYSKNERMKFTQDEQEVYSALKVDLAKSEVPQPEKGETGMKFYERIKNWVKAIVYKSAKKEKEIEEMKLETEKQKKAVDHQLNVLTGGYGDENKLKLAILMLQDKLKKLKQTKTEAQAKELENKKEREGFRKP

SEQ ID NO: 89880 - protein, 200 aa, Unknown
  Obtained from environmental sample
  DOMAIN (111)...(200): D-isomer specific 2-hydroxyacid dehydrogenase, NAD binding domain
  misc_feature (1)..(200): Xaa is any amino acid
MKVAITTSSFAHYSDEPLALLRRNGVSYVLNETGRALTEDEAIAVLQGCIGVAAGTEKLSRRVLDACPELRVISRCGAGMDSVDLGAAKEKGIAVRNTPDAPTQAVAELTLAYALDLLRGVTRMDREVRAGGWKKRMGFLLDGKRVGIVGFGRIGRAAAALFAAFGARIAFADPVANDSVHQKMELDALCAWAQLVSLHC

SEQ ID NO: 89881 - protein, 368 aa, Unknown
  Obtained from environmental sample
  DOMAIN (121)...(255): Fic protein family
  misc_feature (1)..(368): Xaa is any amino acid
VKKFAIHNRKNWTAFSWKESTITPLLNEVIRLQGKICGLMLAMGFSQKTEAMLNTLTLDVLKSSEIEGENLDYEQVRSSIAKRLGIDVANTVKSNGATDGVVEMMVDATQNFKKALTEKRLFDWHRVLFSYGQFPTISVGKYRKEEMQIVSGRMGHLNVHYEAPEPERLSEEMAQFLKWFNEENEPNYILKSAIAHFWFVTIHPFDDGNGRIARAMSDMMLARSDNSSQRFYSMSAQILKARKKYYDVLQKTSYGNGDITDWLLWFLETLKKALLESERITNLVLFKANFWDKHKDTPFNSRQRLMLNKLMDGFTGKLNTSKWAKIAKCSQDSALRDIKNLLDKGILRQDPQGGRSTGYELYILPYTI

SEQ ID NO: 89882 - protein, 93 aa, Unknown
  Obtained from environmental sample
  DOMAIN (3)...(83): Ribosomal protein S19
  misc_feature (1)..(93): Xaa is any amino acid
MSRSVKKGPFIEKSLYKKVLELSKSGERRMIKTYSRCSTIIPEMVGGTISVHNGKTWVPVYITENLVGHKLGEFSPTRIFRGHSGSDKKAGGK

SEQ ID NO: 89883 - protein, 136 aa, Unknown
  Obtained from environmental sample
  DOMAIN (9)...(114): Ribosomal protein L22p/L17e
  misc_feature (1)..(136): Xaa is any amino acid
MENKSGYRAVSKYLMGSPFKVRPVADLVRRKPYPEAMSVLENIPHKGARLIRKTVKSAASNALAGNKQIDEDMLYVKEIYIDEGPRLKRVWFRGRGRADMQLKRMCHITVVIDETLKVAAGKSASAVKAAGVKAGK

SEQ ID NO: 89884 - protein, 358 aa, Unknown
  Obtained from environmental sample
  DOMAIN (27)...(167): Bacterial flagellin N-terminus
  misc_feature (1)..(358): Xaa is any amino acid
MRISHNVAAMNTHRQMGISESDGSKSMEKLSSGFRINRAGDDAAGLAISEKMRAQIKGLNMASKNSSDTISLIQTAEGALGETHSILQRIRELAVQSANDTNTDSDRTELQNEVKLLIAEVDRIGNTTEFNTKKLLEGSAKGVADEIIGTSRINNNSSLALDPGKIAKLSDTVSSDKSWAFDGAFMLVRTGKTSDQATGLVYNPSDFKFVGPNGAEYSFAALGSTSIEGNQTLLKAGTIVAEGSYTIKGTLANNVTTGSVLADTVTSLADGSILAKGSTLTMVDTKKISIEVSGKAIDIELNGTNLKVNGELVASTKTVTLEDGTILSNNAGTVEVKEGRIKTVGAIATATTGPVSAW

SEQ ID NO: 89885 - protein, 408 aa, Unknown
  Obtained from environmental sample
  DOMAIN (25)...(270): Amino acid kinase family
  misc_feature (1)..(408): Xaa is any amino acid
MDNNYVSQVELIREVFHYQTRFEGSTLVFKIDCPVTEDPGFPGLVKDLALLAKTGFKVIIVPGAKENIDAVLKQYNIESQYTSIDNFPVRITTKQTIPFVEMASFDVASKFMTFLTASKVEAIIGNFVRARGIGVQNGVDTEHAGIVDKIFKDSLERVLNLGMVPILPCIGWSPSGKLYNVPSAEIALAVASALKAEKLFFLSVHDRLQVKNLNIKGELETRPDGSLVRLTPQQAELLINSSSVPNQFLSELKLALNASRAGVHRVHLLDAREEGVVLKELFSNLGVGTMVYNDEYDSIRAFHSRDLPDILRMMEPLMQKGILIRRNPEQIQEKKADYSVLEIDGSVRACGALHDWGESQGEIAAVAIDPQYTDMGLGRKIVGYLVEKAREKQNEARFCAYNPILRTG

SEQ ID NO: 89886 - protein, 288 aa, Unknown
  Obtained from environmental sample
  misc_feature (1)..(288): Xaa is any amino acid
ACIHFFSPALNGAIPENFSAREVPKVNALLKLATTATILAGFSLAGVALELPAPAFLLPLLPEGPLAFGRVAAGFFAVLVSLLGVLAACRIGDGQGKEQPQRPKAVFPRFGPVDSFRHALECRRDDPLLFLALAGEAFFYGISSFVLLCLPNLGLRFGFSLTVTSLLSVALTAGICAGSVPAGRHEAGVWRRFMFPAGMGMALGITAAAFAPFFPSALRLPWLLTSFLLAGFCGGFYLIPLVSFIQIRPPAGEKGKILGISNFASFSAILLSGIVFAPLGFLRPTLLL

SEQ ID NO: 89887 - protein, 309 aa, Unknown
  Obtained from environmental sample
  DOMAIN (1)...(70): Bacterial Ig-like domain (group 2)
  misc_feature (1)..(309): Xaa is any amino acid
FSLTVIGANKQLSATVLPANASDRTLLWSSSDPDVATVSPAGLVTAAGMGTAVITAAARDGSGKSDSVTVNTSYIPVQSVTITDADFSLAAGNTKALTVNILPADASNKGLTWSSGNESAATVSSAGVVTAKAAGSAVITAASQDNPDLSSGVTVTVTAVTGVMTPAEIFNSLKGQKIITNGWADRANGGAGLSYANPSNFLLIDDASYPNAKPKREAFTDAINSDNAKFIIVSGDIDLGDGVISDADKSYFDAFDPSTHKRLHGDIRFNIRSNTTIIGINNARLMFGGLNINNRSNIIIRNITFYDAH

SEQ ID NO: 89888 - protein, 531 aa, Unknown
  Obtained from environmental sample
  DOMAIN (2)...(250): Protein tyrosine kinase
  misc_feature (1)..(531): Xaa is any amino acid
MGRVYLSEDPILKRRVAVKVIPTDRNLEPAVRREFLERFAVEAQACAMLNHPSIVSIYDAGEEGGAPWIAFEYVSGEHLDRLISQKTPLPFDRILRIAGDIAAAMRHAHGMGIVHRDIKPANILIDEASGIAKLADFGVVKSPHAAITHSGTAVGSPGYMSPEQIDDLNVDARSDIFSFGIVLYEMLTGVHPFLRDTVQATFYATLSCNYKPIRELRADAPEKLVKFVEMSLVADRNLRIINADELCSMIAECLSDDDVTKTRIMRIGTGKHGAVKQVKFGLALALRKLRSLRKALPPAANRMVTAAGAKYKKSIRPFAKNAFNKIYGPLEKRFSKKQLAIGLTGVTSLIAAVVLILLFASVNAKISDKNHLVKAAQEKGYSVKTGKQLIDACREYIDKCDYFNANQLADILTTGKGKNYVLSGSLFNAMAALCADRFNDAAALFAKVQELKGGEAAIRKEHPFYIRYLEAWIERELPDPLITLCAEHLYLYDNYQVMEWTKNEHYWVRWNAVYIRQKGGQKIDLVPVYIL

SEQ ID NO: 89889 - protein, 263 aa, Unknown
  Obtained from environmental sample
  DOMAIN (1)...(253): Inositol monophosphatase family
  misc_feature (1)..(263): Xaa is any amino acid
LTIAISAAREAGEIQLDGLKKSASLNIEKKSDRSPVTAVDKACETRIREILLNEFPNDGFLGEETGENAGTTKRRWIVDPLDGTRPFIRGIPTHSVLIALEEDGIPTVGVIHLPAMGLTCYAASGAGAFIDGERIHVSSTSDISEAMGSVLGITEYAGAPLGDDLIALTRAWDYTYGFMDAYSYVLLAGGRLDACVNLLDKPWDCAAAACIVTEAGGRFSSVSGEKTVHGGSIVLTNGILHEAALGFFKTLVPRGARGSIAQS

SEQ ID NO: 89890 - protein, 64 aa, Unknown
  Obtained from environmental sample
  misc_feature (1)..(64): Xaa is any amino acid
SGAWFQLQNIDLNIAGARIIFHSQLLDMIPYLATIIVLLIITRRKKKEYQAPAALGTSYFREDR

SEQ ID NO: 89891 - protein, 151 aa, Unknown
  Obtained from environmental sample
  DOMAIN (4)...(113): ABC transporter
  misc_feature (1)..(151): Xaa is any amino acid
EKDASVAEIREGAEISQALDFIEERAEGFESYLSQGAVNVSGGQKQRLSIARALIRDPEILIFDDSFSALDFATDAKLRQALEEKRKNVTKIIIAQRVGTISQADKIIVLDNGKITGMGTHTELMETCGEYREIAESQLSEEASPSKEGVS

SEQ ID NO: 89892 - protein, 607 aa, Unknown
  Obtained from environmental sample
  DOMAIN (37)...(318): ABC transporter transmembrane region
  misc_feature (1)..(607): Xaa is any amino acid
MGGGGPGGFAAMGSRAKNFKGTMRQLFSYLKPFRFTIVIVWVLALASTVFTIIGPRIMGLITDELVAGVARQLAGTGSIAFNSIASILLGLFVLYIISAFCSWLQSFIMTNVSIKVTYNLRDDINRKIHRLPFSYFDGVSHGDILSRLTNDVDTINQTLNMSLTQIITSVCSVAGILCIMFSVSWILTVISLCFLSFSIIFITLIVRQSQKFFKDQQRSLGTVNGHVEEMFSNHLIVKAFSGEAESVKAFSVFNKELYQAAWKANFFSGLHMPLTNFVGNLTYVAICVAGGIFAIRGTITIGSIQAFLQYIRSFNHPLTNIANISNILQQTAAAAERVFEFLGETEEVPDPVPAQPVPRSNSVLAFEHVYFSYDPKKPVPVIEDFNARIEGGQKIAIVGPTGAGKTTIVKLLMRFYDVNDGSITIDGKDIREFTRNDLRSLFGMVLQETWLFSGTIAENIRYSRSEASDAEVEAAAKAAQVDHFVRSFPDGYNMVLNEESDNISAGQKQLLTIARVILTNPGILILDEATSSVDTRTERLIQKAMDLLMKDRTSFIIAHRLSTIHNADLILVLKNGEIVEQGKHRELLESRGFYAELYNSQFAGREI

SEQ ID NO: 89893 - protein, 41 aa, Unknown
  Obtained from environmental sample
  misc_feature (1)..(41): Xaa is any amino acid
NYDYIFKAVDALGYAGYIGCEYNPANGTEAGLGWFAPYRNK

SEQ ID NO: 89894 - protein, 98 aa, Unknown
  Obtained from environmental sample
  misc_feature (1)..(98): Xaa is any amino acid
MTKRLHPSSITFVPLCLCVTLFAAPFLAAQSATQSAYITGGSDVNAINAAAEFRIGIHAYNRYAFNEAILSFERALAFRPGEAIIMDWLGNALLPLRF

SEQ ID NO: 89895 - protein, 93 aa, Unknown
  Obtained from environmental sample
  misc_feature (1)..(93): Xaa is any amino acid
MVVGNRIETVTNRRTLLPTADDDVRYIESGRYPGRSENNIYYRQPTSVLPHNDGSTWVVAYGSNEIVRIDANGIIRDRKRGPLNGFDRPYDLV

SEQ ID NO: 89896 - protein, 446 aa, Unknown
  Obtained from environmental sample
  misc_feature (1)..(446): Xaa is any amino acid
ISPIFHYQVTVNYLVKDLIAKHIIDSIDKIIEQVKDERIDKGQEELSDSEIIFAKLNRIEQFTDDNSEEAKSKRYSILAKALMDRISDLRAEIDPESFDALNVRENIKKIIDMENIRNRGFNTAINSITSILDTSKMGYQYIENLKNGREVIIREYEDTDIANLPDERYQIKMRYFDNAQLIEDRKAFDVMMKSFETEVQHLWDVLEVIYQDSKSIFRITDFQDLAKKNKNRIRKVIKEKSGEPLYEDIAKVWDEISFVKPAETEVEKSNRTYIWEKDRVRTRIIRMRDKMKKMWDFLYPVERRVMEERLGWVEKEYYRFDYMINPYHLQPGLLLDVDITSIKRKKITLDAMANVLNEFLHGVSKGFSDAAFASFSRRRSTVREDINQSFSAPVEEEEESVASAAPRAKAIAAPRAVAKSAPKKKGVVDSKAKKRPSRGGSQLSEI

SEQ ID NO: 89897 - protein, 412 aa, Unknown
  Obtained from environmental sample
  DOMAIN (3)...(238): Pyruvate phosphate dikinase, PEP/pyruvate binding domain
  misc_feature (1)..(412): Xaa is any amino acid
KDFAANEVLFMINGMMNIEERIRELEGKTKEKEEIAEKNKLIKRLLGIKGPSNELHEEDKTPMPKKKTAEEYMDDYAQYFPKGFFDDAESQLLITLSEISKLLKMDEQNNNDTAIGIQPMVYGNYGKDSCSGHFFSRNVVTGEKKLQGSYFTGKFNEIGATGYDINKIDPAHLKQLEKIAGTLEDKFKEIRQVRFTVENGKLWLIEQRLVDQKSTQADLKLLLDLLKRKIVDEAYVIKAIDPIRLNEILHPVINMSSVKDLKSWKGGIAGAPGAAIGQVYFSTDALLEAKRQAAQKGKDDRFILVLESSFAEDVKAIEVSTGVLTAEGGYSAHASVVARQYGKVSLVSPELKIKGNKASLGEFNFSEGDYITINVPFYGESTVYEGVTDLIEPNPKESGLLDFISLSKKFLK

SEQ ID NO: 89898 - protein, 155 aa, Unknown
  Obtained from environmental sample
  DOMAIN (52)...(155): Glycosyl hydrolases family 2, sugar binding domain
  misc_feature (1)..(155): Xaa is any amino acid
MKASLIPPIWENPEIQEINRLPMRSPLMPFCSAKDALADAIAGPEFRTPEANGFYQSLDGVWRFKLLNNPMDDFGAAIAGLNVPEWAAPSYDAGDWAELKVPGTWTRQGFDKPHYTNVQMPFQAELPHAPEDNPTGLYRRSFILPPAWENRRIVL

SEQ ID NO: 89899 - protein, 189 aa, Unknown
  Obtained from environmental sample
  misc_feature (1)..(189): Xaa is any amino acid
AVYTEQTIRLDLGDILLLFTDGIEESIRRFRNEKFDEILCADGPEGASHENHVSGQAFEELGFDRIKDIVNSVMNKGVYILHKWHNGEGDDRELMFDFRSSNGSIEDVIMAMISVEKMFRCYYNPNAAGESRVLVDKIVDAFLKKYFLQYRDYCSFTVENPGYPAYIYYDSIMEDEQCDDLTILGLKRK

SEQ ID NO: 89900 - protein, 248 aa, Unknown
  Obtained from environmental sample
  DOMAIN (1)...(131): Dihydrodipicolinate reductase, N-terminus
  misc_feature (1)..(248): Xaa is any amino acid
VKAAIVGLGRIASLLEEDSLREKPCTHAGAIAANADCELVAGCDIDEERRLLFAQKWQVPVYADAAEMLRVQKPQILAIATHPDSHYHYCRLAADSGVKAVICEKPLADNIREARKITRLAENGLAIITNHERRYAEDYIRAKAILGSGKLGLLLSARAVLYMGRTQRLLDVLWHDGTHLADAIMFLTGMSLKHKKRRGAKLTANAGTAWLEGELTMNNTPNSSPAPYSPLPTPYYHRNWRRQGSPCL

SEQ ID NO: 89901 - protein, 610 aa, Unknown
  Obtained from environmental sample
  DOMAIN (121)...(144): 4Fe-4S binding domain
  misc_feature (1)..(610): Xaa is any amino acid
MQAAYFKISGILAEADAVKRMKEHIEHSYGKKGKDVVEKNYKTVDASLNAVEKVEYPSKTEGDIHMKKPFATAKDSWIKDVLGTMSIQEGDSLAVSKIPEDGTFPTATTQYEKRSVAEQVPVWNPDVCIQCGNCTVVCPHACMRFKNLTDAQVAKAPAGFKTAAIKPKPVDGQKAALVIACEDCYSCGVCLNVCPMSKDKSKPMALSWKSYADDHQFHAEQVAVWDYFLSLPETPAGELKNAKAFAYKRPLFEFSGACGGCGETPYIKLMSQLVGDRALIGNATGCTSIYGGNLPTTPYAQRADGRGPVWANSLFEDAAEFAMGFRLTSDKLAVHAREIAEKAKSEGIAASVIDKILSNDQADEAKIDEMRKSIDELKAAIKNDSKPTAKLLLSLADFFVKRSVWGFGGDGWAYDIGFGGLDHVLASGKNVNLLCLDTEVYSNTGGQMSKATPIGAIAKFANAGKEMTKKDLGAIAMSYGYVYVAKISLGADMNQTIKAFREAESYNGPSLIIAYSHCINHGIDMSKGLEHGKAVVTSGLWPLFRYDPRLKDQGKNPFQLDSKEPSTSIEDYMYSEVRFKSLKQADPARADALLSKAKAHAERVGKSTSI

SEQ ID NO: 89902 - protein, 625 aa, Unknown
  Obtained from environmental sample
  misc_feature (1)..(625): Xaa is any amino acid
MKAKLCSILVIFLSLSLITCNVFNAEPYKEQNENGFRSIHLSGGLEGIMNRLAFGTSSRQVYDTPLEQDRSIRPYGCVIQDSEGGDFPGYTGERKIVITAINGTNNAGKIAGSEDGIAYYFKEVDKDKNFRISADFYINNYGFTGGRPDLNGQEAFGIMARDYVPQYNIDTGNYTMEALKTVRWDGRYYTGYNRPDGPGGSGNMIMVGGVKRGARVYWRTGVDDPSEDNEAITNPNYVARADFAKFYFLPREFADYSMYGSGKDGIQSRPDFPSAGLTYRLSLEKTNSGFKAKITPPAGVGKGTTKDRIPKDGQVLEYSDRELPFPDLLFEINKEKYYVGFFAARDARVTITNINYEESDAALCPKRVDPPPASIVPSFSVQSPSAVSLPTYTLIARSNVEGSLLVSMNGKEAKAYNGVWITEATNASAEPFSLFEIPVDALSSGDNVFSLVFTPDTNQSKSGYLIGKEYLMTDIKPIFQSFTVNYRTLPDGDIYVSPDGKSSNTGARNSPMDIMTAISYVAPGQTIILMDGIYTPCEAPQMINGKQRIPIRLIIPRYNSGKPNLAVVADPEKPTDAERAKPEYYKYFKVMKAENRDKAIFDFRKDWTMRGYDARGFELHGDYWH

SEQ ID NO: 89903 - protein, 568 aa, Unknown
  Obtained from environmental sample
  DOMAIN (13)...(92): Cache domain
  misc_feature (1)..(568): Xaa is any amino acid
LSARASGGSIAETQPYLDIVTGEAIFTYSCAIYDDNGIYLGVISVDARTEYIGNKVVNIAVSKKGYGFLIAQDLTVLAHSNQEFVGLKLSDPRIPLFRLVSEMMTHGKVSETPLVNWLGEKTVCYIRELPNGWYEGLLMPKHIYYKKVRYMAVILMALGIIFASVISFVLIGVDAAKNKSDMESRHKSAFLANMSHEIRTPMNAIIGMITIGKSAQDVERKDYCFTKIEDAANHLLGVINDILDMSKIEANKFELSPDEFHFEKMLRRVLNVVNFRIDEKRQVFSVHVDQAIPRILVGDDQRLAQVIANLLGNAIKFTPELGSIVLAARLVGEENGICTVQVSVTDTGIGITAEQQAKLFQSFEQAESSTTRKYGGTGLGLAISKNIVEMMGGKIWIQSEPGSGSTFTFTFQAKRGTGGRAGLLAEDVNLSNVRILAVDDDPEVLAYTRDIAHSFGVTCDTTTNGEEALALVEKNGPYHIYFVDWKMPGMDGIMLSRELKARTSVESESVVIMISAAEWSSVAEEAKRAGVDKFLSKPLFPSAIAEIISECLGVDRKQAEKAQAANIA

SEQ ID NO: 89904 - protein, 372 aa, Unknown
  Obtained from environmental sample
  misc_feature (1)..(372): Xaa is any amino acid
MHHYKSLVKETAVMEKRVLVIDDYHCIEDRSVLRFIEEGFLRNMLQGSTVVVISRSISHLNVAGMTYRDQIFNISEDDLRFTENELTQYFRGIGSSFQPDSLREIMQDTEGWAFAINLIARSCQKAPGYSGYVRNAMKQNIFRLLETEIWDGLPEQMKIFLVRLSLIDHLSVDLISRLAGGEEELIAGLEKQNAYVRRDNFINAYFIHPLFLEFLSTKQEILSEEQKRETYAISGDWCACNGFNIDALFYHEKTGNYQSILLVLTGLTTQIPQDIAKYAAAILDRAPENAFDKVEFLADMHLRTYICQGFLQKSLELVKYYEAEFLKLPEPQPSSVSCVEPEVRGSPLEHDPIRKRTLTRLYICWTYIRCLM

SEQ ID NO: 89905 - protein, 221 aa, Unknown
  Obtained from environmental sample
  misc_feature (1)..(221): Xaa is any amino acid
MLKMKERERANGWPSFVDVFSNLVIILIFLLIVFVFLWTTTNIFHKGGGLSQLSELKRVSLEQSEKIAELEERGEEAEALLLAARDELLSLDSKRVESDALIEQLRADKEQDQETVRRAASLQAELERLNAALSDAEQKRRDTEVEYAAMSERLNKALADKVSELTQLSKYQSQFFGAVRDALSGMGGVDVSSDRFVISSDILFPLGRFGLSREGKKQLKL

SEQ ID NO: 89906 - protein, 84 aa, Unknown
  Obtained from environmental sample
  misc_feature (1)..(84): Xaa is any amino acid
APAGFAEMLNNLSFEGDDVMETVRSGLAGPMKSIGTAFSTSFFGLSGSLIVGFLGLLTGFAQNAMFRELEEGLAARTVIKDYKD

SEQ ID NO: 89907 - protein, 419 aa, Unknown
  Obtained from environmental sample
  DOMAIN (2)...(419): Glucuronate isomerase
  misc_feature (1)..(419): Xaa is any amino acid
MARSFMDENFLLETEMARALYNAAKDEPIFDYHCHLSPAQIAGNKQFADLAEIWLGGDHYKWRMMRALGCDEHYITGGAEPYEKFLAWARTVENLIGNPLYHWTHLELRRYFGINETLTEKSAPSIWEKANAMLQRPELSVKGIFEKFRVYAVGTTDDPADSLEFHRAIADGNAPIGKIATKVIPSFRPDRALNINLPGFAAYIETLATASGVAIKNVDDLLAALEKRLDFFAGIGCRASDHALEYAPFVLASDSQIEKTFQDAITGKEITRESADAYKTKILCSLAKLYAERNMAMQLHFAAIRSVNGRMFKRLGPDTGYDAVHDWEQSANLSALLNHMESAGGKPSLPKTILYTLNPKDYYPLVTIMGGFQDNYAKDENRKGVAQGNSQGIAGKMQLGTAWWFCDHRDGMEEQMSIL

SEQ ID NO: 89908 - protein, 293 aa, Unknown
  Obtained from environmental sample
  DOMAIN (160)...(293): Malic enzyme, NAD binding domain
  misc_feature (1)..(293): Xaa is any amino acid
MDYAEESLKKHYEWRGKLETIPKMPVSTREDLSLAYTPGVARPCLEIQKDPQKSWDLTGRWNTVAVVTDGTAVLGLGDIGPEAGMPVMEGKCVLFKAFGGVDAVPLCIRSKDVDVIVDTVALLAGSFGGINLEDISAPRCFEIERKLKARCDIPIFHDDQHGTAVVTLAALLNALKLTGKKLENISVVTSGAGAAGTAVIRLLLALGLSDVVMCDREGALYKGSPGMNSEKAEMAELTNKQMKKGSLADVIRGADVFIGLSVPGTVTTDMVKSMAPNAILFPMANPVTEIMPD

SEQ ID NO: 89909 - protein, 293 aa, Unknown
  Obtained from environmental sample
  DOMAIN (2)...(279): NQR2, RnfD, RnfE family
  misc_feature (1)..(293): Xaa is any amino acid
FAVAISAPVSAVLTELLMTSTVHGLGKIQDGSAAASAMVLALLLPNYIHPVYAALGAAFAMVVVKHSFGGLGSNWMNPALGGWLFIRFSWPQAFASALNGSAESLPQAGSATDQVIRDFLNRIVFMFFGAELPSGYIDLFSLQSPGIIADRAVLTLVFAVAVIAAFEISRSWLSVLYLAVFGFLIRMVGDSNAWWNGDVILAFLSGGTLVAAFILVVDPSTGAKSMPGNIIVVLLAAILSMVFRVYASAFYGCFFAVALVNAFTPFLCKLECHLLYSLSSSVYHISHENTVPK

SEQ ID NO: 89910 - protein, 287 aa, Unknown
  Obtained from environmental sample
  DOMAIN (75)...(238): Radical SAM superfamily
  misc_feature (1)..(287): Xaa is any amino acid
MNLPLFFTETDEVVICNLCPNSCRIQSGRFGSCGVRGNKGGKGIIPFYGFISALAMDPIEKKPLYHFKPGSKILSLGFAGCNLHCPFCQNWHISQNTDIPGKWMEANEVISAALHNDSPSIAYTYSEPLIHAEYIIDCMVLARKHGIANVLVTNGCINTEPAAKILALTDAANIDLKCFSAQVYGKTLAGINNENIFKTVCEFIKLSHEMGVHIEVTTLVVPGLNDSAEELNAAAQFIASVNSEIPWHLTAYHPDYRWNAPRTDPDFLLKTAKEANKILKFVHTGNI

SEQ ID NO: 89911 - protein, 262 aa, Unknown
  Obtained from environmental sample
  DOMAIN (134)...(258): NUDIX domain
  misc_feature (1)..(262): Xaa is any amino acid
LSDRAFFYQNDALLLPGDFPDSEIEKGLPKVLANNFANTDIFEVPPLDPASPMINAVSVFPGTELPSGWRSIPVRYLFTVISAEGMSRILRACHIAQWRNDSRFCGRCGARNIDAGKNPERRCPACGRIEFPRICPAVIIIITDSENKILLAHNKKFIANVYSHISGFNEAGETLEETVVREIREEVNIEVKDIEYIKSQPWPFPYSLMAGYKAKYSSGTLHPDGDEIEDARWFTKDNLPALPREGSLSRYLINCWINDTPY

SEQ ID NO: 89912 - protein, 92 aa, Unknown
  Obtained from environmental sample
  misc_feature (1)..(92): Xaa is any amino acid
MVLVAQGYAAERVNRANGDVARFNSVYDEYRRSPDVTKQRLYYEMVEEVFKNENDMTIIDRNLKNFLPMLNLNSGNTIRSAPAPSQGAQGGR

SEQ ID NO: 89913 - protein, 243 aa, Unknown
  Obtained from environmental sample
  misc_feature (1)..(243): Xaa is any amino acid
MVVNLAPTKVFTALAEAYNTGKYSLYALQGGTRSSKTYSILQLLILICAKADRLLVSVVSETLPHLKRGAIRDFHKMFGIFTGSPGWHGTDHVYTFPNGSRIEFFSANNESRLRGAERDFLFLNECNNITREAARQLMMRTRRETFMDWNPQAKFWFHEKYLNLPETWFHISTHWDNYHLEESIRTRIEATKYTDPDWYRVYGMGQIGKWAGKVFKNYRLEDLGEVYGAIDPYCLRYGLDFGY

SEQ ID NO: 89914 - protein, 358 aa, Unknown
  Obtained from environmental sample
  DOMAIN (163)...(283): Miro-like protein
  misc_feature (1)..(358): Xaa is any amino acid
VEKFADEATIEVSSGKGGNGCIAFRREKYIPKGGPSGGDGGRGGDIVFTVRRNLRTLAHLRYKHTFKAQNGHDGENWGRYGANGDDLIIPLPPGSIIREEETGELIRDFTKNQDDFIFLKGGNGGWGNIHFKSSVNQAPRKALPGKPGQTVKLKVELQIMADIGLVGFPNAGKSSLLDRFTNARPKIAAYPFTKKIPNLGVLTAGEKDIIIADIPGLIEGASGGAGLGIQFLKHISRTSALAFLIDLSDENYLTAFDILLKELGSFSSRLPQKKRLLVGTKTDLPETEGRLAELAAKYQTEEIMGISVFSGEGVKELSQAFMRLTQEDESPAAAQDIQNEAEMVYSELDDDDFEGEDE

SEQ ID NO: 89915 - protein, 85 aa, Unknown
  Obtained from environmental sample
  DOMAIN (2)...(81): Ribosomal L27 protein
  misc_feature (1)..(85): Xaa is any amino acid
MARKRGGSGAKNGRDSQPKYLGVKASAGTSVKAGTIIARQRGTKIHPGTNVGCGGDYTLFALADGKVSFHQRRGRKLASIIQDAQ

SEQ ID NO: 89916 - protein, 403 aa, Unknown
  Obtained from environmental sample
  misc_feature (1)..(403): Xaa is any amino acid
LSLSKAGASRLLLGLIILLIVLGAAAAVYTLRSNPVEDALAANRVISILYVIEEDKKPVSTYVLMYYPGTNRAAVFDIPGNLGLLITKINRVDRIDRVYDSSRIGSYENEIGKLLGIEINFSIVFTKENLISLVDILEGVEIFIPTSVSYRENDTLILFPSGITILDGDKAAVYASYRLPDEDNEMIVFRRQRFFTGLLDRIVSMNASFKNPDAAKLYYSLFKTNMNRRTLVQLLDEFVSLDAYRTNIQSVGGNLREVSGQMLVIPHWDGNLVKEVVRQTLGSLTRRTESSGQRTSTVEILNGTATTGLAGRTAEMLRSFGYDIISVGNADRSDYEKTVVIYFSPDDVMAKAFADVINCTNIRSEFVPNDEPENQLDIRPFDYKADIRLIIGKDFNGRYVIKN

SEQ ID NO: 89917 - protein, 402 aa, Unknown
  Obtained from environmental sample
  DOMAIN (233)...(348): HD domain
  misc_feature (1)..(402): Xaa is any amino acid
VKLGIFGGSFNPVHYGHFFLVDAAVSKLKLDRVVMIPAFRSPFKLEAENMEGGANDRLDMLTTAAAGDSRVAIDDCEIRRGGVSYTVDTIEDIAARYLPDGKPALIIGDDLAADFPKWRDSKKILELADIVIVRRKKSVSGNSEDIYPFAHILLDNEIMDISSQMIREKIKTDQDWRSLVPAGVRVIIEDRRLYGYNGKGQSSNIKFANDKDCSRENILRIEEEARRVLTVERFLHSRNTALLAHDLCLRFGINPKAGYLAGIAHDLAKQTEPKLLLKMVKDDGLPVTDIEKTKPNLLHGRAAAVLLKERFCIHNKDVLEAVAFHTSGKENMSPLAKVVYIADKIEVSRNIESALRKMCVNEDLDSILYAVLKKQIGKLQSKGVNLFEDTLRLLNKMKERAR

SEQ ID NO: 89918 - protein, 84 aa, Unknown; identical to SEQ ID NO: 89722
  Obtained from environmental sample
  DOMAIN (2)...(81): Ribosomal L27 protein
  misc_feature (1)..(84): Xaa is any amino acid

SEQ ID NO: 89919 - protein, 68 aa, Unknown
  Obtained from environmental sample
  misc_feature (1)..(68): Xaa is any amino acid
MELEYTYWVEDDGLFIGYLNSYPDHLTQGHDLKELEEMLADVYQIRQEEEKRLAQKRKNGILRIKVPA

SEQ ID NO: 89920 - protein, 122 aa, Unknown
  Obtained from environmental sample
  DOMAIN (27)...(81): Helix-turn-helix
  misc_feature (1)..(122): Xaa is any amino acid
MFNKINLSKEHIGMDGEELKTALGQNIKNLRFHRQYSQAELAEKADISIIYLSNIERGKKFPKPNILTQIAEGLDVEIFELFKTNHIPAVQNVNKKYINHISKDITQKVIQAMETGFKKYTK

SEQ ID NO: 89921 - protein, 496 aa, Unknown
  Obtained from environmental sample
  DOMAIN (244)...(369): Dynamin family
  misc_feature (1)..(496): Xaa is any amino acid
MTKPDYGDKDPIAALATALGESALAIVRTSGSYGGGKSAIDLLAEIFSRPQALLSAPGNTIVHGWIVEPPDSNSKTIKKLDEVLVSVYRAPHSYTGEDSADISCHGGIAAVKAVMAALKRTGFREALKGEFTFRAFMNGKLDLTKSESVMELVAAKTNRGREQAVMRLSGVLQREISAIKETLVEVLAAAEIFLDYSEDEFLSPDEESSGALPNKALAEKAVEKLKLLSELWSRERLYTEGALAVLAGLPNAGKSSLFNYLIREDRSIVTDVPGTTRDWIEAVISIGDIPLRLADTAGLRKTDNNAPDSKAFDEAEKIGVERSMELLEKADLVLYVVDGVKGFTEEDREFIAKHSETRKDNPLVVLWNKADLVKPSAFSSEKTQFFPVSAKTGEGIPELLRLMADLLEKSSQSSLSSSTEDQLLQAAGPGSLRQKELIDSALSDIEEALSLADQGESLDLIAPLIRSAVNALGEITGEVSNADILKVMFSRFCVGK

SEQ ID NO: 89922 - protein, 608 aa, Unknown
  Obtained from environmental sample
  DOMAIN (84)...(227): GAF domain
  misc_feature (1)..(608): Xaa is any amino acid
MIPVFTHGEFWGVVNFQDHTVDRYFDEDCDDLLYSAACIFTNAIIRTGMSRSAEKAFEALKRREKMASALNRAAISFLSQSEDTFEDTMTEGVKEIADVLDLDRLSIWRNFHMPDVMHVSQIYRWDRESGGTTEPTTGLEDVTYDQLAPRWEKLLASGETINSPVRLLPEAAMLQTFGTVTVFITPIFINNIFWGFALLEDRHTERFFEEDSIEMMRSAILLCANTVIRADMEREIVNANEFNHAILDASPLGFTIFDENARVIDCNDFILKTFGTTRKYYLEHFYEFSPEYQGDGIKSADKAAEMVMRALRGESLVLEWTNCTARGEIIPYEVTLVRAMYKGKYAALAYQYDLRNSKIMERKLKEALHNAMEASKAKSDFLSNMSHEMRTPLNAITGMTTIGKNAKDMERKDYALGKIENASTHLLGVINDILDMSKIEANMLELSPCEFIFEKMLQKVVSVINFRVDEKRQKLVVRIDKNIPKTLIADDQRLAQVVANLLSNAVKFTPEEGTIILNANFMGEKNGSCTIQVSVSDTGIGITEEQQKRLFSSFQQAESSTTRKYGGTGLGLAISKSIVEMMDGHIWVQSEPAKGSTFTFTVQATRGE

SEQ ID NO: 89923 - protein, 84 aa, Unknown
  Obtained from environmental sample
  misc_feature (1)..(84): Xaa is any amino acid
KILAGYHHERWDGTGYPRGLAGENIPLQGRLMAIVDVYDALVSVRPYKEPFPPEEAIEFIKSKSGIFFDSKIVDVFVNSAHRFQ

SEQ ID NO: 89924 - protein, 54 aa, Unknown
  Obtained from environmental sample
  misc_feature (1)..(54): Xaa is any amino acid
MGICASKFPFIAMTANVFREDIEKCLAAGMNSHVGKPLDLEDVMGILHKYLDVL

SEQ ID NO: 89925 - protein, 328 aa, Unknown
  Obtained from environmental sample
  DOMAIN (215)...(299): Response regulator receiver domain
  misc_feature (1)..(328): Xaa is any amino acid
LFNSFQQAEAGTTRKYGGTGLGLAISKSIVEMMDGKIWVKSEPDKGSTFAFSVKMRRGETKEKNSLLSHDVNWGNIRIMAIDDDTDILKYFIDITHGFGLSCCDTAISGEEALKLVDKNGPYHIYFVDWKMPGMDGIQLTRELKARASENSVVIMISATEWSVIAEEAKKAKVDKFVSKPLFPSTIIDVIKECIGMEEENRKEEQIDINGIFAGRRILLAEDMEINREVVLALLESTKLEIDCAETGKEAVRMFSEAPDKYELIFMDLQMPEMDGYEATQLIRAIEAERDKNILEDIVANSTENNNNGANNGNLRKQIPIYRNDRECF

SEQ ID NO: 89926 - protein, 177 aa, Unknown
  Obtained from environmental sample
  misc_feature (1)..(177): Xaa is any amino acid
MLNQAIQQENFSPEVINYIKELETNHAQQIKELETIHKQSYQQLYNKYLTVKEQYDLLVYKRFVRSAEQLLADDKQPLLFIEEAEHAETKEEGPQEFETVKSFTRKKGGRKPLGANFERRERTIDIPESEKTCACGAELTRIGEEISEKLVVIPMRIFVDRIVRPKYACRRCEGDRR

SEQ ID NO: 89927 - protein, 204 aa, Unknown
  Obtained from environmental sample
  misc_feature (1)..(204): Xaa is any amino acid
VVQMDETEVQVIGEENRSDIQKSRMWLARGGPPGKKVIWYEYHPTRAAYNAKAFLEGYSGYLQTDGYEGYDSAVKDMAGIVQVGCFAHARRKFFEADKISGHGKAIGYSLSQWDKLAAYLESPHLTPDNNACENAIRPFVIGRKNWLFCQSPQGAKSSCGMYSLIETAKRNGLRPFDYLTAVFKKAPVASSLQNWEKLLPWNIF

SEQ ID NO: 89928 - protein, 94 aa, Unknown
  Obtained from environmental sample
  DOMAIN (28)...(93): ATP synthase subunit C
  misc_feature (1)..(94): Xaa is any amino acid
MVLITAAFVCAQEAQEAQANETASASMWKYIAAAAAVGISCIAGGLAVGRIGSAAMGAMSENPELSGKAIPYVGLAEGICLWGFLVALLILVIN

SEQ ID NO: 89929 - protein, 451 aa, Unknown
  Obtained from environmental sample
  DOMAIN (5)...(67): ATP synthase alpha/beta family, beta-barrel domain
  misc_feature (1)..(451): Xaa is any amino acid
IEGRVERVSGPIIRASGLGGAGLFDVVEVGEKRLTGEIVRLEQDEAVIQVYEDDTGLRVGAEAVSTGRPLSVLLGPGLMGTIYDGIQRPLEELYAQNGAFMESGSRGHPLDPDKKWRFIPDPLLAAKLKEGGKIPAAPGLVLGAVKETESITCKIMVPPGIRPGDFITELSGEEELTVSSVTARTLRGIEIPLAQWWPVRIPRPSAERLSPDTPLITGQRVIDVFFPISKGGTAAIPGGFGTGKTMTQHAIAKWCDADVIIYIGCGERGNEMTDVLTEFPNLIDPRSGRSLMERTVLIANTSNMPVAAREVSIYTGVTIAEFYRDMGYHVAIMADSTSRWAEALRELSGRMEEMPAEEGFPAYLPTRLAEFYERAGRVKTLSGEEGSVSLIGAVSPPGGDFSEPVTQHTKRFIRCFWALDRELANARHTPLFRGSTVTASTPPRLSPGGKR

SEQ ID NO: 89930 - protein, 472 aa, Unknown
  Obtained from environmental sample
  DOMAIN (336)...(472): Peptidase family S49
  misc_feature (1)..(472): Xaa is any amino acid
MQFILILLLAAPLLAAVSGESRYASLSQDGGMQGNPAGLSAYGSPGVLFSYEKPPENLLGNNNFLFGLWGNSYGISFDWTRGENGYDESQWSFVDNECNISRSLFFGSRFSVTKISTEQGTAFSWSPGFILRPFYIASLGFWSEQALQYGFYQNRVQNAGLSIRPYKGITTSWSIAAENKKQLKNFFSKTKQNLLLELEAAAMTLGLEFPLIDPNNTGEFRFSLSAALGSHYNSTIAFASNDFSDNMNFKKFNFIRHSALNRKALGYVNIIRVPLENINEKSNGWSLFGGKQDDLESLRNTFTLLEKSSADAIVFDFSNYNGSLSISQEIRRGIFSLKAKGKRIAAYSNDYRPAVIFAASAADKVILQPSAFVNFKGLASDVLYYKGFLDWAGIKIEMVRHGNYKSATEPYTLDSMSNEARENLQGILNGWWSVVRDTVASSRNLSLEFLDSIAGNPKVTASSAKNNGLADT

SEQ ID NO: 89931 - protein, 392 aa, Unknown
  Obtained from environmental sample
  misc_feature (1)..(392): Xaa is any amino acid
VDEKDLSVCGADQPFAPAEEFCQGGVAVKELCGTGKATYTAAQFCLNGAVANKCGGTAEYTSTEFCLSGVVTNKCGGTVEFTADKFCQAGTNEVKPLCGTKTYTAAQFCHTDGTVQNNFGAWTVKTPATCDAKGVEERTNGTLTETRSIIPQLEWSDWSVTTAATCDAPGEETANCPDGTSRKRPLAQLVWGEWVETPATCKSAGSRTRNCPNNASPAQTRETDPKLEYDKAIRYCSNGTLKDYIIINDARDGKTYKAIEIGTQTWMAENLNYEAEGSKCYNNNTTNCNTYGRLYNWSTAMGGSASSKANPSGVQGVCPASWHLPSDAEWGALMQFVNPSCTATGTCANAGTKLKADSPLWNSNGKGTDDFGFSALPGGYGYSDGSFYYVRN

SEQ ID NO: 89932 - protein, 274 aa, Unknown
  Obtained from environmental sample
  DOMAIN (17)...(182): DEAD/DEAH box helicase
  misc_feature (1)..(274): Xaa is any amino acid
MTALEALKQYFGYDDFRGGQETLINGILAGKDVLGIMPTGAGKSICFQVPSLMMDGVALIVSPLVSLMKDQVNALTRSGIPAAYINSSLTPIQIDKALRNAVNGSYKLIYVAPERLPTPEFMAFAGSVSISMVAVDEAHCISQWGQDFRPSYTRIPDFIAKLSKRPVVSAFTATATPNVRRDILTLLKLRDPKILIAGFDRKNLYFGARKPRNKYDALSAFLKANPERSVIVYCSTRSYVETICKRLRADGHSASRYHAGLPYNERHDNQDDLL

SEQ ID NO: 89933 - protein, 158 aa, Unknown
  Obtained from environmental sample
  misc_feature (1)..(158): Xaa is any amino acid
MAFALSTYPITYRSRFSNGKWSEEYLEKPHKTPEEEAAMSEEDRAKLEDSRNCYEDMPLVNYTSQYGLACFEGLKAFPQKTGKLAIFRPDQNAHRFYRSMEGMCMPPFPVETFVSVCKETVKRNAALGFKPSYNSEWEKDSYMTADAVYIRPFTLAEG

SEQ ID NO: 89934 - protein, 126 aa, Unknown
  Obtained from environmental sample
  DOMAIN (2)...(126): Cobalamin-independent synthase, N-terminal domain
  misc_feature (1)..(126): Xaa is any amino acid
LNTSIIGYPRIGGNRELKFWTESYFKGNGDMSADTLLANVGQLRSAQWKKQWTSGVKFIPSNDFSFYDGVLDTAALLGVVPKRYRDLRLGELDTYFAMAKGYQSHFGDVKALSMRKWFNTNYHYIV

SEQ ID NO: 89935 - protein, 353 aa, Unknown
  Obtained from environmental sample
  DOMAIN (235)...(344): FliG C-terminal domain
  misc_feature (1)..(353): Xaa is any amino acid
MAKSPLTPGAVVGGSSKKKNVKEYSGRQKAAIFLVTIGSEISAEIFKFLREDEIETLTFEIARLETIDSEQKDAILQEFQELMMANQFISTGGIDYARELLEKSLGSQKAIDIINRLTSSLQVRPFDFIRRTDPAHLLNFIQQEHPQTIALILAYLEPNKASIILQNLPHEVQSDVARRIATMDRTSPEVLREVERVLEKKLSSLSSEDYTAAGGVESIVEILNLVDRASEKQIIEALEDEDPELAEEIKKRMFVFEDIVMLDDRAIQKVMREVDSQELAKALKSVDSEVQDKIFKNMSKRAASMLKEDMEYMGPVRLKDVEESQQKIVSIIRHLEDTGEIVVARAGEDELVV

SEQ ID NO: 89936 - protein, 522 aa, Unknown
  Obtained from environmental sample
  misc_feature (1)..(522): Xaa is any amino acid
FWYFLKTAFNSAVLCVEADEKLFELSRKAIGTDGELLPNLPKDRALKPFLLAQAESQKTEGQKTEGLSALARKIWGERVFRRVETIRLTGGWQLFPHFYDEIEASLRREIAVEWSNAMTLIRLGRLYSKNLIRNLAYFSRADADSPDWRSAAVLALGAGPSLDSFLGELCALYKGKIPEPGERCFKIICVGACLPALADWGILPDLAVILESQHWNLRCFIGLQKQKINAAIDLSALPASIRALNGKRYFFATPWAELAFLSRLKESGILPETYPPMGSVGLNTVALALKNTSGPVIISGIDFSFSLDTCHARSTPGRRDLENRQTRFRSPIDADTALKDGIYATVSKTGEQVLSNPAMRKYRDLFELEFGGNPRLFDITGPGLPLGVKTITAAEAFVILNEADNQHTPPRNLAQSSEENTQTNRITAFARREANTLKELKGMLTGAIPPEPERLEGLLDTADYLWAHFPECAGAGGRRPPATDLSFLKRIRTEIDPFLKLWEITLEELTGSLTYNKNSKNF

SEQ ID NO: 89937 - protein, 259 aa, Unknown
  Obtained from environmental sample
  DOMAIN (1)...(170): Queuosine biosynthesis protein
  misc_feature (1)..(259): Xaa is any amino acid
VFNNSRVRKARLLGTSENTGAEAEFLLLTQIDDLSWQALAKRSKRRKPGTRYIFEGGVRAVVSPGERADRGREASSPSGELVLCFDNPIDDEWLDRWGHIPLPPYIKRKDAPADGERYQTVYASQSGSVAAPTAGLHFTEETLRELDHAGMERVFITLHVGLGTFLPVRATHIEEHRMHEEAFSIGEEAAQKIEKAKREKRKVLAVGTTSLRTLESAWQDGLLKTGGKGHTSIFIYPGFEFHVADQLFTNFHTPMSTLL

SEQ ID NO: 89938 - protein, 58 aa, Unknown
  Obtained from environmental sample
  misc_feature (1)..(58): Xaa is any amino acid
MNINIKQILQQGEGISVEFKKSAQKLPESLFETICAFLNRNCGVILLGVEELILSLTV

SEQ ID NO: 89939 - protein, 281 aa, Unknown
  Obtained from environmental sample
  DOMAIN (85)...(179): Histidine kinase-, DNA gyrase B-, and HSP90-like ATPase
  misc_feature (1)..(281): Xaa is any amino acid
MHPLPDSARQTVRELVAAGRALTNIVSGLSRGGLTKPARETVKNALIDLPFLLRNAHASVAEKAEERNLAVSWYVAPHLGRRYLGPADRLAHILGLLMENAVRATTRGSVQIWVRRDQDSNDPGHLVFTVADTGSGMPPMRRNALLAARIWELAGETGGTVHLDSSPDGTSISFSVVLQPLPAHVSSRQDAVIADPESLTDDAGNLTLPSLRIILADDASSRRQLLVYMLEGLPHELLEARTAAEAVAQHSDIPARLIVFDGNMPEKDLVSAVAAIRALDG

SEQ ID NO: 89940 - protein, 104 aa, Unknown
  Obtained from environmental sample
  misc_feature (1)..(104): Xaa is any amino acid
MHPEAKARQIIDKKLTDSGWLLQDYKGEFNPAASLGVAVREFPTSSGPADYMLFVDKKPVGVVEAKKSDEGQNITTSELASLHYANSSMKWKISGHLIRFVYES

SEQ ID NO: 89941 - protein, 51 aa, Unknown
  Obtained from environmental sample
  misc_feature (1)..(51): Xaa is any amino acid
KNFLGMQAGDVPVTMADIEITKEELGWRPKTAIADGLKLFALWFLEFYKKK

SEQ ID NO: 89942 - protein, 69 aa, Unknown
  Obtained from environmental sample
  DOMAIN (1)...(50): Global regulator protein family
  misc_feature (1)..(69): Xaa is any amino acid
MIGDDISVSIIEIRGDQVRIGVDAPKTVKVFRQEVFDAIKAENKAAAQSANVLPVLASILPVDAKKESV

SEQ ID NO: 89943 - protein, 77 aa, Unknown
  Obtained from environmental sample
  DOMAIN (1)...(62): Global regulator protein family
  misc_feature (1)..(77): Xaa is any amino acid
MLILSRKTNEKIMIGDDISVSIIEIRGDQVRIGVDAPKSVKVFRQEVFDAIKAENKAAAQSTPVLPVLTIDAKREPV

SEQ ID NO: 89944 - protein, 681 aa, Unknown
  Obtained from environmental sample
  misc_feature (1)..(681): Xaa is any amino acid
MLRLHHMDAPWTSPNIFGNAEGTRAFSAESMRQLDYLITRCKERGIYIFLDFLVHRDFTAADGVFDPPPDLGGKQAGFFSRKLIDLQKEYIANLLNHVNQFTGIAYKDEPAIAASEFINESTVFTAFSGDILTPAYRKELESLWEERLLNMEMAESAPANRNLTKPIVKKSSSSKSAARPSYSKTAAAKAEFAKFKSTYSESAAPSEPETVVPDIGPSGFAKIEPLKFVSLASTYKSLAVFGVDWKGDRAWLKRASDSGDVKESIMFLSELERGYFLEMRGYFHSIGGRYALAGSNMPLPFLAMIRDNAELDLICSNDYWDHPQVWKIGDDWNRILEAPFHNRSQLKNLRASSILSKSYYRVANKPFMLTEWNHCYPNEYELEGVPLMAAYGALQGWHGILQFDFNLQSLGVDRIQNYKLSVQPEDVALWVMAAPLFLRGDIKTAPNAVIEGVMEEQYGNLPNYSDMLEDNYHLPFITRVAKSFDRGSSANIDQYDKYYDRVNGAIRSETGELLVNEKYGYMLIDAPRVQGVSGFIGGRGERYDFQAFRCGLSNKHASIFAVSADGANLVSSKRFYIVAVGPAKMSGQRYDAARSKLENAGAGEVLTQVLEGKITFKKAGGNKLQVFPLDVDGTRGKAMELTVVKGALGELDLSKGRTSVYEVEAVKEAWYVPILNFFKSK

SEQ ID NO: 89945 - protein, 186 aa, Unknown
  Obtained from environmental sample
  misc_feature (1)..(186): Xaa is any amino acid
LQSKDILLDCLKAFEGTIIFVSHDRGFMEALSTKTLELSIGKLAGEAELKRRHRLFYGNYAYYLDRIAREEAGEVSAVDTPEIKPSKSQSPSERREQEKQRQALVRRLERQEAEMLSAMEKLETEKKRLEEELGKPEVYSSGEKARAVKLALDETATALEAKSREWEGIAGELEKARKSLIPQTLL

SEQ ID NO: 89946 - protein, 88 aa, Unknown
  Obtained from environmental sample
  misc_feature (1)..(88): Xaa is any amino acid
MFGEVMNPFIDEMKKAQKRALPAAAKAHCIGIIRGLWKFEKEAITDFAEWVEDAPCEYVDAAVKEWKKSKPGKKDIAEVMSIAKGDRS

SEQ ID NO: 89947 - protein, 120 aa, Unknown
  Obtained from environmental sample
  misc_feature (1)..(120): Xaa is any amino acid
MSKKEAAREERITNEAIVDAHDTEERAMGWYCYLEDRISFPFAAKCIAVDKRSPLELGERTIVVQMAGEEDCEHDMYVEISWSSKVLTIPLFQIKPLDADDDTVEAIGDWHYWKKQGYTF

SEQ ID NO: 89948 - protein, 64 aa, Unknown
  Obtained from environmental sample
  misc_feature (1)..(64): Xaa is any amino acid
MMNLKTGDKILFFEDNGRFFMQNSNSIVLSDFQKAMKGAAKEAGFNNPDDVTKYIKQLHKSKKK

SEQ ID NO: 89949 - protein, 460 aa, Unknown
  Obtained from environmental sample
  DOMAIN (4)...(70): 2Fe-2S iron-sulfur cluster binding domain
  misc_feature (1)..(460): Xaa is any amino acid
MVNIKINGKPLQVEDGISILDAAKLVNIKIPTLCYNPDLPAWASCGLCIVRTAGPGSPRMARACITEVAENMDIITHDPELIATRRTVLELILSNHPTDCLQCPRNGSCELQTLAAESGIRELPFKQETNHLPIDDSNPAIVLNPEKCIRCGRCVKVCQDVQNVWAIEFLGRGIDGKIASAADVPLGESPCIKCGQCAAHCPVGAIYERDDTVKVWAALQNPDVHPVVQIAPAVRVALAEEFGLPPGTVLTKKIYAALRRLGFKTVFDTNFSADLTIMEEGTELVKRLTEKGSAIPLITSCCPAWVDYMEKYYSDMIPNFSTAKSPQQMMGAMIKTYWAGKAGVDPAKIYSVSVMPCTAKKWETYRNDDMKSSGEWDVDTSITTRELARMIKQAGIEILKLADEEADSPLGPYTGAGTIFGATGGVMEAAVRSAYYLVTKKELADVNFKPVRGLRVKEAE

SEQ ID NO: 89950 - protein, 76 aa, Unknown
  Obtained from environmental sample
  misc_feature (1)..(76): Xaa is any amino acid
MNGNKSDNNHVAISKFLSLVLRHSPQTIQLNMDKNGWINIDELIQNANKYKKMHLTFDLINTIVKNNDKQRFILSD

SEQ ID NO: 89951 - protein, 379 aa, Unknown
  Obtained from environmental sample
  DOMAIN (334)...(367): Tetratricopeptide repeat
  misc_feature (1)..(379): Xaa is any amino acid
MAEKQQKKIHFLSVPESLRGKIEDISQDCGFSINPDIPIPVEIPENEEKLNLEELSWEMIVSGMLNVIASGPGAYVPAENGAWIDYYRNFVLALRPNILAEFTEAAILKARNCDFEPALEILDALRGLFPASPVVKLNRALAMEERASLFERRGKPEAEAAFREAQEAYEDVLAIQPPFPEAWFNAGFFYLGRKDFRNARECLSAYIENSDDEKKQEQAGAIVRNINENGLEDENLNAAYQLICQEKEEAGMLRIREFIEKYPSVWNGWFILGWALRRLGRWENGAAAFNKAIELDGSVSDVRNELAICLMECGDLKGARRELETALRLDPENIKIISNLGVLALKSGNADEAAAFFRTVHELDPEDAIANKYLGVGSR

SEQ ID NO: 89952 - protein, 265 aa, Unknown
  Obtained from environmental sample
  DOMAIN (2)...(144): 3'-5' exonuclease
  misc_feature (1)..(265): Xaa is any amino acid
MPKEAFYAPVAAHQGAGEESPSPFLDGEKVKALLEPFLADPSMTIVAHNAKYDYKVSRGWGIDRWQCRIWDTMVAAWVIDPERGGYSLDSLAVFYFGVIPIAYNDIVPKGKTFDAVPLETASRYSAEDADFCLRLKYCLEKKLGDAEPLFKNLEMPLLPILAEMEGEGIRIEKDILKNYGAELGKELEDIQAKTYKIVGHEFNLASTQQLQKVLFEERKLKPDKKTKTGYSTDVAVLEELAREDEVPALILRHRTLSKLKSTYVD

SEQ ID NO: 89953 - protein, 148 aa, Unknown
  Obtained from environmental sample
  DOMAIN (13)...(148): Phosphoglucomutase/phosphomannomutase, alpha/beta/alpha domain I
  misc_feature (1)..(148): Xaa is any amino acid
MAIHDEIASFISSMILSHSGWRGVFSVSGDEEDRTGEISAAQAIIAAAAALVFAEYLSAKTETGKSGAPVALVGRDSRPSGARLADAVNAALMSKTCVTRYAGIVAAPEIMAWARSLDGLANACGFIYISASHNPIGHNGFKFGLTDG

SEQ ID NO: 89954 - protein, 359 aa, Unknown
  Obtained from environmental sample
  misc_feature (1)..(359): Xaa is any amino acid
MKALVSWLKRKKSAFCILTGIISVSLFVISASNEKIKQTTGGSYVVKIMHYGIDSAEMERTITIPLEDALSAISGVMSVQSSTENNQSRVFVRFKPGGKGRYEAVRDAAHRVYETLPPSAQRPEILSSNNSRIPVWSAAVITGDSNNTAQMLEKIVKPRLESLEGAGEVIVSGVGLKEIFIILDQEKLSLFGLEPSAIMSVLGLNDSIFSGGMITQNNREIIVTVDGRYSSLNTVLIPLGEGKYLELSDIAVISEREREPDIFSRLNGEKTASIAIMGRHGADLRKLSSDIKKELLSLSLQTEFTILSDLGAEESVAFKSVLNAALSGALMVALISFLLSRKNSVNIAGLFCALSIPLI

SEQ ID NO: 89955 - protein, 99 aa, Unknown
  Obtained from environmental sample
  misc_feature (1)..(99): Xaa is any amino acid
MGKSLRRPILRYHGSKWRLAPWIISYIPAHKIYVELFGGGGAVLMQKPRSYTELYNDLAGEIVNVFRVARDRGNELMEKLMLTPYSREEYVAAYEPTNN

SEQ ID NO: 89956 - protein, 202 aa, Unknown
  Obtained from environmental sample
  DOMAIN (24)...(158): Histidine kinase-, DNA gyrase B-, and HSP90-like ATPase
  misc_feature (1)..(202): Xaa is any amino acid
MTEMPQNRIRILPPEEARRIAAGEVIDRPAALIREFLDNAIDAGAANIEVSIEEGGIKKAEVADDGEGMGREDLELCVLTHATSKIRSLEDLNTSVTLGFRGEALAAAAAVARLEIICSTDGREAWRLQTGPGGNDLPQPERTRRTRGATVRALNLFDSIPARKRFLKREGSEATLCRQAFIDKALAFPAISFRFVQDGKLR

SEQ ID NO: 89957 - protein, 172 aa, Unknown
  Obtained from environmental sample
  misc_feature (1)..(172): Xaa is any amino acid
MEAVQTANPPSFESVWAILQEVAESQKEYEQERKKDKAEFNERLGKYINLFGDFTEYMMAPKLREKFKDFGLFFPRTNRNVSVEDENKNILLETDVMLENGDKAMMVEIKTQLTVERIKKHIERLEKMRKHADTHGDKRAFLGAVAGVVVEYDVRKYALNQGFYLILNFLLE

SEQ ID NO: 89958 - protein, 326 aa, Unknown
  Obtained from environmental sample
  DOMAIN (210)...(319): FliG C-terminal domain
  misc_feature (1)..(326): Xaa is any amino acid
VAKFLILIGSEQASKILGELDSKQVEEISKEIATIKGVDKEEAESIITEFKSLLSGSYKYLGPSFGGVETARRMLHAALGEEKGEALLQKTMLSLPQNIFGFLEEFTPEQIVFLLKDESPVTAALVMARLSPEVSAKTLAKFPPALKPEILKKIAHQSEVMPEVLEQVAKAIRERARHLGSSGNDIEIDGMQALTAILKQGDYSFGDRIINELETDSPEISKNLKNRLYTLDDVLDAFDKPLAEKLGTMTEQDIAVLLKGRSAEFCEKILSNVSSRRRALIREEGDIIGPVSKRESDEAAGDFLAWFRLARVNGELALKSDEDWVN

SEQ ID NO: 89959 - protein, 240 aa, Unknown
  Obtained from environmental sample
  misc_feature (1)..(240): Xaa is any amino acid
MHNDFTLFTRVVPSGKTVVYYYAYDGEGRRLGPWTTGQKNKTMARNYCNRLNREGKLLPGIKEMPTFAEYSSHFWDWEKSGYLSERKKRRKLTRSYANKCERVVNHNLVPYFGKMKLDAISGEVIDQWLDVMIKEGKKNSTSNGYFGTLKTMMKWAVKKRIIGRDPFLDVEKLLNEKPDKKIITQDEFKALFVDDWETVWDNDFLRCTANKIAALTGMRCCEVLGLRGEYVFDDRSFSVR

SEQ ID NO: 89960 - protein, 227 aa, Unknown
  Obtained from environmental sample
  DOMAIN (124)...(223): ABC transporter
  misc_feature (1)..(227): Xaa is any amino acid
LSGLMMPIMMFIGNFGYVAVCVAGAALAMNGTISFGVIVAFMIYIRFFTQPLSQMAQSMQQLQRTAAAGERVFEFFDEEELADESQKHDKLEHIKGNVEFKNVRFGYEKDKIIIHDFSATVNAGQKIAIVGPTGAGKTTMVNLLMRFYELDGGEICIDGVPTSQITRENVHDQFCMVLQDTWLFEGTIKENIIYSNRASPMKKWKPLVRQSASITSYTRYRKGMILC

SEQ ID NO: 89961 - protein, 316 aa, Unknown
  Obtained from environmental sample
  DOMAIN (1)...(316): Sodium:alanine symporter family
  misc_feature (1)..(316): Xaa is any amino acid
MKWLAVIFAIFATFATFGIGNMTQANSIASSMFDSFGIPVIATGIVIAVLTGLVILGGIKRIAQVTEKMVPFMAVFYVIGSLIIVIVNISKLPSAFGLIFGNAFNFASLEGGIMGYIIMKAMRFGVARGVFSNEAGMGSAPIAHAASSEGDPVKQGLWGIFEVFVDTIIICSLTALVILTSGVSNFTAGPGATDFVGGLFKGADLTMTAFSATFGQAGGIFVTLGILLFALSTILGWSYYGQQSLGYLTKNNKAWDWIYKFIFTVLTIIGAIGGLTLIWDIADTLNGLMAIPNLIAVLLLCKTVFALTKEYVAKNK

SEQ ID NO: 89962 - protein, 362 aa, Unknown
  Obtained from environmental sample
  DOMAIN (23)...(91): ATP synthase alpha/beta family, beta-barrel domain
  misc_feature (1)..(362): Xaa is any amino acid
MANYGDLTKVLEAQIKNWDGKAATESTGFVVQVGDSVATIHGLSKAIYGELLEFASGAVGIALNLEEDVVGCVLLSKESGVKDGEEVKGTGRVVSVPSGQSFFGRVVNPLGEPVDDKGPIQAEEWRPIEAPAAPVIERGTVDTPMQTGFLSVDSMIPIGRGQRELIIGDRQTGKTALAIDAIVNQKGKGIYCIYCAIGQKVSSVAAIIRNLEKAGAMEYTSVVLASASDSAALQYLAPYSAVAMAEHLMYQGKDVLIVYDDLSKHAVAYRAISLLLRRPPGREAFPGDVFYLHSRLLERAAKLSSHLGGGSITAMPIVETQAGDISSYIPTNVISITDGQIFLDTELFNSGFRPAIDVGLSV

SEQ ID NO: 89963 - protein, 77 aa, Unknown
  Obtained from environmental sample
  DOMAIN (1)...(77): Lon protease (S16) C-terminal proteolytic domain
  misc_feature (1)..(77): Xaa is any amino acid
NCRSYGDDGELSLTGQVLPIGGLKEKTIAAQRNKAKHIIIPKQNMRDLDEIPENVKKGIEFHPVERFDEVLALVLPD

SEQ ID NO: 89964 - protein, 366 aa, Unknown
  Obtained from environmental sample
  DOMAIN (11)...(276): Aldo/keto reductase family
  misc_feature (1)..(366): Xaa is any amino acid
LGVPMLYREYGQTGKKVSLLGFGGMRFAHIDDHDECVRVMTAAAEGGVNYFDTAPGYFETKSETVFGKGFAELRRRKIPYYCATKTFASGPDDIRREIEAQLKRMDIPAIDFYHIWCITSLENWRSRKQNGILQTFRKLKEEGLIRHICVSSHLIKDEIKELLMEQGEVEGVLFGYSLYNFQTRQAAFDAIRKNKLGAVVMNPLGGGLIPQNPARFDFLKRDGEEIVPAALRFLWDHPEISVTLVGFDTLQHVEQALAAIEDYKPRAEAELAALKENVLASLEGICTGCAYCDDCPQGIPIPKFMDAYNQKILSAPDTKDPIGERLYWHWNLERQIANKCSACGQCEKACTQHINIIERLKEIAGH

SEQ ID NO: 89965 - protein, 381 aa, Unknown
  Obtained from environmental sample
  misc_feature (1)..(381): Xaa is any amino acid
MILFNRQARTLLAVLFLWAAVSTALAQTEKPKIALYIANETLKPDEKNFLTIKLLKPFTASGLYSVIDRSDIFTKKAATERIKQRDGSVNEKEIYKIGYEAGAKYICMVELTNAFGRWNIGARMVDVESAEVYLSQGETDIKGKLEDADFSGAAKTIFDQIHGKSAGSTAQTQKYQTPAPAPPPPPPSPTPMPPQPPINYGSLRDSRDGKTYKTVVIGGKRWMAENLNYQPQSGNSWCYGNDNSNCGKYGKLYDWNTAKTVCMAGWHLPSRKEWGDLAKVAGGIGEYGDKGPAGDKLKALDGWNKQKKGNGTDDYGFSALPGGTRSFSGNFYYAGIYGLWWTATEYSSGKAYRRYIYYRNARVDEGYYDKGNGFSVRCLED

SEQ ID NO: 89966 - protein, 291 aa, Unknown
  Obtained from environmental sample
  DOMAIN (25)...(204): Type III restriction enzyme, res subunit
  misc_feature (1)..(291): Xaa is any amino acid
MNDFAGLGVLPEFADRLAKKSVNCPTVVQRLVIPKLLENKNVIFRSATGTGKTLAYLLPGLQLLLGDIEAPYQGPRLLVCAPTLELCSQIKNEIDFLLEEKSGINVSLLIGSVNLGRQIDSIKKNRPHVVVGNPGRLLLLAKMGKLKLRSLNFLVLDEADRLTSPECREETDALAQLAVTELKRRASNSQAAFVIAACSATVSAKTKELLAPLFEGAELLETDEQEILRDRISHWAIFSECRRKNQTLVSFLAAAKPKKALVFTSRSNEAEKINSILQRRKIAAAALFGGM

SEQ ID NO: 89967 - protein, 273 aa, Unknown
  Obtained from environmental sample
  DOMAIN (14)...(268): Sucrose-6F-phosphate phosphohydrolase
  misc_feature (1)..(273): Xaa is any amino acid
MNSISDITPSQSSGVRYVLMDIDDTLTRHGKLLASSYTALWKLKAAGLKIVPVTGRPAGWCDCIIRQWPVDGVVGENGALAFWEEPRNEGQTNHQILKAMYHPNAVKNDHPVLRKVRERALAEVPGLRVAKDQFARLFDIALDFAEEEPVLPFSAAEKVKEIALEQGAMAKISSIHVNVWMGDYDKLSMAERFLKERFGWQGNLEEVVFVGDSPNDEPMFARFPLSCAVANIRGFLHLIKDKPAFIASKEGGEGFAEIADALLERRGLTNREH

SEQ ID NO: 89968 - protein, 455 aa, Unknown
  Obtained from environmental sample
  DOMAIN (208)...(376): Glycosyl transferases group 1
  misc_feature (1)..(455): Xaa is any amino acid
MRIVMFTDAYWPRVNGVTVSVDTFSRSLIKEGHYVLIVCSFYPSDYDAVSAIQDENKPGDPRIVRVPSMPAFVTKEDRIAKFDKWFWVFKQVEAFNPDILHINTEMVIAEFGFLYAKAHNLPAIYTFHTMWEDYGPNYFPMFPAFIVKSFIRGVLKNILRRSYKVIVPTQQIEAVVHKYEPDTETFLLPTGIDPAFFVHDKAETEAFKEAFNALYPETSGKKILLMAGRVVKEKNIGFLLKILPDILKKNPDTMLVIVGSGPDLEFFMKEAKEYGVESACVFTGYINRSQLSLMYSISDVFVFPSLTDTQGLVTLEAMSSGIPVVAIGALGTLMVMGGDNGGFMVKDDPLEFTDRVLRLLNDGELYRRKSEEARIHARAWTLEEITKKLTVIYRETIAEFIKDYGKPRSPVWELIIDKRWWEINNKIIQKKTKMKLQEIRSKIKETSKLINVPGL

SEQ ID NO: 89969 - protein, 225 aa, Unknown
  Obtained from environmental sample
  misc_feature (1)..(225): Xaa is any amino acid
MDKSTETEIPSSPPYFDRELSWIDFNERVLEEGLRKDLPLLERFRFLCIVSSNFDEFFMVRVAAIKAAIRSGAAGHETAPGGLNPAVHIKRISEKVHAIFRRQFACLQNEIFPALAKKGLELVRPDSYTLPQMDYLESFFMGQVYPILTPLRVEEERRLPSILGRGINAAFLLVSGEKDSVPAEEQIVIVRIPPTISRIVRLPQEARRPIEARLPSEAGFEQHSR

SEQ ID NO: 89970 - protein, 162 aa, Unknown
  Obtained from environmental sample
  DOMAIN (21)...(162): ABC transporter
  misc_feature (1)..(162): Xaa is any amino acid
MNLYYDAFQALINVNLDVAENEITAFIGPSGCGKSTLLKSLNRMNDLVESCRITGKILFDGEDIYGKKMNVNVLRKRMGMVFQKPNPFPMSVYDNIAYGPRTHGIKKRRELDQIVEESLKNAAIWDELKDRLKKSALAISGGQQQRLCIARALAVKPEVILL

SEQ ID NO: 89971 - protein, 129 aa, Unknown
  Obtained from environmental sample
  misc_feature (1)..(129): Xaa is any amino acid
APAVILLSDGEPTDDFDGGLAKLKMNNWFKAAIKVAVAIGDDANKGRLAQFTGSMESVLEVHNSTGLRKMVKFVSVRASQVASRSVQVSQVMASTPTNEVQAASIKQITLNEQLTQAKTIIVNTGNDEW

SEQ ID NO: 89972 - protein, 293 aa, Unknown
  Obtained from environmental sample
  misc_feature (1)..(293): Xaa is any amino acid
VSYDGKPKALKWYHEKALKNPSKFYENLENNIKNGAPTNSFLWPLDITENAGSHFGYIMDLRPTQYKSFSLFLLAKEKFTSVTAITNTCLQITEAFRGLHNSGYSYQDLNDGNFFVNPKNGDVLICDNDNVAEYGKNLGIAGKCRYMAPEVVLGKAPPSIHTDKFSLSVVLFLLLMNNHPFEGKRSYPPCMTEALERKIYGEQPLFIFDKDDDSNAPVPGINSNAIKRWPLYPPYIRDKFQEAFSQEALMDPSKRVIEKEWLKVFARLRSEIYKCRNCGEIFFADAVNGTPCP

SEQ ID NO: 89973 - protein, 585 aa, Unknown
  Obtained from environmental sample
  DOMAIN (22)...(102): Cache domain
  misc_feature (1)..(585): Xaa is any amino acid
NWLPDDRPWYKGAIEAGDCVAQTEPYLDSLTGDIVFSYSRCIYDNNGNRVGVVALDIEAGHIGEKVANTSLTKGGYGILTSQDLTVIGHINTDFLGMKMYDPRIPVSFLTDELVRTEKITGAEWVNWRGEKVVGFLKTLSNGWTLGLLAPKYIYFKPVYKMALTLSLLGGALASVLIIVLIRVDAAKNKSNMESRRKSAFLANMSHEIRTPMNAIIGMLTIGKTASEIERKDYCFTKIEDAANHLLGLINDILDMSKIEANKFEISPVEFNFEEMLRQAVNVINFRIDEKHQKFTVHIDRSIPRTLIGDDQRITQVITNLLGNAVKFTPENGVISLDARLAGEENGLCTLQVSVTDTGIGISAEQQKKLFQSFEQAESSTTRKYGGTGLGLAISKRIVEMMDGTIWVESEPGKGSTFTFAIQARRGTEVINECSNPDNQKVEEAQAPEIEGIFAGRRILLVEDVEINREIVLTLLEPTKLEIDCAENGAQAVRMFSKDPNKYEMIFMDIQMPEMDGYEAARRIRSFEAELNKNGTEQPKGIPIVAMTANVFKEDIEKCLDAGMNSHVGKPVDFGEVLDRLRTYLG

SEQ ID NO: 89974 - protein, 486 aa, Unknown
  Obtained from environmental sample
  misc_feature (1)..(486): Xaa is any amino acid
MEIEYSFNADGKALRPVVTLEIGGNSWALPFYEQTGIIHYAVPIQQAENFSITLPGKNDSNSIKIHSIEFKERWFGFFSIYDGGAPDRGAPNRSVPNGTMRFFASPFVTTRPGDSAGYSVWEIDAPEGFSVPTGFYSVLSAEMLPEKGAAFDAGNLHMDMFPTLGRLSVPAGLISPGTQVLALKGERVDSLRQSYARLPPFPEPITADPGLVLSWPEENWRDKRYEVFRWDRFPSLLIFDTADYAVQDRMFKRLAFFVEKADFRGRLAFDDEIAELHGWNAHDYRAEDLARFFQTARKQNFPLLAEERELERILLDAGVIKESDAGLQAGEGGIISISRESESYLRFLFMAHEGFHGLFFIDEDFRDFSRQRWRQLPAEARRFIVSYFNFQHYATADEYLLVNEFMAHLLQQPVSQAARYFGQTLPSRIEDGWRKADLPAKDQSSNSWPTLARTFTREADAFSAYVGGRWGLAAGRVHLVTVRNKE

SEQ ID NO: 89975 - protein, 492 aa, Unknown
  Obtained from environmental sample
  DOMAIN (13)...(492): Carbohydrate phosphorylase
  misc_feature (1)..(492): Xaa is any amino acid
KGSHKDVVAYFSMEYGMDTSLPIYSGGLGILSGDHMKTSSDMGLPLVGIGFLYRQGYFTQQLNADGFQQESYPENDWYNMPVERKNGKDGSPLKISVDLAGRQAIAQIWEVKVGRSSLYLLDTNLEENPPDIRNITSTLYGGDKETRIQQEILLGIGGIRALRALGINPAATHMNEGHAAFLGLERVREIMTEKNFSFEEAREAIWPTNIFTTHTPVPAGNERFDISLVEKYFRSWPQVLGISWKDFLGLGRINVDDDKETFCLTVLALKMAAYANGVAKLHGVVSRDMWQGLWPGVPINEVPIGHVTNGVHPRTWVSSGMIELLDRYFGPHFENKPTDLDIWDRMSRISDEELWRTHERRRERLVAFARDRIREQYKRTGAVERRVQQAEDALSPYALTLCFARRFATYKRGNLLLRDPERLLKLVRDNDRPIQLIFAGKAHPHDMPGKDLIREIVHFAERYDVTSRIVFVENYDMTVAKYLTSGGDVWLN

SEQ ID NO: 89976 - protein, 391 aa, Unknown
  Obtained from environmental sample
  DOMAIN (2)...(84): Cyclic nucleotide-binding domain
  misc_feature (1)..(391): Xaa is any amino acid
FFVVEGKTNTDKFYIIQEGKVQVIREVDKVIRGKDTLAGPGDIIAAVSVMSGFSYIETAIAYTDVTLLAVEKKQYSNLIRNNTPIAVKIIQQFSHRLRTLDEMLSRLTLSATAESGPSHLLKIAEFYASHKKPNQAFYAYQQYTVHCPDAPDIEDVKQKMERLAPAVKVKKPDYPSDKMERGYLADCLLFAEGEPGDELYVIQEGSVKISKIMNNQEVVLAVLRKGDIFGEMALLEDKPRTATAETLENCTVLAVNQANFTSLITTSPELVARMTTLMAERIWLMYRQLANAMIINPLDRIYDALLIQLEKERVPLNSNHPYMCGFSFKELADMARIPPKEHDALLRKILLTKRINIVQNKLLVSDPSDVLRQTDYYRRAQQRSAAAAAKQ

SEQ ID NO: 89977 - protein, 305 aa, Unknown
  Obtained from environmental sample
  DOMAIN (1)...(151): MatE
  misc_feature (1)..(305): Xaa is any amino acid
VVDRIFVGQGVNEIALGGLSLVLPLMTIGMAFAMLFGIGAANMISMRLGQGRKQDAENALDHCFFLLIGISLLMMAVGLIFLEPILSLMGAAEGSEALLYAKDYFRIILYGMVFGLSSFGLSHCTRAQGFPTITMIGMILGAVLNTILDPIFIFVFKWGVEGAAWATIISQFASFIFLFIFITGKKAVVRLNPRVFKPNYSIIKQIMAFGSAQFLLQFLMSTVQLLNNKSVGWYGAAALGVANGGDVALSGMNINGSILMLILMPVFGINQGAQPILGYNYGAKNFARVLRAYLGAIAAASIICI

SEQ ID NO: 89978 - protein, 468 aa, Unknown
  Obtained from environmental sample
  DOMAIN (173)...(464): Alpha amylase, catalytic domain
  misc_feature (1)..(468): Xaa is any amino acid
MAFGNFTVESGKAMPLGATVSDSGVNFAVFSRHATSVTLIIFQSAEPGSLYTEIKLDSKKNRTGDIWHCFIPGLPENTCYLYRAEGPYVPEKGFRYNPNKALFDPYAKALTDLSNWDVKACVGYDPYAPSKDLSFSYVDDIFTQPRCIAINDDFDWQGDLPLNYPLRFSILYETHVKGLTANPNSGVSAPGTYKGVIEKIPYFKDLGVTSLEFLPIQEFNENELNSKNPLTGNKLINYWGYSTLGFFAPKGSYAHDRSPGGQVREFKEMVRELHKAGLEVILDIVFNHTAEGNEWGPTISFRGLDNTIYYMLNENRRYYQNYSGCGNTVNCNHPVVRTFIMDCLRYWVIEMHIDGFRFDLGSILGRDERGNLMENPPVLQRIAEDPVLSSTKIIAEAWDAGGAYQVGWFPGGRWAEWNDRFRDDMRRYWKGDEEQTRHLATRLSGSSDLYLRDGRKPFHSVNFITSHD

SEQ ID NO: 89979 - protein, 283 aa, Unknown
  Obtained from environmental sample
  DOMAIN (3)...(130): B12 binding domain
  misc_feature (1)..(283): Xaa is any amino acid
MSAIVLATINAKWIHTSLALRLLKANLGNLEAHCTILEFALRQPLKEKTDPIIAEKPRILGLSVSIWNHLATLELLKALKAEWKNETQKPFVVLGGPEVSWLPEDAEIFRYADYVIRGEGEESFRSLCFELLGERNQTGKTKTGKTIFIGKGDAIVNVNEISSPYRLYTSEDLTRKHIYIEASRGCPFNCEFCLGSSRNQPAAQKIRSFPLEPFLADIDTLINRGGRIFKFLDRTFNLDIDRAQKIMEFFFNQINGRINGKPLCVHFEMVLSRFPQSLKELIC

SEQ ID NO: 89980 - protein, 295 aa, Unknown
  Obtained from environmental sample
  DOMAIN (23)...(129): PAS fold
  misc_feature (1)..(295): Xaa is any amino acid
MAQSIEDFVRMESDRKGQLEAILETMAEGVLVLDPRGRIRRANRALAAHFPSAAGLTGGQVVELIPSPVLQDAVISLLADTESFGNITTLQIEPQAGKFFSVLLARPPREAAHAIGAVAVFRDITELMRLETVRRDFVANVSHELRTPLTAIQGYAETLMDMEEVPAQGRRFAEIIRKHGIFLSSMVDELLTLSRLENGKVAIPCEAVDPMQALNAAKQLLASNLEQARVYIAEDLAPNLPVLADDAHLEQLFRNLLENACRFAPPESAIVVRMRPQGKEALFSVSDQGPGIPPD

SEQ ID NO: 89981 - protein, 213 aa, Unknown
  Obtained from environmental sample
  DOMAIN (60)...(92): Ankyrin repeat
  misc_feature (1)..(213): Xaa is any amino acid
MKKVPFFRLFFVGLAVILLLISGCKSAPKPPDVWDLLQSGDENARNHFLSEVDVNAVDPDGKSPLHYAAEKKDAQLAAFFISLGANPNVTDNFGQTPLGICITNNDAKVAEVLATGGLDIHQPIPIEENAISSILAMEKSPAVFNAILNPITVNSADRLGRTILHIAVIAGNESSVSDILKISTTPIALINKKDNEDKNSVDYALERPDSKVH

SEQ ID NO: 89982 - protein, 291 aa, Unknown
  Obtained from environmental sample
  DOMAIN (237)...(269): Ankyrin repeat
  misc_feature (1)..(291): Xaa is any amino acid
IDVDVHALNGNTPLHDSVTLNLPEIQALLISKGANLESKNIDGNTPLMEAVRGAYVNSIDKLIASNADTSTRNIRGDTPLHIAVASERIDIIERLLKTGVSIHARNTKNRTPFQMSLTISPRIVSALLENNRINISDDFGNSVLHVALHERADDNVIRTIISQGARVNAVDYNGKTPLRLALDYEMLEAAKIIADSGADPFITAADNRSPAEISIAKGEVYLRAVFSGRAINARDSSGNTILHYTARLGTPQLITVLFELGANRSIRNIAAESPNDIALRWNKKDNSELLR

SEQ ID NO: 89983 - protein, 420 aa, Unknown
  Obtained from environmental sample
  misc_feature (1)..(420): Xaa is any amino acid
MALPEGNFFELLRSVFGNIKTPFSKHKLLEDLFAFLSKKENRKTIAAFIGEQDHKVIAATALLNEPETGDLEKFFAGEMTEAELQAVIINLEERLILYRFRDEKNMRLALNPVLDEVLIPYIKDTRPLFPSYMKENNAETEATPQQNGRSSYISDPRIMAALFTFIIEEEELFKAEAAAETKGTKSQGTLPELRKKVLDGAKKTFPELDFELAINNLIQMGLFSRTDRLLVPNREKIAEYSELSDSERQEYWAAGLFICFKESEKSSHSGHSDWDIFSFSWSRLRTIASSIHRFRSLLDPDRIYPELTLKRLWELLEERTGGLANQWPSFLAVMEKTRLLEAEKISGKEGTFWLLPSEKPKEHSAGKPVIAMDTAFSFILYPEISFADALALSAFCSIKECTVNESTGTLISFELTSKSA

SEQ ID NO: 89984 - protein, 357 aa, Unknown
  Obtained from environmental sample
  DOMAIN (204)...(343): SIS domain
  misc_feature (1)..(357): Xaa is any amino acid
MLKEIMEQPKVLRETISAALNNYKNVIDKLDVSKFTKIIITACGSAYNAGVTGKYVFERLCRFPSVETELASEFRYRDAVINDKTLVILISQSGETADTIAALREAKSKGAVTLSIVNVVGSTIAKEADYCMFTAAGPEIAVATTKAFSAQLVLLYVLAIWFAVKLGKISNEEEQKLMTQINALPEKTEHILKQIDSIQKYASTSVVYKSIFFIGRNIDYAISLEGSLKLKEISYIHSEAYAGGELKHGTISLIEEDTLVVAISNCTSLYGKIMSNVEQVISRGAKVLLIGSCPADDSKAEKKSDDRVYTIALPKCADLFSPSLSVILLQLFAYYVAANKGLDIDKPRNLAKSVTVE

SEQ ID NO: 89985 - protein, 556 aa, Unknown
  Obtained from environmental sample
  misc_feature (1)..(556): Xaa is any amino acid
MLFFALILLVTIFSCERNKNTERNDTENNISALSNKYHEQKQYDDESEFESEPVIDNMDEIIGVSIIGYKGNKKTVHIPSEINSLPVITIERDAFRDKQLVGVTIPDSVESIKNYAFYNNKLTAVIIPDNVRYIGESAFENNLITDITIPESIMQIYKNAFNKNQLTAVIIPDNVRYIGEGAFENNLITNATLGNNIEKINQSVFANNKLKSITIPENVTDIESMAFDENQLTAIVVTSRFSYEKDSFPNAFSGFFALNGKKPGTYTWDGKSWSVVFSTADPKDFKIEIKRIGLWDDDKATVFVSYYKGNDTDIVIPSKIQGYPVAGIDYIVSDTNKKITGVTIPDSVKSIGSYAFLFTELTGVIIPDSVIYIGYKAFYDGKLTSVTLGNNLKSISRMAFCANKLTNVVIPDSITKIEERAFGWNQLADVTISKKVTVIDRQAFFSNKLTMITIPDSVIRIGEEAFSANQLTDVIIGKNVTEMEAAAFFDNPVKSITIPGNVNLIAGQIIMTENGLVITRSDEIYPVFPFDFDKFYNANGKKAGTYTRDGKNWRKK

SEQ ID NO: 89986 - protein, 331 aa, Unknown
  Obtained from environmental sample
  DOMAIN (8)...(331): TraG/TraD family
  misc_feature (1)..(331): Xaa is any amino acid
AGLLQNDGGMIIGQLQKAIVSAAYDLEKKSVILHLKKAAQKIIQSGIYNTNVAAPTRSGKGVSIVIPTCVSYPGSLIVLDFKGENFKYTSGFRKKMGKVYRWEPTGTGGHHFNFMEEIRSGENAFGDANLIADILTTPASGSGNATSDHFQSGAKDFLTALILHCLTSPDWKNKSLPGCREFLAQGDPDDPDNADYIYDLMINGEHGDPIIHQSIVEGATAQRNRPPDERGSMLSTVNNALNVFANPKIKRNNQNSEFYIDEFAETKKPITLYLTIDYGMIETIAPLIRLFVTLFSRRFTSGETDANARKFEIPAALYPGRIRQARTHGRA

SEQ ID NO: 89987 - protein, 241 aa, Unknown
  Obtained from environmental sample
  DOMAIN (15)...(165): RNA pseudouridylate synthase
  misc_feature (1)..(241): Xaa is any amino acid
MKKQPLFTIIFENGNIIAVNKAAGISVGGDRWDESKERLDKLVAEIIKPPAKIFTVHRIDCDTSGLVVFAKNEEAHRRLSTAFEGRDVTKRYVAVVHGRPSWRETACDLPLIPNGNKLHQTIIDKFQGKKSFTRFVLLGSAGNYSVIEALPETGRTHQIRVHAAALGHPVVCDSMYGKAKPVMLSEIKRNWHGDPYDEKPLLARLGLHAAELAAPTESISLRAPLPRDMSALINQMKKLYC

SEQ ID NO: 89988 - protein, 285 aa, Unknown
  Obtained from environmental sample
  misc_feature (1)..(285): Xaa is any amino acid
TAISESQTIPQQVQVPQQTQIPQQAQQQAQIPPQQIQVSQQTQIPQQAQQIIPQAATTTMQTFQTILNALQELKELGIPIELKNAPLKELETVVLQKTGIEIDQNFPNIRNLQNFFYEKPTYATISLLPANQTVHFENAANVVEIPLPKDFPVQKIFSNILQIQPPIIPQSQPILQPQQVLPEQPIPQSQQGTPPPIPPQQPIPQPQQVLPEQPIPQQSTPLPIPPQQPIQQQPQVQPQQPIPQQGMPPSILPEQPILQPQPQQPPAPPQQPITQPQQGMPPLPQ

SEQ ID NO: 89989 - protein, 276 aa, Unknown
  Obtained from environmental sample
  misc_feature (1)..(276): Xaa is any amino acid
MKKTKIDASAFLLILIVLLLAGGAVFAASYLRSDPILESLEEDRVINTLFVIEYNEKPLCSYVLMYYPATKKAAIFDIPGSLGLIIQRINRVDRIDRVYDPRRITPYTDELEKLLGIDIPFSIVITLENVGKITDLIEGVELFIPSPVDEFLGGQAMEYIMFPSGVTYLDGDKAKVYITYELPEESNEMAVYRRQRFFVGFIKRLGSQNSLLKNTQIAGVFHSLLKSGINARAQGALFEKFAGIDTDRINIQSVSGDVREVSGQPLIFPHWDGNLI

SEQ ID NO: 89990 - protein, 238 aa, Unknown
  Obtained from environmental sample
  misc_feature (1)..(238): Xaa is any amino acid
AISASGKDAQNSVTVYWDGKDDNGEKVKAGKYYLDVVGSDKDASLYTYVQSVVEGVRFTGEGAMIKIGGKEISIGEVLDVSMNTVGESGSYITPSNALSMIGKTVRAKYDEIRHTAYDIAEGDVTYPIHVNAPRGSTVEVQIKDGRGDVIATMKKTANEFGEAEFVWDGLTSDGDVATAGVYKIEVVGSDKNKNLYSYTEGVVDGITGLTGDFQMKVNGVEVSLSDIISVTTTKSSDT

SEQ ID NO: 89991 - protein, 509 aa, Unknown
  Obtained from environmental sample
  DOMAIN (184)...(217): Tetratricopeptide repeat
  misc_feature (1)..(509): Xaa is any amino acid
AYWVRKQGSGAEHTSIANLEAVTLIALGKLDAAASVIAELLSREPYNREALFTAGELDIARGRSSEALLRFRDAVRRYPDDRRLLISLALVSGSLGDKEGSLSFINRALLQHPDDYRVFYYAAYVNANADNIPQAIRYSETALGIRPGFGPARSLLARLRYRSGQYAEAARLSDESITANREDLSAWYLKGLSYIRLNRKEDSLTVFGNALAIDQNDEFIRAAMEDTLISITPLEDPRRASWAKWHFDRARDFRSRNLSEQALFEYRRGLRLNPYALDRREYADLLRLQGYPARYLEELRLLQDQGIADRSLNDAVETYSSLLSGALFQRWQVNPVLLDGRHWKVAVFSVAGQSSYRHVDAGSVASSYIKEILIHDRSVIPMNLEVNQPSFSQAFRTAREANADFFLIVSTMESERDISLKGELFVGRTGSAAASFYTYRTGVDRMRNASRGIVEQLGNALPLRGRLVQRRQAQGLIDKGRADKVKEGVVYDIVKKDRSQLANQGIGMV

SEQ ID NO: 89992 - protein, 259 aa, Unknown
  Obtained from environmental sample
  DOMAIN (1)...(147): Plasmid recombination enzyme
  misc_feature (1)..(259): Xaa is any amino acid
SDRTKENLLVGGSVDEVMARYESLLPEKVRKNAVYAVELMMTASPEFSGDWGKYLKSCDEWAAGIFGRENVLSVAHHLDESTPHTQIMVIPLKDGKLNAKHFIGGTRDRMAELQDDFYQKVGQPSGLERGQSRKETRARHRPHTLAAAAAELEEQKKKINAVAAEVMAVSKISPVEISEMKRRLATWDQQTPASLRTYAGTLEREGYPTVGDRRKAIEAKQPAEIAEAMEKLEYEIRSIDEREETPGFVPKLIRRWIGL

SEQ ID NO: 89993 - protein, 447 aa, Unknown
  Obtained from environmental sample
  misc_feature (1)..(447): Xaa is any amino acid
MWKGIWPGLPLNEIPIGHVTNGVHTRTWISSGMIDLLDRYFGPSFLDKPTDLKIWERMDRISDEELWRTHERRRERLVAFVRERIDAQYVRTGAARIHQAEDALSPYALTLCFARRFATYKRGNLLLRDPERLLKLVRDQDRPVQLIFAGKAHPHDMPGKDLIREIVHFAEKYDVSSRIVFVENYDMNVAKYLTSGGDVWLNTPRRPMEASGTSGMKAAMNGVLNCSILDGWWDEAYNAQVGWAIGHGEQYNDERLQDDVESKALYDLLEREIVPIFYARGRDGLPREWIKMMKDCMKQIGQSMASHRMLMDYSNMFYFPALKNSRRFTKDNYAEAKSLASYFSKLQQSWSNLKIVKIESNAKPVMQRGDMMTVTAYLDLGSVLPNDLLVELYHGTVSNQNKDITAARKTEMKWLKSEGNLNVYQVRIECVDTGMQGHTVRIMPKHD

SEQ ID NO: 89994 - protein, 455 aa, Unknown
  Obtained from environmental sample
  DOMAIN (132)...(433): RmuC family
  misc_feature (1)..(455): Xaa is any amino acid
EELEKSRDSLEKKLADLIEGNEKKLEEMKETTDSSLKASREELSESLKIFEEKSSVKIDALTKYTKDELEKNRDSVEKKLADITEGNEKKLNEMRETTDSGLKYSREVLSTSLKAFEDKFATKIETMQKGNEKKLDEMRQTVDEKLHKTLETRLGESFKIISDRLELVQKNLGEMQTLANEVGSIKNVLSNVKAKGVLGEYQLGAILGQVLTPEQYAQSVETKAGSGEKVEFAVKIPSRDDSNRAVWLPIDAKFPTSDYEALLDAYEAGEKEGISKAQEELKAKIEGFAQNIRQKYIAPPNTTEFGIMFLPFEGLYAEVLRIPGLFENIQNTHKVTIAGPTTISAFLNSLQMGFRSLVVEKRTNEIWDLLGAVKTEFGKFAVVLQKTREKLNIAINEIDNADTRTRAIEKKLSNVRTLPEVEAQKLLGDLSDTGDDETDSDAESTEIKTETDESV

SEQ ID NO: 89995 - protein, 490 aa, Unknown
  Obtained from environmental sample
  DOMAIN (179)...(371): Trypsin
  misc_feature (1)..(490): Xaa is any amino acid
PPRSTNAIRLDDIKKNVRQEPIKAIDLIGIYRESYRITGEEDIAAELLELEKEATQELKDLLDKAIEEKRWDDAASYSRSLACIEPQYQAAESGYTLALAKKKLEDNDNLSAFLAAVHTHELRPLSFEDAALFLERAVQARQRRAAAYFFAVAEKAGSAAKIPAPLAEYAKGSDSVTAMINGVATVVVDRGIKIERGVGYSDKVLGSAFFIDATGLLITNYHVIASEVDPKYEGYSRMYIRMGDSTSPRFPARVIGYDKALDLALIKTEHKSEFVFSIVDRVIPQVGDTVIAIGSPGGLEKTVTSGIVSSLSRRFLQIGDVYQIDAAVNPGNSGGPVIDTSGRLVGIVFAGIEQYQGLNFAVPAQRLAAALPAMIKGGKAERPWLGITLSESSGSAEIIYTAPNTPASRHRVAEGAKIMTLNGQKITAPQSMLIPAMQDAIFQSRPGELVTLETQDSNGGIRKHLVMTVPRPELPLVDAAKLDSRERLAA

SEQ ID NO: 89996 - protein, 549 aa, Unknown
  Obtained from environmental sample
  DOMAIN (181)...(374): Calcineurin-like phosphoesterase
  misc_feature (1)..(549): Xaa is any amino acid
MRIEIPEMAVVALVGVSGSGKSTFAKTHFKPTEVLSSDYFRGLVSDDENNQQVTPQAFDALYYIANKRLDLGLLTVIDATNVQREARASVLRLAKEQNCLAVAIVLDMPEKTCRERNEKRPDRKDMSSNVVTRQYGNLRRSLNSLQKEGFRYVYIISDEEEARNAEIIRAPLWNNKKQETGPFDIIGDIHGCYDELCEILTKLGYDVDVENCIAKPPQGRKAVFLGDLCDRGPKNIEVVRLVTGMARKGDAWCVAGNHDVKLLKKLKGSDVKLTHGLDKTVSQLETQDEAFIAEVKNFIDGLISHYVFDDGRLVVAHAGLKEKYHGRGSGRVREFCLYGDTTGEVDEYGLPVRLPWANEYRGKALVVYGHTPVPEAQMVNKTICIDTGCVFGGKLTAYRYPEGEIVQVNAKQEYYPPVKPFLNAQTGNYDDMLSIDDVLGQNYLNTRLRHSIKINAENSAAALELMSRFAADPHWLIYLPPTMSPCETSKLPAYLEYPSDAFDYYKSRGVGKLVCEQKHMGSRAVIVLCRDAETAAKRFGVADNSSGII

SEQ ID NO: 89997 - protein, 470 aa, Unknown
  Obtained from environmental sample
  DOMAIN (287)...(390): Methyltransferase domain
  misc_feature (1)..(470): Xaa is any amino acid
MLLTITYTGQNTTELGYLLYKNPYRPQNFELNHGSAYVFYPEISDERTTAALLLDIDPIDLARGKTEANRGGLFDYVNDRPYVSSSFLSTAISNVFGTAMSGRADERQALSDSPLELTARIAMLPCRGDTAMLNRVFEPLGYEVSHEEFVNDERFPAWTRIKYVNLCIRGKVRLRDLLRHIYVLVPVFDRQKHYWVGEDEVDKLLKHGEEWLANHPEKGYITSRYLRHLKPLVNMAFARLVAADTEAATDADDETPKETPERKITLNAQRLGGVIAALKSCGANSVIDMGCGEGNLLSLLVREGQFARIAGMDVSHTALERAGGKLKLDRVSDSTKERITLFQSSLMYKDARFKGYDAACVVEVIEHLDLPRLAAFERVLFEYTKAPVVVLTTPNREYNAKYENLDGALQSNANALRHSDHRFEWTRAQFREWAAKTAAQYGYAVRISEIGDSDEALGAPTQMGVFTICG

SEQ ID NO: 89998 - protein, 986 aa, Unknown
  Obtained from environmental sample
  DOMAIN (5)...(971): AcrB/AcrD/AcrF family
  misc_feature (1)..(986): Xaa is any amino acid
MSLCILAAICAVSLFVIINSNEKIKENTGGSYLIKIKHYGIDAMEMERSVTIPLEDALFSINGVTAVQSSSENSLSNVFVRFRPGTHGRYEAIRDAAQRVYETLPSSAQRPEILSSNNSNVPVWSAAVLTGDLSNTAQILEKIVKPRLESLEGAGEVIVSGVGLKEIYIILDQEKLGLLQLDPSVIMSVLELNDSIFSGGIIEQKNREIIVTVDGRYSSLNTALIPLGEGKYIELSDIAVITEREREPDILSRLNGEKTASIAIMGRHGADLRKLSSDIKKEIASLSLPIEFTVLSDLGAEESKAFKSVLNAVLSGAIMVALISFLLSGKNNVNTAGFFCALSIPLICLISIAILSMVGFSPDKLLLAGIAAGIGAAIDAVILCSEKLRKCRSYENAQAALSSLAGPLLAGGATTIVALIPLSAMEDNSKIIASSIAVVTITSLVLSLTLLPPLLLWGLNAKKQNRQINAPQFVSAALKRISHRLCRFLAAVVKFCVCYPLLILSACVTITIVTIIILFLKGVDTSGYGSEDSVFAQVEFDGGLHPQETDRLLSVYSKQLIKKVGIKNVETSARTGSGSLLISFDPKLTQANFVRESAKEIDIPGGFIFFNENSANDRYWEIFIYGDEDKKCREFAETLAQICAGHPLVRERVLNFKQGSNKLILLPDREIFASANINFYSAAEIARLGVYGPVAYKRIDKNGETDVRISTNGNGIYQSREGALNLLVSAKNEESISYLKIDSLMKKKEEIEPSSIRRDSRRRFASITIITKPIDPRKVKKELSGVFKKLELDPGYSVEFDPEAIKQSENLSASIFSLVLAIIFCYMIIASINESFTVPLLVLSAIPPSLAVPALLLVLTGNAYNSAVACAFIVVSGMTVNAAILCVDGLRSKIKSGKEKKSFSIYYALRLKMPALLSTTGTTVAGAVPFLFLTEGANTLIRTLSLVSALGVTCSFFCSITVIPSILSITHKNIPLVRDKNQNLGE

SEQ ID NO: 89999 - protein, 481 aa, Unknown
  Obtained from environmental sample
  misc_feature (1)..(481): Xaa is any amino acid
FEVVSCSPESGYQSDPEKINISLDFSHDPDRASVEKYFSLTGDGNRVKGTFSWYDKKMSFSPLAPLEINTDYTITLSAEAHDTKGLSMDEPFNRYFSTRPDDTRPILLSSYPEMYSEITDARAEIKLEFLLPVPLKTLYENVSFSPSMTGIWRLENDGKLAIFTPAEPWAQKTRYEIRFSTSLTDNNGMNIGNDFLCVFTTKIDLEIPYLVNAMRITNKNELITLSTDKGYSSAAESPVENQDWEKDDKLTLVFSKPVDSISVKNYTSVENGPNLIMETPAGYEAEYTFRFESIPAYESRFTLKIKPGIKDTAGNETKEEYIYKIFANGKYSKPPTLAGIRIPMAPTNNRDKELIFYETDSLFNSFPITSENYPSGENIYTWIELYFLTAEDASIDLFSLMELFRIDTSNNVISFSPRQVKDADFSTAEPHIGMEDYQRIEIIGYLTNSTNFGIVNIQIAAGLKDTLGNRSDKLLKISLLK

SEQ ID NO: 90000 - protein, 473 aa, Unknown
  Obtained from environmental sample
  DOMAIN (58)...(146): Glycosyltransferase 36 associated family
  misc_feature (1)..(473): Xaa is any amino acid
GEIHKIVLTNESRADKDIDVFSFIEFCLWNANDDMTNFQRNFSIGEVEVEGGGARIFHKTEYRERRNHYALWAVNVPVAGFDTDRQTFLGLYNGFDHPDAVFAGKANNSIASGWAPIGSHHIKAHLKPGESKALVFVLGYCENPDDQKWASPGVINKAPANALFDKYGSPEAADRTLAALKDYWDALLGRFSVQAEDKRMARMAGVWNQYQCMVTFNMSRSASYFESGIGRGMGFRDSNQDLLGFVHLVPERARARILDIAATQFPDGSAYHQYQPLTKRGNNEIGSGFNDDPLWLICGVAAYIKETGDYSILDEKVPFDNNESLADTLFVHLKRSFDYTVTHKGPHGLPLIGRADWNDCLNLNCFSKTPGESFQTTANFESGVAESVLIAAIFAFTGPDYVEICRRTKRDEEAEYAEKEIAKMIETIDQHGWDGDWFVRAYDAYGKKIGGRECEDGKIFIESNGFAVMADIG

SEQ ID NO: 90001 - protein, 424 aa, Unknown
  Obtained from environmental sample
  DOMAIN (1)...(66): Helicase conserved C-terminal domain
  misc_feature (1)..(424): Xaa is any amino acid
DSVIEREVSQAVQAFNKGIYKAIIGSTACIGEGLNLQENSSALHHFDIPFRPSDYIQRNGRIDRQGNSQNNVELHTYMSAGTIDNYSVSLVQRKANWIDQLLKTKSNVFLNPNDESYIDADELLLALTEEWGDVGKAEERRKELDKLKADKLAEAQDRQRKDSLASLSLLRGSLLSYNGDKGTASYQNRLRKIAILEKSLLNNPTFTEHGLVKTSIPFLYAKDSDIIIRKGDMLMHRGKPHEVIALNFKRREFTAKPAWEKSMEGSPTDKHIIMSINGLEKENTFAWFPQPGRDERKMIKAIHTEEFYRLPDKKFQERHYQCHLKCASYNDHEPPIFTISEDGKLGISESRYYYFRSGNGTQSVNPFSNEGLARIKIAAKKGIEADSWQKLETYRDIFQNCVPDLACLLDDIISLETEENAEIA

SEQ ID NO: 90002 - protein, 87 aa, Unknown
  Obtained from environmental sample
  misc_feature (1)..(87): Xaa is any amino acid
MNLLAIDASCSVLSAAVCRDRDYYYAQTEAGMKHSELVMEIINKQMEKAEMKPADLNGILCMGGPGSFTGLRIGFSIAKGLALSLSI

SEQ ID NO: 90003 - protein, 345 aa, Unknown
  Obtained from environmental sample
  DOMAIN (249)...(288): WD40-like Beta Propeller Repeat
  misc_feature (1)..(345): Xaa is any amino acid
AVVLYESPALFEQTNIITELLPEEVGGFTEIFKNRVVVPHNGSLADLRHVLHHEFVHAFVFGMIYGGSILRAAGAQVPLWFNEGLAELLSSGWERQADMFMLDRMLNSTVPPPSPALDGYLAYKGGQSFLYYIYSAGGDSLFNRMLVEFRLTRSAEAAIERIYAKKMEELGKDWLNELRRVYWPEVGRRINPETQASPVTAKGRSHINVRPRVSPDGRRIAFFSDKHDYTRIIITDTAGKELRRIGGEHSLGNSFESFRPMNGAIAWSPDGKRIAFIAKRGGKDEVRIVGAAKNGKTLRAVRPPLSSIGGLDWSKDGKFLTFTGTSYGQTDLYLYDLASTSSTSS

SEQ ID NO: 90004 - protein, 82 aa, Unknown
  Obtained from environmental sample
  DOMAIN (1)...(71): Lon protease (S16) C-terminal proteolytic domain
  misc_feature (1)..(82): Xaa is any amino acid
MTGELTLTGRVLPIGGLKEKLLAAIRNGIEKVLLPVDNRGEWDELDKDITTAINVEFVENAAAAFGILFDKNIKQGIGANKK

SEQ ID NO: 90005 - protein, 286 aa, Unknown
  Obtained from environmental sample
  DOMAIN (1)...(91): Alanine dehydrogenase/PNT, N-terminal domain
  misc_feature (1)..(286): Xaa is any amino acid
DDQYVAAGAKILSSAKDVWAEVDMLVKVKEPLEAEYGLIRENQILYTYLHLAPDRPQTEALLKAKCIAVAYETIRDRKGQLPCLKPMSQIAGRLAIQEGAKYLEKPMGGRGVLLSGVPGVPHAEIVVLGAGVVGANAVKIAVGAGAHVTVVDIDVDRLEYLEDIYGSKITTLYSTPENIFEILPKADLVIGAVLIPGSSTPKLIQNKHLPNMKKGSVIVDVAIDQGGCTEASRVTYHNEPIYEQNGVMFYCVGNMPGAVAYTSTNALGNSTLRYGLSIAKLGSKLR

SEQ ID NO: 90006 - protein, 292 aa, Unknown
  Obtained from environmental sample
  DOMAIN (143)...(254): PilZ domain
  misc_feature (1)..(292): Xaa is any amino acid
TCIKELVRSQRLSRTENEKANQDFLSKLYDFRKKIEMEKPRIKNGISNSRQISDGQNLRVLVKGYGVYMSQVVKNTNTYIAISRPVNSKLPATFSWQGMKLSVYFWRDEDAGYVFDSEVLDEVFSKGIASLKISHTDSLFRTQKRKSVRVKKHKAAFLYPVFNEEEINRIEDNPGIKCFIEDLSDTGCAIKIGGKAQPGLRIKVQFHLNNSLICMSGTVRSVDFKEDHNRSLLHVEADPLPIEIRNQILGEVFGMSPEEEEELPFRMLGEEAEEMATEVEPEEDGEELLPLT

SEQ ID NO: 90007 - protein, 87 aa, Unknown
  Obtained from environmental sample
  DOMAIN (27)...(81): Hemerythrin HHE cation binding domain
  misc_feature (1)..(87): Xaa is any amino acid
VIKEAADYAVNHFSDEDKYMVKVGFPKLTEHRKQHDDFVTTVLKSINEFEAGKTAPIDLAHFLKNWLLNHIAISDKQYAPYLKNLKA

SEQ ID NO: 90008 - protein, 147 aa, Unknown
  Obtained from environmental sample
  misc_feature (1)..(147): Xaa is any amino acid
MDRRNFLKNLAIVGTAFTLKMKGGMDVFAQTIENIAEKPVDLVAVLGGEPDVMFQKAIAEMGGIGRFVKKGYKVVVKPNIGWDKTPELAANTNPILIKEIVRQCLAAGAKEVVVFDNTCDNWKKCYESSGIEAAAKAAGAKVLPADE

SEQ ID NO: 90009 - protein, 690 aa, Unknown
  Obtained from environmental sample
  DOMAIN (545)...(688): Phosphoenolpyruvate-dependent sugar phosphotransferase system, EIIA 2
  misc_feature (1)..(690): Xaa is any amino acid
MNITELMTILVFQVGIILFAVRFGGFFARKIGIPSVLGELLIGVVIGPYALGCIALPGFPEGLFPLSEFSSIAVSTELYAFATVASIILLFFSGLETDIGLFLKYSVAGVVIGLGGVLFSFVIGDLCGILLLKTSFLDTRCLFLGVLSTATSVGITARILSDRKKMDSPEGVTILAAAVFDDVLGIIILAVVLGVVAMFAGHAEAEGNFSAMAILGIAGKAFGIWLGFTALGLFFSRQLASFLKIFKNSSDFSILALGIALILAGFFEHGGLAMIIGAYIAGLSLSKTDIAAVIQGRLQGLYDFFVPVFFAVMGMMVNVREITSPPVLIFGGIYTLAAIFAKIIGCGGPALLLGFNVKGALRIGVGMVPRGEVALIIAGIGLAMGILDNQLFSIVILLTLISTIVAPPLLNASLKIKGQGTRKFVNDENITYLKWDFGSHDVARLMLDRLLIDIRAEGFYVQVMNLDNNVALARKDDISVSISREGRSVIIETSSSDLPFVNNVVYEDIINLSEAMQKLKDSMNTTAMKKELFDRRGRTTNSLLSVIEANSIVLDVKGENIEEIIRELVETLNKQKKLLNKELVLTDVFEREKIMSTNMGYGIVLPHAKSDGVKETVVAVGIKKEGIILDPSDNQPARIFVMEISPRKDGPHLQFLAALGAVLRDETIRQKLINSSSPAEVAEILHNNRR

SEQ ID NO: 90010 - protein, 769 aa, Unknown
  Obtained from environmental sample
  DOMAIN (198)...(311): PAS fold
  misc_feature (1)..(769): Xaa is any amino acid
MFQEHEKKIKKQTRLLDTVNTAATILLAGNKNIPFETILIKSFALIGHCLDVDRVQVWRNEFINNERHFVLRYEWLSEAGKRYKQIPNGLHFPYSMKKEWEELFLRGGCINTPLSEMSKEDQEFLSYYEMKSVVVIPMFLDGEFWGLFSIDDCRREHSFFNEEINILRSAGLMMCTAINHNSQLMKMNEADERTQIMLDAAPFSVIFWDKDLKLIDCNQESVKMFEMLDKQDFIENFYHLSPEYQPDGILSKDKGIELVGYALREGYSRFEWTHQKMNGEQIPVEVICIRVRHKNEFTVTEYIRDLREQKKIIAEMRKAEAAEESSKAKSQFLAKMSHEIRTPMNAILGITEIQLQDESIPKHTKEALERIFNSADLLLGIINDILDLSKIEAGKFELIPAQYDIASLIHDTVQLNMMRYESKPIEFKLEIDEKIPVILFGDELRIKQILNNLLSNAFKYTHEGVVSLNISSESKDDEGVIIIFRVSDTGQGMTAEQVQKLGSEYSRFNMEANRRTEGTGLGMNITRNLLRLMNGTIDIKSAPNEGSVFTVRLPQKFIDSDPIGRVMAENLMQLNFVNEQRIRNLQINREYMPYGRVLIVDDVETNLYVARGLMSSYDLSIDTAMSGYEAIDKIKNKFEYDVIFMDHMMPKMDGIEATKIIRELGYTKPIVALTANALTGQAEMFLKNGFDEFISKPIDIRQLNMVLNKLVRDKYPLEVVEAARKQKELIVGRTKPHIVDFQLLEFFIRDAEKAAGILEAVFLNKCRKD

SEQ ID NO: 90011 - protein, 70 aa, Unknown
  Obtained from environmental sample
  misc_feature (1)..(70): Xaa is any amino acid
VSITGISVTNTFLYIVSQILGARAGCVLNVVWNQEREKAGMSNPHCHDTENAIKTVVEAVRSLIELDTEK

SEQ ID NO: 90012 - protein, 84 aa, Unknown
  Obtained from environmental sample
  misc_feature (1)..(84): Xaa is any amino acid
MQQYNIHTAKTHLSALVEKAAKGEAFIIAKAGKPIVKVIPFVQQNTVQKRIGFLKEKIEVPDDFDNMGQNEIVQTFETQCEAAY

SEQ ID NO: 90013 - protein, 306 aa, Unknown
  Obtained from environmental sample
  DOMAIN (1)...(287): Branched-chain amino acid transport system / permease component
  misc_feature (1)..(306): Xaa is any amino acid
EFGQVLYFATPVIMTGLSVGFAGRTGLFNIGAAGQFIVGAYTAVLVGVKCDFLSGHLLWVNALLAAMLAGALWGAIPGLFKALFNVNEVISCIMTNYIGTYLVNFLITKTIFDSLRNQTMRVTAAANLPKMGMDYIFRDGFITSSANSGFFIAILFAVLIYIILEKTSFGYELKACGFNRDAAHYAGINEKRSIIVSMVIAGAMAGIGGALLFLAGSGKGITVVDTLAQEGFLGIPVALLGLNNPIGIIFSGLLIAYLSVGGFNMQLYHCAPQVIEIIIGVIIYFSAFALLVSKFIKSVRKRMGSK

SEQ ID NO: 90014 - protein, 221 aa, Unknown
  Obtained from environmental sample
  DOMAIN (1)...(221): tRNA synthetases class II (D, K and N)
  misc_feature (1)..(221): Xaa is any amino acid
MLEYYTMDAGYMDSLALTEELFRNIAANASSPNAGSPFCLPFERITVAEAFSRYAGFDLFAAVETPKGLEKEARRLGLDPGHCGGQSAPALYDLIFIHAVEPKLKQNRPIALLDYPAFVPTLARKSADGKTVERWELYYNGIELANCYSEETDPRRVREFFESEAAAKEQSAVKHAVDHDYWKIFEKPGFPACSGVALGLDRLIMAICGRSSIDGVLPFPT

SEQ ID NO: 90015 - protein, 489 aa, Unknown
  Obtained from environmental sample
  DOMAIN (80)...(295): Peptidase family U32
  misc_feature (1)..(489): Xaa is any amino acid
MNTPQCSRPELLAPAGSRESFHAAVDSGADAVYLGLGDFNARLRAKNFTTRDLSVLVPFAHSRNVKVYVTLNTLIKQNEIASALNVLYQLDQLGVDAVIAADIGLMRLSANNFPNLRIHGSTQAAVHNAYGAEFLKSLGVKRAVLARELSLEEIEETTKTSPIETEVFIHGALCYSMSGMCLASSFIGGASGNRGRCTQVCRRRFKKNNIDNADGYFFSPNDLQALPFIDRLAKAGVACFKIEGRMKGAEYVSTVVKAYRHAIDFPDDMDYAEKMLRFDFGRAKTVFFMDGGRGEAIDPKRPSGTGIFLGTVVESDGGAFSINSINNINSDDTLTIDKNDRLRIHPKDGFEGIACKAASCQLIGDNDDHRIKITPSQPIKCTTGDSVFLIGKASINTNINTDVNASINNNSINTIVNIKPTYPAAKRIANSLTPRQDSDSAVNQNPSIKPTLWFKADRLQWLDFLTATPCQRLIFDADLSEFESLINSP

SEQ ID NO: 90016 - protein, 480 aa, Unknown
  Obtained from environmental sample
  DOMAIN (460)...(480): 4Fe-4S binding domain
  misc_feature (1)..(480): Xaa is any amino acid
LKGREVKRLLYNKGDGGNKKTAAVEDIEFYQKQLRVVLRNCGVINPESIDEYIAREGYVGLEKVLFDWPVEKLIEEVKTSGLRGRGGAGFPTWLKWDLARKAQGSPKYVICNADEGDPGAYMDRSTIEGDPHSVIEGMITAGKAIGSNHGIVYIRAEYPLAVERLKIAMAQAEEYGLLGKNILGSGFDFDIEIRLGAGAFVCGEETALIKSVEGNRGMPVPKPPFPANKGLWQLPTIINNVETLANIPVITARGGAWLAKIGTEKSKGTKVFALTGKVKNSGLVEVPMGTTLREIIFEIGGGIKGGKKFKGVQTGGPSGGILTEKALDLPIDFDTLAANGSMMGSGGMIVMDEDDCVVDVARFYMDFCVDESCGKCSPCRIGTSQVLHILEKIAAGNGEEEDLEKLEVIGKAMSKASLCALGQTAPNPTLSTVKNFREEYMEHIHDKKCRSGKCKKLLRFLIDQEKCIGCGACSKRCPVA

SEQ ID NO: 90017 - protein, 312 aa, Unknown
  Obtained from environmental sample
  misc_feature (1)..(312): Xaa is any amino acid
MKLGDNYIPIIGINDFPDSSYPAILDSLNRARLEYRWVTRYICLDKEEGKKEAQKKEKHHRGSRTTFLQTFVASTSGEAAKTSNHGASVKESDSVEAYIEIENDEAALGYLTTCVIVWDPDLTKAREKADIVRTIINSKGFTCVDEKYSSLETFKGALPGQCYANYRALPVMTNTMSHVVPLSSVWTGYSYNEHAYRVTGVGIPHVICSTVEGTPFFLNLNVGDVGHSAIWGPTGAGKSTLLNLLEIQAFKYPGSLVIVFDKGRSCRQVCLAAGGLFYEPAAENAAGVNFQPLRDLETDRDIIDAIDFIETC

SEQ ID NO: 90018 - protein, 95 aa, Unknown
  Obtained from environmental sample
  DOMAIN (58)...(87): PAAR motif
  misc_feature (1)..(95): Xaa is any amino acid
MPAVARKGDVDTGHDACPPRPSSEGSPNVFVNGMPAHRQGDGWGAHGCSDHAPHGSVLAGGSGTVFVNGKPIGRVGDPVACGGAVATGSDNVFAG

SEQ ID NO: 90019 - protein, 342 aa, Unknown
  Obtained from environmental sample
  DOMAIN (54)...(144): Glycosyl hydrolases family 2, immunoglobulin-like beta-sandwich domain
  misc_feature (1)..(342): Xaa is any amino acid
DGYIPFLVNTEGLLRYGEENVIGVIADNSRLPNSRWYSGSGIYRPVWLWVGHKTHIDIEGIKISTLSYSPARIKIETMSTGGDVEAEIFYNGEKVADCRGDALTLDIPNAKLWSDETPDLYQCRVRLRENGVIVDEAIQTFGVRLVEWSAKGLFINGKKTLLRGGCVHHDNGILGARSYAESEERRVKILKKAGFNAIRSAHNPAASAMLEACDKYGIYVMDETWDMWYVHKNKYDYASDFTENYKADIEAMVRRDFSHPSVVMYSLGNEVTEPHEKKGMALMKEMAEYVRSLDKTRAVTCGVNLALLLMASKGRSVYKGEGESIVEKKIATKPINSTMFNL

SEQ ID NO: 90020 - protein, 287 aa, Unknown
  Obtained from environmental sample
  DOMAIN (133)...(257): D-alanyl-D-alanine carboxypeptidase
  misc_feature (1)..(287): Xaa is any amino acid
MRNKKKLGVEFYSLFLIPHSSFLILLILLPVSCFRPKTGVKEDSPVIINVVSDNTNSAKLDVVMRNAELPAALSGRIKTAAANPAFMADLRACLEGDSHLRELVDKRHSLPAGYAPDDLVTLTEGSYRVSRNGLTLRRAAAAALDEMAKAARAEGVTLVASSTYRSYEYQTQVYNRNVREMGQEAADRESARPGHSQHQTGLVVDFGSIDDSFAATAAGRWMSANASRFGWSLSFPDGYENVTGYRWESWHYRYVGKGLAAFIDDYFDGIQQYALRFIYEWEQADKS

SEQ ID NO: 90021 - protein, 287 aa, Unknown
  Obtained from environmental sample
  DOMAIN (29)...(206): ABC transporter
  misc_feature (1)..(287): Xaa is any amino acid
MNNALEVNNLSKTFKDFSIDSISFNLPAGAIMGFVGQNGAGKTTTIRLILNMLKRNSGEIKVFELDNIKSELEIKQKLGVIFDDLFFIETWRIKDIEDAIKGFYKLWDSKLYRQYIERLNLPFDKMIKDLSRGMKIKVMLAAAMSHNAKLLLLDEPTSGLDPVARNELLEIFKDYISNGERSILFSTHITSDLEKIADYITLIDHGKLLYSGKTGELIKNYFIVRGSPDILSPEIKRNIIGLTINQSVFVGMVKSSVAQNIPKEIISGIPSIDEILIYFSKGINKDE

SEQ ID NO: 90022 - protein, 177 aa, Unknown
  Obtained from environmental sample
  misc_feature (1)..(177): Xaa is any amino acid
VFNNPDKIVKTYKQDIPALRFIGKKYLFENKNPEEVFDKILENLDKWCWNHTFNAIEKQSNTDLKILYEGGDSFVSLMRKKEGAVFEYWLGIFMPQGTDVPAGYEKIDFPKSKLGICSVYGKRNSLIHYDADCRKKLAENCIECQENEEWFFQRFNWRGFFEEDKYGKRLLEYCYFL

SEQ ID NO: 90023 - protein, 257 aa, Unknown
  Obtained from environmental sample
  DOMAIN (1)...(250): Glycoprotease family
  misc_feature (1)..(257): Xaa is any amino acid
AINPVIEKALHTAAKTMDEISAVAVTQGPGLLGALLIGLQAAKTLCFIHKKPLIAVNHLEGHIFANSEIRYPFLCLLVSGGHTQIIISPQAGQYQTAGQTIDDAAGEAYDKAARVLQLGYPGGPLIDKLAQTGDSSAIKFSKARIRTPESEFDFSFSGLKTNVLNYCRKNPQARKEDVCTAFQKTVAETLTENTLSAAQKYGIEHIYLAGGVAANQGLRQMLMKEGQAQNKQIHLPDPALCTDNAAMIARAAIRKWH

SEQ ID NO: 90024 - protein, 164 aa, Unknown
  Obtained from environmental sample
  DOMAIN (1)...(163): Nucleotidyl transferase
  misc_feature (1)..(164): Xaa is any amino acid
LSLTSPGKLPKQFLALVGEKTMLQQTVERIPKGQIVVVPEERYAAAVQGQCKDLSGTPSDLSRAQTRQGASSREVEVLAEPFGCNTAAAVGLCALYALRQTRDKNTVLFFLPADHIVEKTVFGELFQRALVRAADGKIVTIGITPDRPETGYGYIKTAASGQGL

SEQ ID NO: 90025 - protein, 115 aa, Unknown
  Obtained from environmental sample
  DOMAIN (1)...(102): Aldo/keto reductase family
  misc_feature (1)..(115): Xaa is any amino acid
YQIEYHPGCPQKATVDFCRQNNILVEAWSPLGSGRILQDKNLLTIAEKYNKSAAQICLRWCLQNGTLPLPKSVTPARVKENYQVFDFELSAEDMLSIDALPEFGGSGFDPDTATW

SEQ ID NO: 90026 - protein, 78 aa, Unknown
  Obtained from environmental sample
  DOMAIN (1)...(75): Uncharacterised ACR, YggU family COG1872
  misc_feature (1)..(78): Xaa is any amino acid
MNTVALQIKVIPNASKTELIKTDAGYKARIQCPPVDGKANDALIALLSKEFGVAKDSIEIIKGKTSRNKTVLMKRDVR

SEQ ID NO: 90027 - protein, 249 aa, Unknown
  Obtained from environmental sample
  DOMAIN (33)...(249): Protein of unknown function (DUF541)
  misc_feature (1)..(249): Xaa is any amino acid
MKAKHFLVFVLALIATFTLGCAAGSNGGIGPQNQSTISVSGTGTVSAQPDMIQMSITLSKVAPTTKTAQEEVSKMVRQALKILKEANIENKNINTASLRFSSEYDYSKHPRILIGQKAEQSITFSIEGINNDSEKASGIIDQLIQINGIELNQVNYSVKNTSEYYIRSRELAFEKAEEKAKQYAQLSNLKLIKVLSITDQGMSQVSPMNNRLSKQMAMDELYAAADTSTTIPIGELEISTTIFTVFLLK

SEQ ID NO: 90028 - protein, 228 aa, Unknown
  Obtained from environmental sample
  DOMAIN (16)...(227): Omptin family
  misc_feature (1)..(228): Xaa is any amino acid
MNSKFSGLTAVIFFMACVPFSVKAGDFSFSVASDIGIISGLSQEYVFEGNKQISRLEWEEKHAPYTHLALNFAWKGLFITGALSTAIPVTSGSMRNHDYLLPYTNELILTNYSEHDVFLERHNNCNIDIGYTLSVQNWKLGASAGFLYSDRKWTASDGYFQYAPYGQPLTGDEPKRKFTGAVITYDQKISYFHLDLSAGYTFLDKFYVGLDFDVYPYIWIENKDHHII

SEQ ID NO: 90029 - protein, 270 aa, Unknown
  Obtained from environmental sample
  DOMAIN (10)...(196): Putative serine esterase (DUF676)
  misc_feature (1)..(270): Xaa is any amino acid
MKSGVKKYAADESLKYPVVLVHGIIAHDRRSCFNFWGRIPKIFEKKGIKVYLGNTDSWGSYDSNAKILKSTIEKILQKEKTEKVNIIAHSKGGIDSRYLIWNYGFHDKVASLTTISTPHHGSALADLIYSKKAFHSETVKKILEIFGKLYGDTNPDLRTVTCQLTTNKMKEFNAHIEKNENVYYQSLYTTMKNSFDDLMFFHSHRYLKNISGENDGFVNENSAKWGENVKKIEGAISHAEILDYKMKNIFGVNIPDIYIKIAEKLAKNGF

SEQ ID NO: 90030 - protein, 350 aa, Unknown
  Obtained from environmental sample
  DOMAIN (1)...(349): Inner membrane protein CreD
  misc_feature (1)..(350): Xaa is any amino acid
DADFSAQKKRRGIFSVALFSGNVSLSGEFSLERVKNELKQNYTLNPEQAEIIIGLSSQKGIRRIIKADWNGGELFFKPGNRNFTLSFSGNNGINALSPFNTNGENIFDIQFAVQGGKALRALPIGETTRVRIKTDWPSPSFQGGFLPVNYTLSESGFDAEWEISYLSRSIPLYWISTASGNNEGNKDWTDEYFGVDFFKPLDHYALNTRAVKYAVLFLVIPFLTLFFLEVFSQKSIHPVQYLLSGFANVIFYLLLLSISEHLSFSAAYLLAAAALTCMMTLYARSLLETWTRSAYMGLVMALLYLIMYLTLNVEDWALLIGSIAAFLITGVVMFLTRRLDWSNLNIKGEK

SEQ ID NO: 90031 - protein, 553 aa, Unknown
  Obtained from environmental sample
  DOMAIN (164)...(379): Methyl-accepting chemotaxis protein (MCP) signaling domain
  misc_feature (1)..(553): Xaa is any amino acid
MIASTEKYIMRDVVAMRNFVIVMALVAIAAAVVIIYFALNSAIKPIVNVADTLKEISEGEGDLTRTVDIHSQDEVGDLANYFNKTLKKIRELISAIKYKINGLAHTSYELSVNTGKTSTAVRDISSNLDNMKSLMVKQETSTNEAGKAVNNIKENIDSLKKMIEEQTESVNVSSSAIEEMTANINSVTKTLADNNKNVVALTEASENGKTGVQTVAQEIQEIARDSEGLLEINAVMDNIASQTNLLSMNAAIEAAHAGEAGKGFAVVADEIRKLAESSSAQSKTTTAMLKKIKASIDNITKSSNEVLARFGAIDTSVKTVSEHEQNILNAMEEQEQGGKQILESISRLRDVTASVKKGSDHMAASGLTLVKQTDQFIQTSKETVESMTEILKGIDQISSAVGLVNEMSQENNKNFEALKVETEKFIDSSGNEKQKILLVDDDSIHLEMVESVLQNEYEISTAKSGKEALGLFYQGLVPNLILLDLIMPGMDGWNTYNRIKAISNLHDTPIAFFTASNDPKDIQHAHDMGAVDYIKKPFDANDLIRRIRKLVRK

SEQ ID NO: 90032 - protein, 495 aa, Unknown
  Obtained from environmental sample
  DOMAIN (234)...(300): His Kinase A (phosphoacceptor) domain
  misc_feature (1)..(495): Xaa is any amino acid
AAYRGSALSTSVCWVNDKDKMFNMDGNAPYAVDPDAPENNWYNKTLHKTKTYNFSINYNPTLKETKLWINAPVFNKERTKPLGMVGVGIDVTAFVKRIYEQYKGRAELYYFNADGEITGAHNVDIVINKEHIEKFLGMAGVGVQTRALRLKEGEIVTYDSPSGKIALCTIPALGWYAVSIMPDTISDYKSPVAVVFVVMLILIALIIVVFNLFIAGFLKSLRRTMDSLEKSARYKSEFLAMMSHEIRTPMNAILGMAELLLRRGELSGEALSHAQDIKQAGNNLVSIINDILDFSKIEAGRLEIIPVKYLLASLVNDTVNIICMRIGEKPLRFLTHIDGNIPNSLIGDEVRLRQILLNLLSNAVKYSDEGYVNLTITMQKRDTEQVWLKIAVTDTGKGIKPEDQEKLFGEFVQVDTKKNRGIEGTGLGLAITQRLCLAMDGNIYLESEYGKGSTFTVIIPQLIESDTPFAEVEEPEKKNVLVYESQGRLRGVVAL

SEQ ID NO: 90033 - protein, 76 aa, Unknown
  Obtained from environmental sample
  DOMAIN (6)...(74): ATP synthase subunit C
  misc_feature (1)..(76): Xaa is any amino acid
MDMNVLLGIGAGIAVITGIGAGIGIGIATAGLIQAIARQPEAANKFTPMFFVGAALAESTAIYGLVVSIILIGKLG

SEQ ID NO: 90034 - protein, 240 aa, Unknown
  Obtained from environmental sample
  DOMAIN (17)...(233): ATP synthase A chain
  misc_feature (1)..(240): Xaa is any amino acid
MEMLEIKTILTLNVAGFSIPITETVVVSWVVMLIIIVASLLLVRRLKEVPTGPQAILETGVEFLNSFTNNQLGSFSKFLGPYIGSLFLFLLVANIIAVLSPLPLKAFGHVFTPPFEIHPPTKDINVTAALAVISITLVIVCGLSARGPGGWLKSFLHPLPVMLPFNIMDYGTRLISLALRLFGNILGGFVLMSIIEAAIPIALPVVASLYFDFFDGIVQAGIFVFLTSLYISEAVKIDTE

SEQ ID NO: 90035 - protein, 253 aa, Unknown
  Obtained from environmental sample
  DOMAIN (11)...(248): 3-beta hydroxysteroid dehydrogenase/isomerase family
  misc_feature (1)..(253): Xaa is any amino acid
MIEFYNGKRVFVTGHTGFKGAWLCRVLAKAGAEVAGYALDPPTKPSLFEQIGIASGLYHYAVCDIGNFDTLRRVVMDTRPEIVIHMAAQPLVRASYGDPRKTYETNVMGTVNILEAVRDAGTVRSLVNVTTDKVYENKEWFWGYREDETLCGGDPYSNSKSCSELVTHSYRKSFFRGVNDKCPTAISTARSGNVIGGGDYAEDRIIPDCVRAAASNNEIVIRNPRSTRPYQHVLECLYGYLLLAKAQYENPGI

SEQ ID NO: 90036 - protein, 223 aa, Unknown
  Obtained from environmental sample
  DOMAIN (9)...(188): Elongation factor Tu GTP binding domain
  misc_feature (1)..(223): Xaa is any amino acid
MSMNSTPSANRVHIAFFGRRNAGKSSLVNAVTGQNLAVVSEIKGTTTDPVHKAMELLPLGPVVIIDTPGFDDEGELGEKRVGKARQVLNKTDVAVLVLDGELPPDTALSTAEAELIGVFNEKNIPYITALNKCELCGADFLGMAASSEILPVSAKTGENINLLKEKIAALALEKEPEQRLVADLIKPNDFVILVIPIDKAAPKGRLILPQQQMIRDIWKRAQT

SEQ ID NO: 90037 - protein, 283 aa, Unknown
  Obtained from environmental sample
  misc_feature (1)..(283): Xaa is any amino acid
MAEWGWHSYPETTDSSLLRLTPYDTYGRTVYYASDDKGQEELFKKIRVSAHKFHLGLIGFELPNKKLAPDNCVPVTQTLSLWEGILSSEFEIDGNRVKTETFAHPEEDALHVRAQSPLLKEKALRVTVIFPYGSHKKTGADFSSPESHKTEVYVSKDGFIYIERKLDDTVYTVAVSGSGFSVLLNERQHTLQLIPHDECIDFSVRFEPVEIPSFLCAGIELDKPQSKNFDSFDEAKTKCLSFWKSYWTSGGFIDFSGSTDSRAFELERRIIQSQYLTAVQSRG

SEQ ID NO: 90038 - protein, 422 aa, Unknown
  Obtained from environmental sample
  DOMAIN (186)...(309): HD domain
  misc_feature (1)..(422): Xaa is any amino acid
MNVVNTSDLRPGQIFSAPVYSESEYMLVSANVPLRQRDIDVLNTWGIEYVRTDGELIDTNKPIIPTESSEQIMKALEEQIRSAIGEPEEIPEVEAIEENEGKKGESPEKAAIKFSITDVRQNSGTYRKYKSLIEKVNALFSGLKSGADVDMRSINNLCVQLLQDLRDNMDNFVEFILGGEVSGHELAKSSVNTAILSALTAQELKLPNHKINNIVAGALLHDVGMLRLSKGITEKKGGLSDAEFEQIKSHTVHSSKIVSKELFGNNEVNLIALHHHERWDGKGYPDQLAGNAIDMGARIVSVADAFEAMVSKKSYRESIVGYQAVKNMLADNARRFDPAVIMAFTKIMGIYPIGSIIRLNDESVARVLSVNSNAPMRPIVEILISKAGQIYKSGKGEVIDLLADKSLFIKKAMDPAEFAATE

SEQ ID NO: 90039 - protein, 364 aa, Unknown
  Obtained from environmental sample
  misc_feature (1)..(364): Xaa is any amino acid
MLSKKPAVLVSLEQYRIMTIYTDGSMEIIGTAEDWYMSSQNEIQFSLLPKFPAGALAAAYSNGNIAAVLNDGRISFVSINERKILWEGDSHIRESLLKNGKTETEAEIISDERGIYVLSKNGATSFSHDGRRLWLINLQDSASIPAIDENGLLYSGGKDWILYAYKTEDRSLSQRNDIYGPLPEGSYGTGSPQPVYMRNFPTSEYEIRKKLEQIQNEVNAGRVGANEPEWSSFLLTLSSSQQHIQFRINALNLLGKLGSRETIPWLTNIFRRENEPLIKAAAASAIGAIGVDPEGIAIQTFLYSVMPGNLRDEQVLIAISSATGELCRFSGPPLSGTGIKILNLLSESNQPFIVRSNANRELAS

SEQ ID NO: 90040 - protein, 135 aa, Unknown
  Obtained from environmental sample
  DOMAIN (1)...(132): TatD related DNase
  misc_feature (1)..(135): Xaa is any amino acid
MTLNLPAVIHSRGTEKRAAEICRGMGVQKAVFHCFTGDAESLEYIVNSGYYISISGIITYKNSHLRNLISNIPINKMLIETDTPYLSPVPHRGKPNRPAHLPHTASEIAGLLGINKQNLFLTLKNNTTSVFSNIY

SEQ ID NO: 90041 - protein, 197 aa, Unknown
  Obtained from environmental sample
  misc_feature (1)..(197): Xaa is any amino acid
MAENKGPAGAGKGAAQDVSKDADKEAGKEKVGDILRKERITRRITVETIAKDLKLNVGYIKALEASDYDSLPPDPYVRVYIRSLTKYLSLDADSILLEFYKERGLITDDTAQNQTANKIDVSVQQQDKNPTVIVIAALVVVMIVFALIAQKKGWITAPQETTATAVEEKPDSNDIIDHDALSQRIADSILDATNAIQ

SEQ ID NO: 90042 - protein, 320 aa, Unknown
  Obtained from environmental sample
  DOMAIN (94)...(160): His Kinase A (phosphoacceptor) domain
  misc_feature (1)..(320): Xaa is any amino acid
VICGATEPCPFCPLPDLYPMRETFPTSQWERPLMVVGKEPGTQQELWYACRSSIIRWTDGSQVLFNAYTDETIMKQHMEQLRDTARAADEASRIKSSFLANMSHEIRTPMNSIIGFSELALDDQSISVKTKDYLDKIKSASEGLLGIINDILDISKIEAGKVVLENIPFDLHEVFKICQNIITPKATAKGINLFCYSEPTLGKKLIGDPVRLRQIILNLLTNAVKFTNYGMVKVLASVVTQTQENVSIHFEVKDSGIGMNDEQLAKVFEPFTQADNSTTRKYGGTGLGLTITKNFVELMGGDLKVESVIGIGSKFHFDVT

SEQ ID NO: 90043 - protein, 206 aa, Unknown
  Obtained from environmental sample
  DOMAIN (37)...(120): Hpt domain
  misc_feature (1)..(206): Xaa is any amino acid
EAPSASSSEPQTAAVAAPQAAPAQPAESEEDARLRMRLISNFLKDNKTKDEEIKNALAAGDIKLAHRLAHTLKGVAGLVAQPGLQSASYVIENALNSGDTDTASKGLGKLSEELKKSLAELTAISDSAQKQEAPKTEPAVTLDKSEALELIEKLRVLLENGDSDCMSLIDGLRSIPESKKLIEQVEDYDFEPALQTLEEIKKSLEG

SEQ ID NO: 90044 - protein, 236 aa, Unknown
  Obtained from environmental sample
  DOMAIN (160)...(236): Transglycosylase SLT domain
  misc_feature (1)..(236): Xaa is any amino acid
LQSSSISKFTALLLYVASILTGAAAVRPASADSNLFPVPDVITHNVAFWIRIYTEVSLQDGLLHDRDYPQVVYEKMSNGDRTGKKLGELIDQRRKVYVDAIAQVRDSAPAKWSAEAKRVAELFKLAPEGAITGAEERIRHQGGQRERFRLGLMRSTMYLDTISAILKKNGVPDELKYLPHVESSFDAEAYSKVGAAGLWQFMRSTGRLYMKVDYMFDERRDPIISTNAAAKFLKAN

SEQ ID NO: 90045 - protein, 90 aa, Unknown
  Obtained from environmental sample
  DOMAIN (2)...(80): BMC domain
  misc_feature (1)..(90): Xaa is any amino acid
VDAIGVFEALSVTASIEAGDVAAKIADIFIPEIRLAVGLGGKSFVKMVGEIGEVETAMQAALAAIGKRGLVCSSVVIPNPDPSIREFFLT

SEQ ID NO: 90046 - protein, 177 aa, Unknown
  Obtained from environmental sample
  misc_feature (1)..(177): Xaa is any amino acid
MNISESDIRNLVSDVVRGLSLGNTARPSDSAPKHDAAKSGVMGGDGPGIFPDIESAIAAARQAFHEYGETPVKVRREIVRKIREIAVEYSSRLAEMAVNETGFGNVANKTSKNQLAATKTPGVEDVESAAYTDDGGLTLVERAPFGVIGSIIPSTNPAATVINNSISMLSGGNVVVF

SEQ ID NO: 90047 - protein, 148 aa, Unknown
  Obtained from environmental sample
  misc_feature (1)..(148): Xaa is any amino acid
ATNKKYVGMDPWRIAADIGLTVPKSTRLLICDVPKDHPLVWTEQLMPVIPVVRCPDVDSAIDLAVECEHGFRHSASMHSHDVMKLSRMARLMNCSIFVKNGPMYRGIGFGGPGYTTLTIASPTGDGLTRARTFTRERRCVLVDAFRIV

SEQ ID NO: 90048 - protein, 89 aa, Unknown
  Obtained from environmental sample
  DOMAIN (1)...(87): Ethanolamine utilisation protein EutN/carboxysome structural protein Ccml
  misc_feature (1)..(89): Xaa is any amino acid
MKLGRVTGSVVATRKDPSFEGVKILLLQPLDENGKPQGDAIAACDVVQAGIGDLVFFEGGREAALALENFFNPSDATIIGIVDDVEVRP

SEQ ID NO: 90049 - protein, 90 aa, Unknown
  Obtained from environmental sample
  DOMAIN (1)...(88): Ethanolamine utilisation protein EutN/carboxysome structural protein Ccml
  misc_feature (1)..(90): Xaa is any amino acid
MILGKVIGNVVSTQKHAHYLGEKILIVQPIDAHGKAAGKSLLAIDRAQAGVGDRVLVNDEGNSARLIIGNSQAAIRTVIVGIVDAVEVTV

SEQ ID NO: 90050 - protein, 89 aa, Unknown
  Obtained from environmental sample
  misc_feature (1)..(89): Xaa is any amino acid
VADSQDRIISNVIGGLHGAARVLINDTNDPANTRDTVRQVALGSDHGGFASKEILKEFLPTLGYRVVDVGAYSTDAVDYPDIALLGQKR

SEQ ID NO: 90051 - protein, 172 aa, Unknown
  Obtained from environmental sample
  misc_feature (1)..(172): Xaa is any amino acid
RTRGRILMYDFQGNLLYAFGGIGNREGSFTLPVALANMGYSLYALDSGAASLTRFDLTGYGQLINNALNEYRAGRYESSAELWEQVLKMNGNYDLAYIGIGRAALRQGEYQKSMKYYKLKHYREGYGKAYQLYRKQWMEENLWKILLILGIILFVPPVIRFLIKLVKEIKEA

SEQ ID NO: 90052 - protein, 256 aa, Unknown
  Obtained from environmental sample
  misc_feature (1)..(256): Xaa is any amino acid
MVYEFPEGEHKDIVMENEYLLLRFLPNTAEIIITEKKTGVQWRTNPVGYNDDPMADVVTKYLMGSQLSLEYADNSGVGMTLFSSFYSVDRSAYEYEVIDNALEVRYTIGDISRAYRVPPAMTEERMLEYLDRMDDDYRYEVEASYRLYDIDNLRSTDDRAKLLADYPELTKMKLYVLRGNTQDYIKESMEEYFKEAGYTYEEYFEDYNKYTASGGFEKPAFSVTLRYTLDGKSLVVNVPFDKIAYRPAYPLLQLTL

SEQ ID NO: 90053 - protein, 51 aa, Unknown
  Obtained from environmental sample
  DOMAIN (1)...(44): Ribosomal protein L34
  misc_feature (1)..(51): Xaa is any amino acid
MKRTYQPSKVKRNRKFGFRARMKTRGGRLVLKRRRAKGRYKLTASDEKKPY

SEQ ID NO: 90054 - protein, 300 aa, Unknown
  Obtained from environmental sample
  DOMAIN (44)...(147): TonB-dependent Receptor Plug Domain
  misc_feature (1)..(300): Xaa is any amino acid
MRCFFPVGLFCFLFVFSFSIYAQTNPDEDENDEAVVLPEVEVSATRDTPETVTREEMDRSGARDLWESVRDVPGVLLSDGGRRNDSNFTVRGYGADSVPIYVDGVPIASPFRGEGDSARILTGDLDSVEIKKGYGSQLLGANAMGGAILLRIAKPKKPLELLSRTTVDLDGLFSYGGISTAARAGTKQNFFYAMGTFQYRNTDHFNLSEKFEPYTGSIQGKGKRLWSDSKDMKITLLAGLIPLPDLDIWATYIYQDADKGVSPPDTGASYNIWKWPFWRRHTASLNTTYTMEKLSLSGLF

SEQ ID NO: 90055 - protein, 462 aa, Unknown
  Obtained from environmental sample
  DOMAIN (247)...(286): WD40-like Beta Propeller Repeat
  misc_feature (1)..(462): Xaa is any amino acid
RGERLEQLRQIYAETYNITLPGKTDIVLYESEMSDAFAYSNFNFLYLGVHDYEFNLRGSSDWFDDVLTHEYAHVVSIWTGLKFPPVISEIQAGYFTHPNSASRFEGLHVFPSETMPVWFLEGIAQYESSRRGADSWDSHRDMILRTLTLSGNLLSWAHMQVFAGKGDDFEKSYNHGFSLVTYIADTYGYEKIVSILRENARVGRLSFDGSVKAVLGISARQLYNDWQEQLTRRYNAQIKAVGKQVYGRKINKDGFDNGYPKFSPDGKKIYFLSSAENDYAFLDLYSYNLSDTIEDKKKIRYEMPVSNVYDIHKETGRIAFVSPRSRKSFQEPKMGGQRTFDLFVDELPPDKPKFFGKNAEKQVTAGKSVFAASFSPNGDRLVCAVRKFDRFFIAITDTSGSELHVVYPNPRVEFASEFFRSVELPKSSDTLGFNTIFSLAWSPNGKDIAVDYIDGDQRKIGI

SEQ ID NO: 90056 - protein, 360 aa, Unknown
  Obtained from environmental sample
  DOMAIN (105)...(245): Thiamine pyrophosphate enzyme, C-terminal TPP binding domain
  misc_feature (1)..(360): Xaa is any amino acid
MDIKALEKTALSVRALSIDAIEKANSGHPGLPLGAAELGAILYGELLKHDPSDPAWTDRDRFILSAGHGSMFLYSLLCLSGYKDMTLEQIKNFRQLGSRAAGHPEYGMAAGIEATSGPLGQGLAMAVGMAVAETMLAARFNTAAHKIVDHYTYAFCGDGCLMEGVASEASSFAGHYGLGKLIVFYDSNKITIDGSTDLAFTEDVAKRYEAYGWQILRGSMYDFEEIAKLTAQAKAESKKPSIIILTSIIGKGAPNKQNKADIHGAPLGADEVKAARANLGITGDFYIAPEAQDYFTAKQQEWKKARADWQALFDAWSKENPEKRKEWDKFHSPAAAPASLPAFNAGDKIATRTSGNKALG

SEQ ID NO: 90057 - protein, 609 aa, Unknown
  Obtained from environmental sample
  DOMAIN (1)...(298): Glycosyl hydrolases family 35
  misc_feature (1)..(609): Xaa is any amino acid
LRIGPWAHGECRNGGFPDWLQNDKSIKARSDDPAYLDLVRILYKKTYEEVKGLSWKESGPIIGVQIENEYGHCGGVSGGEGLKHMSTLKKIAVETGFDVPFYTATGWGGANVVDGEMLPVQGGYADAPWDQSTRKLPASQNYLLVPFRNDPLIGSDWSTKRGSRKSLLLHDRARRTKKGIYWGPPSEKFTFKVEDYPYLTAELGGGLQVTALRRPVATADDTATQALCRLATGANLLGYYMYHGGTNPDGKLTTLQESKASGSYTDVPVLSYDFQACIGEYGELHQSYRKLKRLHMFLNDFGDLVSPSVIFFPENRVEDAEDTNMLRMCVRHNLDTNTGFVFINNHQRNRIMADHSEVALSVALPDETIHLPPMNIPKGFYGVFPYNIKLGDAFLRSTNAQLLCKLRERFVFFCHEKPIFNYSGAPAPMIVLTEEEADNAWLFDGVNGELYITQGNLTEKEGELCLTTYRTEETVIRYPDKKTVSFRFNLVSINSGFTETYRDDTFVEYELRFDKIDADSINDLFLIIDYTGDRVELYRDGKLAADWFTTGLPWRVGLRRFNYEGRFTLKIYPVTKETYFECEIKERVILNSILLESQYLKKINSEVWT

SEQ ID NO: 90058 - protein, 408 aa, Unknown
  Obtained from environmental sample
  DOMAIN (147)...(237): ParB-like nuclease domain
  misc_feature (1)..(408): Xaa is any amino acid
VPVELEVPVEPEVPVEPEVPVELEVPVEPEVPVEPEVPVESEVAVELEVPVESEVAVELEVPVESEVTVEPEVPVESEVPVEPEVAVEPEVPVEAEVAVELEVPVESEVTVEPEVPVESEVPVEPEVAVESEVPVEPEVPLTQDAVVQIAVDKLVPNPSQPRKNFDETELQELADSIKEHGVIMPIIAADTGDGNYTIIAGERRTRAARLAGLEDVPVIIRDYTDLKRMEVSLIENIQRSDLNPIEEATAYKNLMDFSSLSQGDLAARVGKNRSTVTNALRLLKLSAEVQKSLETGDISSGHARALLSVTDKKQRNKLFNEITAKGLSVREAEKKASALNSTSEAGGASGEEKEKTSKRPPEIIEMEEKFIEKLGTKVTIDGGLEKGRIHIEYYSMEDLDRLYEIIGP

SEQ ID NO: 90059 - protein, 286 aa, Unknown
  Obtained from environmental sample
  DOMAIN (8)...(270): Aminotransferase class IV
  misc_feature (1)..(286): Xaa is any amino acid
MDALGYYNGKWGPLDEMTVPMNDRGCYFGDGVYDAACAANGIIFAPDEHIDRFFNGAKLLEIKISLTKEELKKTLNEMLIKVDKGEYLVYWQATRGTGRRNHVFPTGPSNLWIMIKPNSIDDIYKKIKLITMEDTRYLHCNIKTINLLLNVIASQRALEADCHETVFHRGETVTECAHSNVHIVKNGRFITHPADNLILRGIARSHLLQACDRLNIPADEREFTLSELFDADEVLVSSTDNFGLSAETIDGKNVGGKAPELLKKIQDEVLREFIEATGYTPAWYKG

SEQ ID NO: 90060 - protein, 326 aa, Unknown
  Obtained from environmental sample
  DOMAIN (9)...(318): ADP-ribosylglycohydrolase
  misc_feature (1)..(326): Xaa is any amino acid
VEKFTAKQIESVLLGVAVGDALGVPFEFLPRGAFIAVDMAGHGTHDQPPGTWSDDTSLTLCLAWAMSKHWDTENILKETACCFLRWLDDAEFTARGAVFDVGNATAKAIGKLRQNVPPTKSGGDTINDNGNGSLMRIAPIAFFVAGRPQAERFDIVRKVSSITHAHHISVLSCIVYVEYLLKLLQGDNKFAAFEATQKETMDALMKGALNKYYRSEITDYFMPLIFPGHKWHLVDKGDIKSSGFVVDTLMASIWCFLTTENYRDAVLEAVNLGDDTDTTAAVTGGLAGAYYGFGNDGIPPEWIKALAKHDTISDIAEGVFASSKNP

SEQ ID NO: 90061 - protein, 91 aa, Unknown
  Obtained from environmental sample
  misc_feature (1)..(91): Xaa is any amino acid
MASTESKLPVTPANMGSEEPVGLYYGGFVMIGMAVGAFAGFMIGGGQEEFLAGGWIDSIIGVVTGLFIGVGLGLICHGRLLSRREKPHSRP

SEQ ID NO: 90062 - protein, 446 aa, Unknown
  Obtained from environmental sample
  DOMAIN (355)...(446): Anticodon binding domain
  misc_feature (1)..(446): Xaa is any amino acid
MTEYIEPKVLKGFRDFLPQAEIVRRGLVEKIESSFRSFGLVPIDTPALEYSEILLGKGGGETEKQIYRFKDNGERDVALRFDLTVPFARFTAMHSAELTFPFKRYHIGKVWRGENTQRGRYREFMQCDFDIIGSDSPAADFEIILLIHTAMKNLGVDVTIHVNHRGLFNRFLSHIGQSEKSVEVLRAVDKLGKVGEDETLKSLTELAGVANANKIIEYINAKGGFPQVLDRLTELSGGSCPESERLATLRQFMADSLNGFKADGSKADGSSTEPFVLNPSITRGLDYYTGVVFETFLNDLPDIGSVCSGGRYDNLAGLYSRDKNSISGVGASIGLDRLIAGLESLNKLPAADYCRAAIACVDIEKSGQYQAFAGRLRQAGIPCEVFTEGCGEKQLVKQYVLAEKKGLRYVIIPGKNISSDTVTLRDITTRQNHELSIEELIEILKR

SEQ ID NO: 90063 - protein, 327 aa, Unknown
  Obtained from environmental sample
  DOMAIN (7)...(258): Aldo/keto reductase family
  misc_feature (1)..(327): Xaa is any amino acid
MDRIRFGKTGLLVSKVAFGGIPIMRISKADAAHIMREAIGLGINFIDTATGYADSEEKIGEAIKGIKRENLVIASKSPAKDKKTFTENLDLSLKRLGIDYIDIYQLHNVSSEPQKEAVFGSDGAMEGLEAAVKAGKVRFPAFTSHSIPMALEIMKSEKFAAVQLPFNYIDIEAAEKAIPLAKKLDMGFIAMKPMGGGLLNDAALSFRFFGRYEDIVPDPGFEKIEEVREIVGIVEKNEAFSAEDEKKIEMQRLELGPSWCHRCDYCQPCPQGIHISTALNIKSFIKRMTPERARLFVEPPIEKARTCLECGRCVDRCPYHLDIPVLL

SEQ ID NO: 90064 - protein, 180 aa, Unknown
  Obtained from environmental sample
  misc_feature (1)..(180): Xaa is any amino acid
DSLKTIRITKLGLWCLGLTLEKPPKPVHEYQAIADKELLLVTVQGDSLERTVYLDRIGVKLGEDRWRVSPASFISGCESKKQIEDRITRFKELIDPAPAPHWLELFDMAVIRAGMFGRYRNDVLVYNLPEDRKVSEELLSDSQLKGIAFRAEGGMLIVPSRNKKRFFTLLSEHGIASFLD

SEQ ID NO: 90065 - protein, 249 aa, Unknown
  Obtained from environmental sample
  misc_feature (1)..(249): Xaa is any amino acid
MPEQYIFRNNEYIEILPAWAQELATKYGSKTANLYIIHGNIRDLLPHRRKEDEFVFTRVQEYISDIIFGNRHIIAFYDRSSGVSFSEPEMERDYLNAAPYFAASAEIDKGDFLSSDPEKSFPYLEKYFLSRIPADKREQCRMVFIIDYAEHIVPAGDLIRLSDTDRYCMVTFNRWATDPKFINGDISIILLTENLSDISSRLIGSPSTVKISVPFPNMQIRESFLRSKENEKKLLLERGLTPEKLAIVT

SEQ ID NO: 90066 - protein, 56 aa, Unknown
  Obtained from environmental sample
  misc_feature (1)..(56): Xaa is any amino acid
MFKIKYEERKLDMVLIWGLADGHSWLNNSPARGRTDYPLPFDRDYKPKQAYWELVK

SEQ ID NO: 90067 - protein, 452 aa, Unknown
  Obtained from environmental sample
  DOMAIN (83)...(261): DEAD/DEAH box helicase
  misc_feature (1)..(452): Xaa is any amino acid
LFVYNAFLVMSDLAVSKAGTITASEDRFMEWKTKDGSYENTQYAQFDTFIEGIFDKARLLDIIKNFICFSGEVKIFGAYHQYFAVRKAVAATVRAACKNGDGKGGVFWHTQGSGKSLSMVFYAHLLQEALDSPTIVVLTDRNDLDEQLSEQFKKCAVFLRQDPQRAGSRVHLKELLAGRQANGIIFTTMQKFEESSESLSDRRNIIVMADEAHRGQYGLEEKVDAETGRVIFGMARIIRDSLPNATYIGFTGTPISSKDRSTIEVFGNYIDIYDMTQAVEDGATRPVYYESRVIHLKLDEEVLRLIDAEYDVMAQNAEPYAIEKSKKELSRVESILGAEQTIDALCGDIITHYEEYRQNELTGKAMIVAYSRPIAMEIYRKLLQLRPDWTEKIGVVMTYANSDPEEWQELIGGKRYREEMAKKFKADDSPLKIAIVVDMWLTGFDVPSLATM

SEQ ID NO: 90068 - protein, 523 aa, Unknown
  Obtained from environmental sample
  misc_feature (1)..(523): Xaa is any amino acid
MFDAWYTERTGGDKITATTVFRANDTVYARWTVAVYLVSFDVSGCNFVPPASTSPVDGKLSSLPTPTCGDTRTFDGWYTARMGSGDKVTTSKVYTENTVIYSNWIQHYKVTFNPNGGMVSIDYDITGPDGKLASLPTPTAPPVGGYAFDGWYSSGGVKITTNYVFRGDATVVAEWSPIDVSYTVTFNANGGTVSPAFRTTTGDGTLTSLPTPTREGFRFNGWYTTASSSSGVEVTAGTVFEANATVFARWTPVYTVTFNPNGGSVSPTSAVIDPDGMAASWPTPTRAGYKFDGWFTTASGGTEVAADNVFTANTAVYAHWTLVTYTITFNPNGGAVSVTSGATGAGGRLASLPTPVLKDYTFVGWFTESEGGKPVTTSTVFDDNVTVYAQWSLLTHAKVTFSAGVNGTLRATVDGIPIASGDSVGIGKTVMFTAVPNEGYKVAVWTINGKEESVTTDTSWYMLPNLSNTTAVSVAFEVKISVASPNREIPSGTIGGAVVAIAPVKVLSGGVTLGPNPVRSFGE

SEQ ID NO: 90069 - protein, 534 aa, Unknown
  Obtained from environmental sample
  misc_feature (1)..(534): Xaa is any amino acid
MADLTLRAKSDWSDDYVNNGLGTDDFGFSALPGGYATNATGGSVTGLGLSGAWFMATEYDKTNGYASSTTVYNTSDKNWGVGYSNKSTRWNSIRCVSDRVPLAAPVVTDTSLIYTGTLQSPGIPEAPNGEYNITGNTEKDAGHYIATVALTADYMWSDGTTQDLKFTWSIARAEGTFAALELDTSYSPTLRLSDLALPDGYAWSDALDPSAIRLSAGVGQKFAATFTDPDSNHAAVSGEITVNVAKGSGLAATPPAVLEIRNDDRASHVFDLSAIDLRPTDHGELSYSLGEVSDGGPEGKILQSAPTVTGGKSLVYQGSGKSSGEAAQVIVITSENYEDIAVTVTFEATAQPVYAVTVVGGQAERSAYPEGGTVVVTAYEAEPGKVFEKWTTADGVEFGDSVATPTAFMMPARAVAVAAVFKDISYTITFNADGGAVSPAFGATGAGGKLASLPAPERIGYVFDGWFTAEEGGSRVDTSTAFSASAEIYARWTLGVYAVAWDADGGAPEPKQRSVTYLDSIAFPDTMGKIGYTF

SEQ ID NO: 90070 - protein, 83 aa, Unknown
  Obtained from environmental sample
  misc_feature (1)..(83): Xaa is any amino acid
MTKDKGKFYTFEGIDGCGKSTQLARVAERLRENGTPFKVTREPGGTAISEKIRELLMSPDNKAMCPETELLLYLAARAQHVRE

SEQ ID NO: 90071 - protein, 566 aa, Unknown
  Obtained from environmental sample
  DOMAIN (1)...(60): SecA DEAD-like domain
  misc_feature (1)..(566): Xaa is any amino acid
ILHGRRYSEGLHQALEAKEGVKVAGENQTLATITFQNFFKMYNKLAGMTGTAVTEAAEFQEIYKLDVVTIPTNRALKRMDYDDEIYKTHREKYNAIVQDIRTMHELGRPCLVGTTSIEKSELLSRMLLRAGVQHEVLNAKQHAKEAAIVAQAGRLGAVTIATNMAGRGTDIVLGGNFEAMANHDLHKENIDPDTLTLEEKRRKFAKLFAQVAEEHDKVLSLGGLHIIGTERHESRRIDNQLRGRAGRQGDPGSSKFFLSIDDDLMRIFGAEKIRLVMDRLGTPEGEAISHPWVSNSIAGAQKRVEGRNFDIRKHLKEYDDVMNLQRREIYGLRQRILRGENLKDEILDQIANSVEDMVMKYAPERVYSEETWNVDGLRDEAQTAFGVLYNPERIKVESMNQKELFDDLWEIVEKRYTEKEERFGSEAMRRFERGVFLTVIDNLWKDHLFEMDHLKGGVQFRAFGQKNPLFEYQREGLLMFKELRTNISREISNYIFRLESAERKPSSNAFAGARAVHDAAQTLFGGATTTSGGGDVSITARPRGMSGATMTTNRGAGEDGRPAPQQ

SEQ ID NO: 90072 - protein, 255 aa, Unknown
  Obtained from environmental sample
  misc_feature (1)..(255): Xaa is any amino acid
MNKKVSEIFSRRPLYIQILFTSFAFLAMVILSYIFTSRIARANLVRNIESMLDYIESQINYDLLESRTILDDFAQSVQSLALRGDDAAKLTAYNEDISSNLFSRNNDTFSPNGPFGYIEESPEGPFFFNGIGWHPPDSWRPPERPWYKAALEAGNGIAETEPFADTVTGETVFSYSRCIFDKAGKRLGVVAIDVRAGHIGENVVNIVSAKDNNYGILASQNLTIIGHSNPDYVGMKMYDPLIPTSFFTDELLRTG

SEQ ID NO: 90073 - protein, 422 aa, Unknown
  Obtained from environmental sample
  DOMAIN (32)...(97): His Kinase A (phosphoacceptor) domain
  misc_feature (1)..(422): Xaa is any amino acid
MTASTIAGVIMRDIYTIKLKEALNKAMEASKAKSDFLSNMSHEIRTPLNAITGMTTIGKNAKDMERKDYALDKIEGASTHLLGVINDVLDMSKIEANMLELSPCEFNFEKMLQKVVSVINFRVDEKRQDLVVHLDSKIPKTLIADDQRLAQVVTNLLSNAVKFTPEKGSIILDAFFIGEENGLCTIQVSVSDTGIGIKKEQQKRLFKSFQQAESSTTRKYGGTGLGLAISKSIVEMMGGKIWVQSEPAEGTTFTFTIQVTRGAEDKQKRLLDVNLSDIRVMAVDDDPEILIYFLDIMQRYGISCETAASGEKALELIEQNGGYHIYFIDWKMPGMDGIQLAREIKARKPENSVVTMISAVEWSVIFEKAKAAGVDKFLSKPLFPSAIVEVINECLGVGKQRAEETHETDINGIFAGRRILLA

SEQ ID NO: 90074 - protein, 231 aa, Unknown
  Obtained from environmental sample
  DOMAIN (35)...(221): ABC transporter
  misc_feature (1)..(231): Xaa is any amino acid
MNDPIINVENLYKHYQSGTETLTILDGLYFTVPQGKSVAVRGQSGCGKSTLLNILGGLDTSDSGLVTVGGLTISGLAEKDLTEYRQKKVGFIFQFHYLLRDFTALENVMLPAYIAGMNKKKAMERARELLADLMLADRAGHFPSQLSGGERQRVAVARSMVNDPDLILADEPTGNLDPDNSAVVAELLYRGAEKWGKTLLVVTHDEKLAARAERCYTLAGGLLNATEKADA

SEQ ID NO: 90075 - protein, 239 aa, Unknown
  Obtained from environmental sample
  DOMAIN (4)...(239): Amidohydrolase family
  misc_feature (1)..(239): Xaa is any amino acid
MIKTGTTCFVDMHMFEHQSVRAVTESGMRAVISRGLIGKTVNDPAARTRLNEAFEEMKAARFPEAAGNSRITFMLGPHAIYTCGEGLLRELPAMALEKKIGLNTHISESRFEFDTSMQQHGCSPIAYLESLGFFSVPVLAAHCVHLAEGDIEILASRKVSVATNPISNMKLGNGFAPVTRLRAAGVNLCVGTDSASSNNALNMFRELSMLSYIHKGLTKNVLELPAHETLRCGILGGAK

SEQ ID NO: 90076 - protein, 314 aa, Unknown
  Obtained from environmental sample
  DOMAIN (6)...(280): HI0933-like protein
  misc_feature (1)..(314): Xaa is any amino acid
MANLDADLIIIGAGPAGLTAAQYGARANLKVLVIEAMGPGGQILVIDQLENYPGVTESVSGYEFSRALYQQAEKFGASFLTDSVTSIKKTGFFSISLASGKTLTACAVILAAGSKPGLLGVPGESEYGGKGVSYCATCDGHFFKNKKMFIVGGGDAACEEARYLSNLTDKIVLVHRRDKFRAQEALAQRVMNNPHIEVRFNTVIKEIKGDKKVKSVLLGETTSDKVYEEETDAVFIFVGTVPQTSLVAGDDLKAKLDESGYIITNQKMFTSISGFFAAGDIRSGAFRQVVTAAADGAVAAHSAAAYIDAIKDKK

SEQ ID NO: 90077 - protein, 396 aa, Unknown
  Obtained from environmental sample
  misc_feature (1)..(396): Xaa is any amino acid
MEASDILKGHSTGSGNFSLSVYPESQPTYLELVKNGAAETFMKAGALVREAFCGPCFGAGDTPANNELSIRHVTRNFPNREGSKPGDGQIASVALMDARSIAATAANGGKITAATEINTKYGKYKFFFDKTIYEKRVYDGAGKPNPQIELSFGPNIKDWPKMPALPENLLIKVISFITDPVTTTDELIPSGETSSYRSNPLKLAEFTLSRKDPSYVKRAKEVLTLEEQRSAGKTVGETDAVFKKVQSISGCEGIEQAAVGIGSAIFARKPGDGSAREQAASCQRVLGASANFALEYATKRYRSNLINWGVLPFLVTDEKKLANGDYIFFANIKKAVLEKAEKITGFVIGEKIMEIPVTLGELTDTERQILVDGCLINYYAAVMKQAQETVKDSKNT

SEQ ID NO: 90078 - protein, 470 aa, Unknown
  Obtained from environmental sample
  DOMAIN (242)...(467): Methyl-accepting chemotaxis protein (MCP) signaling domain
  misc_feature (1)..(470): Xaa is any amino acid
NGSIWQFVIDGSAEPDDIENFSNIGDEEDTSGYDDAFRRAFTSGKTENGNLVNQEGWGWLVSFYIPIINSAGKTVGIAACDYDGNHLHNTIIKNIQRQIVIGVISILFGLAMVMLLLRQIFSPIGKINSILKEISLGEGDLTGRIEVGRDNEIGELAGYFNLTMEKIKNLVRTIKYKINGLNHTGFELSANMEKTSTAVDKISFSLDSMENLVVKQENGALVAGGAVGAIKTNIDSLKKMIEQQAESVNMSSSAIEEMTANIHSVTQTLAENSKNVGVLVEASENGKTGLQLVAQEIQEIAHDSEGLLEINSVMDNIASQTNLLSMNAAIEAAHAGEVGKGFAVVADEIRKLAESSSNQSKTTAAMLKKIKTSIDNITKSSNDVLERFGAIDSSVKTVSEHEQNILKAMQEQEIGGKQILETISLLRDITHSVKKGSDDMAKSGETLVNETDEFINTSRKAVEGMNEILK

SEQ ID NO: 90079 - protein, 456 aa, Unknown
  Obtained from environmental sample
  DOMAIN (32)...(210): Phosphoribosylglycinamide synthetase, ATP-grasp (A) domain
  misc_feature (1)..(456): Xaa is any amino acid
MTAGTDFSANVAWVAEKLGLPGIPYEAALNASDKSRMRECFKKAALPSPDFITITEADLPLHSKSKLSKLNFPLVIKPVDNMGSRGCRRVDSAEELNEAAKTAIGFSRSGRAILESYMEGPEFSVDAIVYHGEITICGLADRHIFFPPYFIEMGHTMPTVIKEKKQTAILDTFRAGIHALGLDGKESIGAAKGDIKLTAKGPMIGEIAARLSGGYMSGWTYPYSSGALPIKGAILAAMGRKPEGLVPVKNWTCAERAFISIPGTIKEISGIEQAREQNHVNDVFLRIKEGDKVSFPENNVTKCGNIIAAAQDRVTTAGAAETAARSILIRLDPSDSKTGEFLSTTTAFPPDAFQLTDEIKTSLSRIPNFPDPISQLSNPHIYPFPALTSSDLKDYMGRSVEECLEAVRKLTGFSLPMSEKNAENEIILGRSFWTAFIRGSYQGAVYHIDNLGAMRN

SEQ ID NO: 90080 - protein, 270 aa, Unknown
  Obtained from environmental sample
  DOMAIN (1)...(269): N-6 DNA Methylase
  misc_feature (1)..(270): Xaa is any amino acid
GFLISALKYIKERDPDCNVKHIINNNLFGIDINKTIARIAKMKLFLELDTYSNIISCNSLESIEKIKSLLHNTNGFDVILTNPPFGAKINQQALLRTFQLGYKWKKNQNGFTRNDNILNTQTVETLFIERCIDLLKVGGKMAIVLPNGNFENPSLEYIRYYILKKCKIMAVVNLPQETFIPYGTGVKTSLLFIEKKEEDDTQVYPIFLGKITKLGYQGNKNGTPMYKKNSYGQIVTDSNGNQILDENISELIQLYKNFCAGKDFVTSHSF

SEQ ID NO: 90081 - protein, 262 aa, Unknown
  Obtained from environmental sample
  misc_feature (1)..(262): Xaa is any amino acid
VKSDWPDLSEYILYGLSENGVNDRVFSVVDRQQIDVIRQELNFQWSGEVSDKSAQQIGEMLGAQTIVSGTVTKIGSVYRIQTRAIEVQSAAVQGQFSLNVDNKGLIVSLTKKVVPAASSPVMAVATSGASQQTPAAATAAQSAAPAAPPATAEPELPAYKIGDTGPAGGLIFYDKGNNNGGWRYLEAAPVEGEFQTCWSVRRTLVDGTQELIGSGKRNTQLIVEKFKQTPGEWDTAAQKADDLVFNGFDDWFLPSKAELDQM

SEQ ID NO: 90082 - protein, 223 aa, Unknown
  Obtained from environmental sample
  misc_feature (1)..(223): Xaa is any amino acid
MAESRRSYVRVSYDGKDITEALTASLLEFSYTDKASKESDEINIKCHDRENNWIGDWYPKKVERTIERKNNYDEMAQALQKGVSTKELQRMIDASDLTPEQGKALQTMTESSRWAQVVKENPQYKGVDGKLKLIEDIKGNHSRVTDVNNNAISGTVLHAVMCVENWNFEGDNRELDCGSFEIDSVDFSGPPDTVTIKALSVPISSSLRRSKKTRAWENITLQI

SEQ ID NO: 90083 - protein, 376 aa, Unknown
  Obtained from environmental sample
  DOMAIN (169)...(320): HD domain
  misc_feature (1)..(376): Xaa is any amino acid
IYIKQTEVEEDGQIIDKLFFKYSQNDTFQKSLLPGQKLIYSIFSMPINEKSISGYCALTGKTVDIPDMYNIPPDAPYSFNSSFDKRTGYKTISTLTFPLITADGRLLGVIQVINKMDANGNVIVFSKEDVFMINHFATTAIGALQQAYITRSMILRMIKMAELRDPKETGTHVNRVAGYAVEIYDRWAHDHNIPAAESETFRDILKIGSMLHDVGKVAISDMILKKPARFTPEEFQIMQNHTLYGASLFDDIHSNIDRMARDIALTHHENWNGTGYPGWIHPVSRVNIKTDDTGHPLGRKEEEIPLAGRIVAIADVYDALCSKRVYKEPWDEEKVLDEIRQLAGSKFDPELVNIFFEILPNIKQTQNLYPEMGTGG

SEQ ID NO: 90084 - protein, 406 aa, Unknown
  Obtained from environmental sample
  misc_feature (1)..(406): Xaa is any amino acid
MAVNIKPVQPVIAFITLFVTLLCFSCASSASKLDQKTINQIVSDIREVEKGANERGYFSAKKGIEAALDHIDHPGLVKALRNIPKDTLGSYLVVALLAGYSGNEAYFSDARNVAKLLSKIYPEYKDLPADVEEKISAARKKRSENRRPVQQQPERRRQPERQQPERQQPERQQPERQQPERQQPEQEQQPNAPQQYDPDSDFMVSRQYGGKSIAITGYTGTKRTVNIPSTIQGLPVTGIMGRAFIRNTGLTGVTIPNSVTSIGEEAFRLCTSLKSIIIPNSVTSIGNMAFEDCTGLTVITIPNNVTSIGNMAFSGCIDITNVTIGNSVTSIGKGAFNGCTSLTGVNIPNSVTLIGEFAFSDCADITGVTIGNSVNSIGRGAFSGCISLTDITIPDSVTFIGSEAFR

SEQ ID NO: 90085 - protein, 179 aa, Unknown
  Obtained from environmental sample
  misc_feature (1)..(179): Xaa is any amino acid
LKFFGHRGFKLCLFALLLAGLILAAPLYGADWAFPAAPRGHRGSVSAVFQKGDTIISAGEDGFLGLWNLYSAAAVDRFQVSQRRIIAMAGRPGKDEVCVVENDGVGLYWISAWNYRERRKIFSLQFKDVIGYISYSAGGNFIIAARSGRTALVMLDANSGDALQSPESLTGTVGLVVTG

SEQ ID NO: 90086 - protein, 445 aa, Unknown
  Obtained from environmental sample
  misc_feature (1)..(445): Xaa is any amino acid
MSYTFLSQEQFVQAGIKDAGLFSPCISEDQGRLLTIFPVSLSLEKDLANKSFSQVFVDLKNKFDEVCKRDCEKVISIFPDKVSSSPEEASDTAWNRFFEEISLSENIVETTLPSKFLRGHKPYKKESFPNSSAVQDNYSPRKFLIDHDESGGIYSKMIFTNVLINQLKGDKSRKLNAREELWQAQDSSLFSPGGGHNRGELRKSAYSSLLRAEMMTRENGKFIPSLIQHDFDFDGVKEIIFQDAMINCYIQPRGAGIFELDYLPKEWNYLDCGSNDYGRRAAFADVLLPFETKTDKPEDVITKNSRLCFIEQYESIAQDKKGKSCFKLPALGDEMPFGDIEINKCFSIKKDVITVLYNLKNTGKDPQKFKFSPIIYFSFANVTDDYVRFYAVDNNGKDIHLNGKFDAGNLKILDVKNEVQILIGSIRPFSGFLTPVFTTKFIRRQ

SEQ ID NO: 90087 - protein, 491 aa, Unknown
  Obtained from environmental sample
  DOMAIN (204)...(269): His Kinase A (phosphoacceptor) domain
  misc_feature (1)..(491): Xaa is any amino acid
SLLWRRPDDYVLTDRKWYQDAIAADGRIAETLMYHDMVYEDIMLISSRCIFDDHGRRLGVVAIRVKIDNIRKYIVNTAMVQGAYGMLISGDWIILAHPNEAFVGEDVRSLEIPFSIFVNDLNNGIEITDRPLITYQGERAMASFRFLPNGWIMGIVTPKGPYYKSISNMLLILVLLGTALSSVLIFVLIRVDAARNKSDAENRHKTSFLANVSHEIRTPMNAIIGMTDILFYEPLNKRQMGFINDIKVSAHSLLSLINDILDMSKIEAGKLELNPINYDFQSLLDNVHSMFTYVTKKKGLEFLYETEGKMPRYLFGDDIRLKQVLTNICGNAVKYTEKGYVKFKVTATDDKLTFEIKDSGMGMRKEDLPKLFNTFQRIETEQNRTIVGTGLGLSISKTFVEMMGGNIIVDSEYEQGSVFMIIIPIVLGKKEEVRSNKGLMEGHTLIAPDAKVLVVDDNEFNIRVAEGLLALFKINAHTASSGKEAIDMVKR

SEQ ID NO: 90088 - protein, 351 aa, Unknown
  Obtained from environmental sample
  DOMAIN (256)...(348): Transglycosylase SLT domain
  misc_feature (1)..(351): Xaa is any amino acid
RLDSIFQKKFSFSAENANNLWVKAFELEQAKSYEEAIKIYKKLYDPKFGKHKSRQWAKFRVGFISYKEGKYAEAADIFAEAAKEYLGLMPRSAALYFYAECQRMLAGDNLAKAYKAVIADFPLGYYSWRAKHILKYELSENAPKLGAEMTDSAAAAWLRSLQKKEANEKDSLVSIERLELISILLRSGFEREAYVLYNEALELHKNRPEFYYRYGMMFMQNGEYALAHRLARNFLDLVPREKMAGIPSQVLKFIFPLPHEVKVRKHAKIDPFLIYSVMRQESMFDALITSPAGARGLMQIMPATGEVLAKSEGIKKFNKDMLYNAYMNIRLGIRYLNDLYVEYKGDYIGIL

SEQ ID NO: 90089 - protein, 343 aa, Unknown
  Obtained from environmental sample
  DOMAIN (15)...(107): Isoamylase N-terminal domain
  misc_feature (1)..(343): Xaa is any amino acid
MAFANFTVETGKALPLGATVTDRGINFAVFSRHATSVTLIVFQSAEPGSLFTEIKLDKKKNRTGDIWHCFIPGLKEHTCYLYRAEGPYVPEKGFRFNSNKTLFDPYAKALTDLSNWDLKACVGYDPYTASKDLSYSYIDDIFTQPRCIAIDDNFDWQGDLPLNYPLRFSVLYETHVKGLTNHPSSGVSAPGTYKGVIEKIPYLKDLGITSLEFLPIQEFNENELNSTNPQTGKKLVNYWGYSTVAFFAPKTSYAHDRSPGGPVREFKEMVRELHKAGIEVILDIVFNHTAEGNEWGPTISFRGLDNTIYYMLNENKRYYQNYSGCGNTVNCNHPCVRTFIMDC

SEQ ID NO: 90090 - protein, 631 aa, Unknown
  Obtained from environmental sample
  DOMAIN (86)...(498): Alpha amylase, catalytic domain
  misc_feature (1)..(631): Xaa is any amino acid
YVPEKGFRFNSNKALFDPYAKALTDLSNWDLKACVGYDPYAASKDLSYSYTDDIFTQPRCIAIDDDFDWQGDLPLNYPLRFSVLYETHVKGLTKHPSSGVSAPGTYKGVIEKIPYFKDLGITSLEFLPIQEFNENELNSKNPQTGKKLVNYWGYSTLAFFAPKSSYAYDRSPGGQVREFKEMVRELHKAGLEVILDIVFNHTAEGNEWGPTISFRGLDNTIYYMLNGNKRYYQNYSGCGNTVNCNHPVVRTFIMDCLRYWVMEMHIDGFRFDLGSILGRDEHGNLMENPPVLQRIAEDPVLSSTKIIAEAWDAGGAYQVGWFPGGRWAEWNDRFRDDMRRYWRGDSKLTRHLATRLSGSSDLYLRDGRKPFHSVNFITSHDGFTLKDLVSYERKHNEENGENNRDGGDNNNSANNGVEGRTENEKIETRRFKLMKNFFASMMVSLGTPMILGGDEIGRTQGGNNNAYCQDNEISWYDWSFYEKNYALYRFVKEMIAFRRRHPGFMRPEFFTGRDGKYNAIPDISWFDEKGNTPNWDTIGPCLAFRMDGSYADILADRDDNDFFIMFNGSEKALSFKVCEPMAGKKWVRAVDTGLPSPNDILKSGEEQILENPYAYPLKEKSMVILISRLLY

SEQ ID NO: 90091 - protein, 466 aa, Unknown
  Obtained from environmental sample
  DOMAIN (3)...(130): B12 binding domain
  misc_feature (1)..(466): Xaa is any amino acid
MSAIVLATINAKWIHPSLALRLLKANLGNLEAHCTILEFALRQPLDEKTAPILAEHPRVIGLSVSIWNHLATLELLKALEVEWKDETRRPFIVLGGPEVSWLPEDAEIFRYADYVIRGEGEESFRSLCFELLGESQSTKKTKNEETVFIGNGDTIVNVNEISSPYRLYTDEDLTRKLIYVEASRGCPFNCEFCLGSSRNQPAAQKVREFPLEPFLADMYTLIKRGGKTFKFLDRTFNLDIDRAQRIIEFFLDKINDKPFCVHFEMVPSRFPGSLKELLCRFPAGTLRLELGIQTFNTRTRALLQMSGNIEEELKTLEFLREKTSAILHVDLIAGLPGEGLASFKSGFDRLWQVLSKQGGDRTPGGLFEIQLGILKCLPGTPIARHNEAYKMKYSAAPPYEVIETGALSTAELDKIKNFARFWELIVNRAPFPALIPALLPMGKPVFDRFMELSDKLLEHFGKNMGH

SEQ ID NO: 90092 - protein, 473 aa, Unknown
  Obtained from environmental sample
  DOMAIN (3)...(130): B12 binding domain
  misc_feature (1)..(473): Xaa is any amino acid
MSAIVLATINAKWIHPSLALRLLKANLGSLKIHCTILEFALRQPLKEKTVPIIAERPSILGLSVSIWNHLATLELLKALEAKWKNETLKPFVVLGGPEASWLPEDAEIFYFADYVIRGEGEESFRSLCFELLGETKVTEKTKTGKAVFLGKGNAIANINEISSPYRLYTTEDLTRKLIYVEASRGCPFSCEFCLGSSRNQPAAQKVREFPLEPFLADMDTLIKRGGKTFKFLDRTFNLDIDRAQRIIEFFLDKINDKPFCVHFEMVPSRFPEPLKELLCRFPAGTLRLELGIQTLNTETRALLQMSGNVDEELKTLEFLREKTNAIVHVDLIAGLPGEGLASFRNGFDMVSYGPKVVANFEIQLGILKCLPGTPIARHNEAYKMKYSAVPPYEVIETGVLSTTELEKIKNFTRFWELIVNRAPFPTLIPILLPAGKPVFDKFKELSDKLLEHFGRNWGIDREVLKSFLSQALP

SEQ ID NO: 90093 - protein, 361 aa, Unknown
  Obtained from environmental sample
  misc_feature (1)..(361): Xaa is any amino acid
MTIFQLANFDYPLILRKFDPNFTEGPFSTDPKFLPAKVGLMVKELGEFLAVSQVITPENDWKTLLKLLRICAGDEMISDSQFAQMLMGLRDVVNSKILELIVQLGIRNPVWACRPKIPDERIADSWLEVRIVKAQECIDRISNAEKNKQINVLLKEIFYGGDLTHLENYTPAKSDYFRNRELAHYTYAEGLNYLAVFLSEYIQKDIRELFDILLIRGQWTNNTDSKELSEEFHQLLALPEPIEKLDATLTEEGSNGSRLKASLLRIDRDPSQARYIDNIIDGVNEDALELINKATQHLTVVEKHLKNLTDDMQRKHPELIINWKELGNASKNPLFEVMAENHRRINCFVQLMRLCASIIPV

SEQ ID NO: 90094 - protein, 96 aa, Unknown
  Obtained from environmental sample
  misc_feature (1)..(96): Xaa is any amino acid
MTGGGVQTPGYMGHGRHFISSKKFIFGEGGVGRIVWMPKELKDDVAAKLDKTAKELFGIDGFSGMICDESVATDINGVATFLKEKKHPALSMKPIM

SEQ ID NO: 90095 - protein, 448 aa, Unknown
  Obtained from environmental sample
  DOMAIN (55)...(200): GAF domain
  misc_feature (1)..(448): Xaa is any amino acid
LSAIHVLLQKIVTKFNREAVKHNNDGARELLGRRASIVDALNKSIEIFSANKEETFDEVMTNGIRPFADAVGIDRVVFYRLIDDDGSKHLGQIYRWDKSEGGLMSIDEELKFLPNHPVLENWMSITAQGGCIRFRESDYTEDVAVLMRTYGIRSILIVPIFTHGKFWGVINFQEHKNDRYFDEDCADLLYSAARIFSNAVIRVGAGHSAEKANDMLKHREEMEAAMNRAAVMFLSQNKKMFEETMTVGVKEIADVFNLDRLSIWRNKLMPDGMHVSQIYRWDRDSGGTTVATKGLEDITYAQLIPRWEKLFEEGSSINSPIKLLPEADVLKSFGCVSVFVTPIFINNAVWGFALLEDRHTERFFEDDSVEMMRSGILLCANTVIRADMEREISDANDLNRAILDASPAGFSIFDEHARIIDCSDIVCRLLGTTKKYFLEHFNDFSPEF

SEQ ID NO: 90096 - protein, 578 aa, Unknown
  Obtained from environmental sample
  DOMAIN (446)...(475): Helix-hairpin-helix motif
  misc_feature (1)..(578): Xaa is any amino acid
MLSIANAYSEAEVLDWERQLHGLIEGKLEYVCEVKIDGTSMSLLYKNGKLLRGLTRGDGESGDDVTANIKTIKDIPQFLADAPSGEFEVRGEVYMEHSTFEKLNEELLAQGKTPYANPRNTAAGSLKLKDPEETAKRELRFFAYQIPSNFGSQLHSQNLDLLKNLGFRVFEYFVKDSVQGIFEARDYFDNLRKNLPFDIDGMVVKVNSIFQQQEAGRNTKAPRWAIAYKFKAERVYSELLSIDVQVGRTGKITPVANLKPVQLGGTTVKRATLHNFDEIKRLDLRIGDFAGIEKGGEIIPKIVEVQTEKRPPNAEPVKEPEFCPVCGEKLQKEDVDLRCENLQCKAQLQGFLEYFVSRKVMEIENLGSALIEMLLNNGMIKEVWDIYRLKKDELAKLEGMGERSAQIVMEGIEKSKSNSLERLIAGFGIRHLGVNGAKILAKHFKNLEAVAKTEKKELENINGIGEIIAESVYNFFHSSLGEEWVKKINKIGINTEYKGVSGTLFAGQTVVLTGTLPTLDREEAKAILETNGAKVTSSVSKKTSWVLAGENAGSKLEKAKELKIPIYDEEWFKEKIAN

SEQ ID NO: 90097 - protein, 731 aa, Unknown
  Obtained from environmental sample
  misc_feature (1)..(731): Xaa is any amino acid
FALPETPEFGADTVQDLFSPDMAGQGTFITSRGSAPFSAINPAQAGQTDRMILNAGAIGVTNLNIATELGGIFDLGFLYPTKTATYSATLRYYYFDQFKTDFPLKNELGGNFSIAKEFFPQFSLGAGINFGAGPDNWTLSADLGLLQNLGDIVFMKNFTWAFVLRNMGMSWAPTWFTPWLGFTFDFIHIEGKGGKPSPLIMNFAADVGVPSVIVPENINVIVKTGITITILEKVTLSVLWPGAAGYNMRESQEKNRGHFQWLPSVGMGFNFIIPSGGKRQPGERRPSDGDITFDAAFKPLYYDVYATGAGVTWYAGYRDDLPPNIIVNYPETQYFSPNYDGKSDALVFPVRIVDDHYVMSWIMTIKDSNGNIVRTYQNKDRRLEMMNVRDIYGRYYLEKRAIEVPPTMRWDGVFTTGEIGPDGKYYFSISAEDENGNVGLSPSYEVVLKNTPPQVTIDNINDRVFDPSSGNRTSINIVSRGTEEEKWESSIYNAEGKLIRTFAPKSGSPQPQIWDGKTDSGELAPDGAYTFRIMSTDRAQNTGLAVMSNIVVDTKTVGAILTASANAIAPKTGQAAELVHFNNRLNRTDGISSWKLEIKNDKGGIEKIYQGSGASQGGIGKPPENFSWNGLSGNDSVREGMVYPELTVNYLDGHIANAKSTPILVDSTGPVLDLSSAPDLFSPDNDGVNDVLSIRLKAEDVSPIARWSLDIYEPVMEDGTNPVHLFRHFEG

SEQ ID NO: 90098 - protein, 112 aa, Unknown
  Obtained from environmental sample
  DOMAIN (1)...(107): Response regulator receiver domain
  misc_feature (1)..(112): Xaa is any amino acid
DDIHLEMVETVLSSKYDIKISKSGKEAMGLFYQGLVPQLILLDLIMPEMDGWDTYKRIKAISGLHDIPIAFFTSSSDPKDIQHAHEIGAVDYIKKPYDKDDLLNRIGKILKE

SEQ ID NO: 90099 - protein, 323 aa, Unknown
  Obtained from environmental sample
  DOMAIN (1)...(323): tRNA methyl transferase
  misc_feature (1)..(323): Xaa is any amino acid
MSGGVDSSVAAYLLKQQGFDCTGITMKLFTNEDIGADGAQKCCSLEDAADARNVAYTMGMPFFVYNFTQDFKKQVIGRFIESYQKGATPNPCIDCNRYIKFEKLLNRAKQLGIDCIATGHYAVIEYDAGTGRYLLRKAADKTKDQSYVLYAMTQEQLSHTLFPLGTLNKSAVRGIAREQGFVNADKHDSQDICFVRDGTYAEFIEQYTGKKSESGDFIDVNGTVIGRHKGVIRYTIGQRKGLGLSLKRPLYVHTKNVEDNTVTLSDREGLFTKSLDASDFNWIACEKISNPIRVKSKIRYNQSEQWSTVTQISHDTVHIEFDE

SEQ ID NO: 90100 - protein, 277 aa, Unknown
  Obtained from environmental sample
  DOMAIN (1)...(170): CoA-transferase family III
  misc_feature (1)..(277): Xaa is any amino acid
KADILVENYKPGTMKKLGLDYETLKAINPGLIYASSSGFGQTGPYSSRPAYDLILQGMSGFMSITGFDAEHPVKAGSSIADVFAGVFTTIGILAALEYRSKNGKGQMVDIAMLDCMIATLENAIAAFDCTKKAPQPIGNVHRSIAPFATFPTLDGFVNVCVGNEELWRKFCETLGMAEYVMDARFANNKARVENFGTLSKIIAGYSSNRTTSEWMKSFEEVNVPCGPIMNIEQLVNDPQVKARNMIVELDHGEAGKFMAPGVPIRFSETPASIKSVA

SEQ ID NO: 90101 - protein, 434 aa, Unknown
  Obtained from environmental sample
  DOMAIN (2)...(429): Gamma-glutamyltranspeptidase
  misc_feature (1)..(434): Xaa is any amino acid
MKDYGTMPLSQVLAPAIHLANNGWQIRSGHARSIASNLTKFNQEALNVYAPNGVALKEGEIAYNKNLANLLTTLSKMNYQDAEDYVYRGPVAKALVDLSDSLGGLIKLSDMNEFRAARATPLSTNYKGVDVYVCPPNSQGMVLLEALNILETYDVKSFGHNTAEYIDLLTQILNLCIEDRNAWMGDPRFVPVPYGMITKEYARVRKNDIKLRQAMPDTIKVGNPTQYEKYFTGEKGGDTTFMVVADAMGNIVACTTSICQGWGSKLMIPGYGVMLNDRMTYFLLDESSPNHLLPRKRTMQTITPSIALKNGAPYLAWGTPGADLQEQMKLQVFLNVFEWGMNAQKAVEAPRIQTLHPTPLMDTPGFGAPPRHLSVELRVPIEERNKLEKMGYILRGGDWSMGGAGTMGLIKINPATGWKETGADPRGNNSSLAW

SEQ ID NO: 90102 - protein, 425 aa, Unknown
  Obtained from environmental sample
  misc_feature (1)..(425): Xaa is any amino acid
YTRAQANEGINRAIGILQARMKEDGAIGVWTSRSHDDPLITTYAAHFLTEARNANYYVSSAMMEKLLNACRNIASSSGTSHYNFTTRAYAIYILTRNEIVTTQLVESLKRDMNRFDESQTGIAGLYLAGTYALLQKTNDAALLLGKIKRAMAKDSSFRYIDELMYHSIYLNILSRHFPNRLRDISESLLVDMAGQMERQSYTTISANHALMAIDAYLKAVPSAETGRYTIQEVSKDNQRKELKAAGTTLFSASFSANAAKIALENKDNLNLFYQITAAGFDRELPTKETKNGIEIYREFLDSSGKPVTSIKVGDVITVKLNFRSLSSVEYRDVAIVDLCPAGLETEIDSARQTERSNDGWSADYVDIREDRLVIYGTLSARMGSFSYRARAINAGTFTTPPLYAEAMYDKSVWALRPQASIKIVK

SEQ ID NO: 90103 - protein, 258 aa, Unknown
  Obtained from environmental sample
  misc_feature (1)..(258): Xaa is any amino acid
MLRVKQHFDKGCIEKEDISKAVFEELSRPELQDLIKMNHRIAITCGSRGVANVALITRAIADFVKSKGGHPFVVPAMGSHGGATSEGQKALLAHYGVTEESVGCPILSSMETVVIGSTEGVGSPSKSADEPIYNVRIDKNAALADGIIVAGRIKPHTDFRGPYESGIMKMMAIGLGKREGADICHQLGFGHMAHMVPLFGKTIIKNAPIILGFGILENAYSETCKFVAMKASEIEKKEPELLKEARSHLPLIPFEHTD

SEQ ID NO: 90104 - protein, 502 aa, Unknown
  Obtained from environmental sample
  DOMAIN (86)...(317): Glycosyl hydrolase family 3 N terminal domain
  misc_feature (1)..(502): Xaa is any amino acid
FNSLPLFSLSFNDAGTPAEIAAAIENAMTDEQALAQVFMLGWVGEEPSPLIMDWILQRNIGGVKIFGWNTANTHKLAETVGILQSASLNGAFNIPLLVATDQEGGWIRHIKGDTSETPGNMAIGASGYPRDAYLSGYYIGKELALLGVNMNFAPMVDLFTNRSSTLIGTRAFGSDPVNTGILGAAFVKGQLAAGIIPTAKHYPGHGDTDLDSHGTLPKIEISFDALWERELVPYRMMSAEGLPAVMSGHLAFPQMQSGMAPASLSSWFLRDVLRDKIGFKGVVVTDDLMMVGATLFTGSISRTAKQAIIAGNDIIMFSNTPLLFDPVWTFLISSMKEEKEFRQYVRASARRVLELKLTYMRGNSKVPYIPDLKKVDKGLHDPEGTAYFLNLAARSVTIVKPVPSDSVFPLTNENAGRVLLAGRFSEFISYGRIAFPGASVYRFSTSTMTNDIVYYANNADTVIFCLSDNFDLRLLRTLEQLNKRVIVLSVLNPAYLESVKWI

SEQ ID NO: 90105 - protein, 281 aa, Unknown
  Obtained from environmental sample
  DOMAIN (10)...(281): Fumarate hydratase (Fumerase)
  misc_feature (1)..(281): Xaa is any amino acid
MARILDTAGLVPVIAVLAKKACYELGEDVIASLREAQNREESPYGRDCLRQLVENAEYAKKEQIACCQDTGTCNVILEIGQEVSWKGITLSDAVNEGVRRGYGDGYLRKSMVADPFNRINTNDNTPAMLHTEIVPGGRVSVTVMPKGGGCENMGAFCTLLPSDGVQGVKDFVIQTIDKAGGKPCPPLLVGVGIGGSMDKCVWLAKKALLRPVGSRNPSPFYSNMETELLEKINNLGIGPMGTGGRITALDVHAEYSPCHITALPVAVNLQCHAARVARAEL

SEQ ID NO: 90106 - protein, 261 aa, Unknown
  Obtained from environmental sample
  misc_feature (1)..(261): Xaa is any amino acid
VETYSSLLSGALFQRWQVNPVLLDGRHWKVAVFSVAGQSSYRHVDAGSVASSYIKEILIHDRSVIPMNLEVNQPSFSQAFRTAREANADFFLIVSTMENERDISLKGELFVGRTGSAAASFYTYRTGVDRMRNASRGIVEQMGNALPLRGKLVQRRQAQGLIDKGRADKVKEGVVYDIVKKDRSQLANQGIGMVYSPEDLVGKITVESVDEEVASGKLVRNGFFDRIEEGDDVFFIPESGLKTPAETAANPELRALLRTLR

SEQ ID NO: 90107 - protein, 279 aa, Unknown
  Obtained from environmental sample
  DOMAIN (16)...(167): Type III restriction enzyme, res subunit
  misc_feature (1)..(279): Xaa is any amino acid
MSDVLTEFLNETENKGLQLYPAQEEAVMELLEGKNVILATPTGSGKSLVASFLHRLMLSKNLRSVYTCPIKALVNEKWIALCKEFGAQNVGLSTGDATVNHNAPILCCTAEILEQIALREGENSNIGAVAMDEFHYYSDKERGVAWQIPLLTMKHTQFLLISATLGDTSFFETEMTKLNGLQSVCIRNAERPVPLEFTYSESPLANEIQKLLNEGKGPVYVVHFTQSEAAENAQAFTSLDIAGLLKKDKIAEAMANFRFSSPFGADIKRWLRQGIGLHH

SEQ ID NO: 90108 - protein, 419 aa, Unknown
  Obtained from environmental sample
  DOMAIN (228)...(419): Domain of unknown function (DUF323)
  misc_feature (1)..(419): Xaa is any amino acid
LQALDAGVQKEIIATAELELCKRQQIRVLQEEHFLSAEAAADIVETLALVLRGEQAPQGAFCANCGKELQKEWASCPYCATPVAKIRQKPPQPEAPQTESPQAPLQNHAPSSEALSAILAAPPGLIYEPIKEEIKEETPPLPDSSPYEQTSSATLTIQPLLNKKKNTKRNLIIAGAVLLVILMNVLGRKESTTSAPATASSNSNTGQTTTPAVESSSAKPVSPAQTAIPANFVRVEGGTFQMGTPNGGYDDERPVHTVTVKSFYIGKYEVTQKEWLEIMGTNPSKFKGDNLPVEQVSWFDAIYYCNKRSIREGLTPAYSGSGDNITCDWNANGYRLPTEAEWEYAAKGGNGSPGNYTYSGSNNIGDVAWYESNSGQRTQLVGTKAANSLGIHDMSGNVCEWCWDRYSSYSSGSQIDPRG

SEQ ID NO: 90109 - protein, 418 aa, Unknown
  Obtained from environmental sample
  DOMAIN (41)...(132): S1 RNA binding domain
  misc_feature (1)..(418): Xaa is any amino acid
MQKNNVAKRGILVSSTPYDTRIAVLDGGILTDLLVENSTSNRTLGNIYKGVVQRVVPALQAAFVKIGMEKAGFLHINDAIDRDVLLRKEYGEDDSSHTIAPSIEKVLKSGDEIMVQVIKEPINTKGARLTTHLSFAERFLVCMPNSNFIGISKKERDFNKRKIFKQLVSRHKAPDVGYIVRTQALLESENEIVKQMRKLEEKWEITKNNFNEFPPETCIYQESNSVEQSIREYFSEQTEYVYVDDEKEYQNIREYLGGANSENLQKIKLWKGYESLFESFGIEDDYEKSLSTKVYLPRGAYLIIEQTEALMSIDVNTGSRVHGSDQNRVFLETNLDAAREIAKQLRLRDVGGLVIIDFIDMESEEDKNAVVDEFRKAIRYDRTPLNFSAISQFGLMEVSRRRVRTNLASEKHSDCPMC

SEQ ID NO: 90110 - protein, 346 aa, Unknown
  Obtained from environmental sample
  misc_feature (1)..(346): Xaa is any amino acid
MAAADILKGHSTGSGNFSLSVYPESQPTCLELVKNGAVETFMKAGALVREAFCGPCFGAGDTPANNELSIRHVTRNFPNREGSKPNDGQIASVALMDARSIAATAACGGKITSATDIDVKYGKYKFFFDKNIYDKRVYNGVGSPNPQTELTFGPNIKDWPKMPALPENLLIKVVSFITDPVTTTDELIPSGETSSYRSNPLKLAEFTLSRKDPSYVKRAKEVQNIEEQRGKGTAGGELEKVLNSIQKIAGCSGIGLANIGIGSAIFARKPGDGSAREQAASCQRVLGASANLALEYATKRYRSNLINWGILPFLVTDETTFSTGDYIFFPAIKSAIQEKKESIKGY

SEQ ID NO: 90111 - protein, 206 aa, Unknown
  Obtained from environmental sample
  DOMAIN (24)...(206): ABC transporter
  misc_feature (1)..(206): Xaa is any amino acid
MALECKITKKLGAFTIDIDITADTGVTALMGASGSGKSMTLRCISGVSKPDNGRITLDGNTLYDFEQKINMPPQKRKVGFLFQDYALFPNMTILQNIMCGANNEKKEKRKTIAEDLAETFHITAHLHKHPHQLSGGEKQRAAIARILAGTPDILMLDEPFSALDSHLRWELENELTSVFQRFGKTVLYVSHNRDEVYRLCDNVIIL

SEQ ID NO: 90112 - protein, 93 aa, Unknown
  Obtained from environmental sample
  misc_feature (1)..(93): Xaa is any amino acid
AEQANLKERIIAEARPVETDTPGVFLLDLIALQNECPEISSKKAMAEFLETTPFLELHLTCKHIPPWIENSGKYEIKAQNSGDAVNAVITRKC

SEQ ID NO: 90113 - protein, 400 aa, Unknown
  Obtained from environmental sample
  DOMAIN (27)...(390): Aminotransferase class I and II
  misc_feature (1)..(400): Xaa is any amino acid
MALPFSKSAQSMRSSEIRRIMKLAGDPSLISFAGGSPGRSLLPVDIVDELYGALSTQAKRVAMQYGATDGYQPLIAEITRYLESKGIDMDGQGLIVTTGAQQAINLVAKVFVDPGDVVVTEYPSFIGALAAFKSYGAETVGVPMDGDGIVVPELLKTLDRLGKKAKILYLTPYFHNPAGIIYGAERKRELLGALKGRDIILLEDDPYGELYFDAADKPLTATMMAMPNHPVDICYTGSFAKIFGPGMRLGWLCAPLEVIDKCQLAKQSMDACSPTFTQVLAAEFLSKNKMPAYLEGLRTAYKRRAGIMLNSLKELMPSGVNWTVPRGGFYIWVTLPEYMNASDVFQKTFEGGAAFVIGSAFDPAGKKNDCLRLAFSNTPVEDIERGMEIVTDAVKAFVEK

SEQ ID NO: 90114 - protein, 314 aa, Unknown
  Obtained from environmental sample
  DOMAIN (115)...(191): Helicase conserved C-terminal domain
  misc_feature (1)..(314): Xaa is any amino acid
MLAVDEAHCISQWGQDFRPSYTRIPEFIAKLSKRPVVSAFTATATPKVRGDILAQLKLRAPQILIAGFDRKNLYFGARKPKNKYDALSAFLKEREGRSGIVYCGTRSYVEILCKRLRTDGYSVSRYHAGLPDKERHDNQDDFLHDRVKIMIATNAFGMGIDKSNVSFVLHLNMPKDIESYYQEAGRAGRNGEPAECILFYSDRDIRMNAWLLENDKEFLYSDKETGQRLKDRSRERMREMVSYSTAAGCLRGFILKYFGENPPDNCGNCDRCNNVAVTAGVADTAKRGVAKKKSVKAKIADKSVAKKKTVTAEI

SEQ ID NO: 90115 - protein, 148 aa, Unknown
  Obtained from environmental sample
  DOMAIN (5)...(147): PHP domain
  misc_feature (1)..(148): Xaa is any amino acid
MSVRNDFHVHSNESDGQLSPEMLIDAAIGNGVSVIALCDHDTTVGTRRFVQYGHNRGIKAMSGIELSAKWEGGNCHLLGIAVNDGHEPLEAVLRKTRESRDRRNSLILEKLAALGIKISPEQLQSEAGGEVVARPHIANALSKAATST

SEQ ID NO: 90116 - protein, 260 aa, Unknown
  Obtained from environmental sample
  DOMAIN (78)...(251): DUF218 domain
  misc_feature (1)..(260): Xaa is any amino acid
MSVILSKLLVTLLNPVGLTLVFLFCGLLFMLIWRKTKLSAIFFIGGFAVLLASSLPVTAHYLMRGLEGRYAPQNEYGPASAVVLLGGFTKGKAPPRQYVETTMDANRAFGAMRMWRQGLVSKIVLTGGLLEWTTNEAVPEAKSMFELLNEHFGVDSTDVILESMAQNTRDNARYTREALTAAGLGLDIILVTSAYHMPRSVAVFEKAGFTVTPAPIGFFSDKEFGRNPLMWLPSAMALFESSVAMREYLGLLVYKLAGWI

SEQ ID NO: 90117 - protein, 70 aa, Unknown
  Obtained from environmental sample
  misc_feature (1)..(70): Xaa is any amino acid
VVSVDRMDAGQGSANALDELSEEFGLEAFPIVNLNEIMGYLHNKKIDGTVVLDDSIAARISEYRREYGCR

SEQ ID NO: 90118 - protein, 449 aa, Unknown
  Obtained from environmental sample
  DOMAIN (1)...(320): Carbon starvation protein CstA
  misc_feature (1)..(449): Xaa is any amino acid
MISFILGVAALILGYLIYGKIAEKIFAIRPGLKTPAVRLNDGVDFVPMPPWKTTLIELLNIAGTGPIFGAIAGALFGPAAFAWIVFGCIFAGAVHDYMVGMLSVRNNGANISEIVGKYLGKVPLYIMRVFSIVLLIFVGVVFVTTPAQVLKTLFAPDSNSFYYIVIVGIIAYYILATLLPIDKLIGRIYPVFGACLLIMAIGMTFMMFISGEIKNIPEFAFENLRPDKGTNIMAHLFPFLFITIACGAISGFHATQSPLMARCVKNEKEGRMVFYGAMIMEGIIAMIWAAVTMAHFNYVGVVSSVAAPVIVTQSSVEYMGWIGGVLAVFGVVACPITSGDTAFRSARLTIADIFKFDQKPIKNRLAVAIPLFAIGVVLVLFAISSAKNFNIIWRYFSWSNQTLATIALWAASAYLAKTAKLYWFTLLPAAFMTVVVTSYFFTSANVWAP

SEQ ID NO: 90119 - protein, 285 aa, Unknown
  Obtained from environmental sample
  misc_feature (1)..(285): Xaa is any amino acid
MVIAQPCPAIVSFIEIYHPELLPYLAPADSPMLHSIKKVREYYPQYQKYKIAVISPCIAKKREFEETKLGDYNVTMIALKNLLDEQKIDLESSPAVEYTGLPAERAVLFPTPGGLLDTAERFVPGIRRSTRKIEGVHTIYPYLKEVSEKLNEPGIEFPLLVDCLNCEKGCAGGPGTGNSHKSLDELESPVRKRSAELEKKLNPKQREKLYKKYHKELNRYWKPGLYHRDYQDRSANNTLKRPDETELKEVFKSMKKLSSADIYDCTACGYGSCKAMATAIFNKLN

SEQ ID NO: 90120 - protein, 190 aa, Unknown
  Obtained from environmental sample
  DOMAIN (3)...(186): LytB protein
  misc_feature (1)..(190): Xaa is any amino acid
MTIIRARVLGFCMGVRRAVELTMVQAKKAAEEGSAVFTLGHLIHNPQVLADLEKQGVITLTQDAFEQIRDKSKNCGVIIRAHGISPQAEEKLRGMECKIIDATCPNVKKNQLKTQELSRAGYSLFLAGESAHAEIEGITGYASCAPFCKTVVNTQQAGEAAAALQKTNGNAETALLGQTTISGDEYISIG

SEQ ID NO: 90121 - protein, 216 aa, Unknown
  Obtained from environmental sample
  misc_feature (1)..(216): Xaa is any amino acid
MGLYFRISFLFTIILTSTANGGSGMFTDSRDGKTYKTVTIGGKTWTAENMNIKTGTSWCHGDAESNCKKYGRLYNWSTATKMVCPTGWHLPTRDEWAVLAKAAGGSGPYGGGGIAGKTLKSKSGWSDFCGPDGDKPCKNSNGTDDFGFNALSGSSRMLFNDEYNRLGEGGGWWTATEEGNLSAYGRHASFIDDRLEEQSNHRDCGLSVRCVQDVEK

SEQ ID NO: 90122 - protein, 126 aa, Unknown
  Obtained from environmental sample
  DOMAIN (4)...(102): Aldehyde oxidase and xanthine dehydrogenase, a/b hammerhead domain
  misc_feature (1)..(126): Xaa is any amino acid
MEAPRFVTDIYLPQMLYALTVRSPVAKGRLKSIDCPKLPNNYTLIRAQDIPGKNSLENSLMPVLAAEELSYIGEPVALLLGPDKNTLENYCRHCKVIVQEEAPIISLTALADALADAGVNATASAE

SEQ ID NO: 90123 - protein, 283 aa, Unknown
  Obtained from environmental sample
  misc_feature (1)..(283): Xaa is any amino acid
MLTVKAAMIGDIVGNHGVETLETKLPELIKEHQIDFVSVNGENAAEGFGMTENDFKRIIAAGADVITSGNHIWEKREFWNVLNTENTILRPANYPAGTVTNPDVSGTGSACINKKGITWIVINLQGRELMTAIDCPFKCFDRLINLHMGEAAGIHPLFTGIGNSIPCALPIVLVDFHAESSREKEALAYYADGRAAVIAGTHTHIQTADERILPKGSAYITDLGMTGNVDSVIGMDPKICIERARKQVLYHMEIAPSDKPGKMQGIIAEIDTETGRAVSIKRI

SEQ ID NO: 90124 - protein, 69 aa, Unknown
  Obtained from environmental sample
  misc_feature (1)..(69): Xaa is any amino acid
MSQTKLDILVDILKDAPDEVFIQPHNVPDPDAIASSLGLYYLLSQRGIKKLAIVYDQEIEKANSLKMLE

SEQ ID NO: 90125 - protein, 462 aa, Unknown
  Obtained from environmental sample
  DOMAIN (235)...(323): PPIC-type PPIASE domain
  misc_feature (1)..(462): Xaa is any amino acid
IIVAFVGGTLFLDWGMNIMGQGRKTAIGKIDGREIPIETFDKLVNMERYRMQEGGRDVPPMQYRQIPSQVWNQEVNRILLDKAVKSMRLESTDHEVFEYLKRNPLPGLDTAFVFQTEGRFDTTKYIQWLNTPQTYSMYPWMVDVEKQVGGQVMPGQKLDALLKAGVFVSKSEAAYEFAQRNDKATFEYYRVQGRDHRSDSAVVTDKMISDYYAANQSRFRRDEQADLYFVRILKTATEADLELNRKNLLDIKNKIISGESTFEDEATFESDDEGSAQNGGDLGWFGKGAMVPEFEAAAFALEPGAISDPVKTTFGYHIIKLEERGEPDSSGAFKIRARHILVKNNPSNETLDALSEKAEQVKRAVTNKGFAAGVAEIQDVALDSTGLFKRGDVPPKIGYLTGTGVFAFSHKVGEVSDVHDNQEAFYILGIKEKAKKGLQPLSAVRDRIVEALRDTLAMKEAK

SEQ ID NO: 90126 - protein, 317 aa, Unknown
  Obtained from environmental sample
  DOMAIN (69)...(94): Tetratricopeptide repeat
  misc_feature (1)..(317): Xaa is any amino acid
MGKDLKILKYLLCLLLVLPGLGRLEAQTGANAAGAAALYERGREFMAREEWYSAAEALLDCLRQNPAHAEGTAALAECYYELGEFDEALNWVRKARVLARNNTSIANLEAATLIALGRLDAAAAVISELLSREPYNREALFTAGELDIARGRTSEALLRYRDAVRRYPDDKRLLISLALVSGSLGDKEASLSFINRALLQHPDDYRVFYYAAYVNANADNLSQAISYSEMALNHRPGFGPARSLLARLRYRNGQYAEAARLCDESIAANREDLSAWYLKGLSYVRLNRKEDSLTVFGNALLIDPNDEFIRVALEDTL

SEQ ID NO: 90127 - protein, 77 aa, Unknown
  Obtained from environmental sample
  misc_feature (1)..(77): Xaa is any amino acid
KLAEILDNINYLHPFREGNGRTQREFLRTLAIEKGYTLNLNPPDNADVYERYMSGTIDGDLNKLAKLIEELFERINE

SEQ ID NO: 90128 - protein, 117 aa, Unknown
  Obtained from environmental sample
  misc_feature (1)..(117): Xaa is any amino acid
MKFDKARFLPLMLTGIIILVDQCSKAFIATKWPIRTINPPIKDVFNNDFLLIIHVRNPVIAFSLGQNLPASVRPVLFIALPLLVLAVLLWYYFKSNDFTNMQRWAVAGILGGGIGNL

SEQ ID NO: 90129 - protein, 356 aa, Unknown
  Obtained from environmental sample
  DOMAIN (42)...(164): Response regulator receiver domain
  misc_feature (1)..(356): Xaa is any amino acid
VVEAGGMENLGEETAEALRNFRYLSRRQTYSPGKEPSWLPHARVLIVDDMPANLLVTRGLLARYGLQADTAASGLEAVEKVKSRDYDLIFMDHMMPEMDGVETLMAIRQLAIGEEQSGKSVKQTPIIALTANALRGMKEFYLENGFQDYLSKPISPEALDEVINKWLNEQVSSSENASSLFIANSSLLAEIEAQRLDILNHYLASFTSVPETDWLAKFDTAYFERFTSLIKSIISAEMPAALREQAVLLAEAGRKEDVRKIREVLPAFCDALQKWQEQKAAGSGQDTEDKILDEILPRLKKALLAGETETAETVIGELGKAVFTPAGRELYFRLYALMFEGNTKKIMEAIKDIQHD

SEQ ID NO: 90130 - protein, 268 aa, Unknown
  Obtained from environmental sample
  DOMAIN (1)...(257): Protein of unknown function (DUF1343)
  misc_feature (1)..(268): Xaa is any amino acid
VWVVDRENPAGTFVEGSPLKPEYASFIGIEGLPHRYGLTIGEMACYFHAEIEADFPLHIVSWQAGARGFPWTISPSPAFPGFFTAGFYSGQCLWEGTNVSEGRGTTRPFEVFGAPWMENLLGYNKKAGYEGWNNPRHPLFDPGAALRWHRFIPIYHKYKDECCFGFQLIRRNPDGAYHALLHALRIIRFIGTHCEGFSFRPGKYETGNDKTAIELLAGDPLILDYLKGEGPDETELRECFRENEEEWIEKICQYRLYEELLKGTSKHY

SEQ ID NO: 90131 - protein, 346 aa, Unknown
  Obtained from environmental sample
  DOMAIN (4)...(336): Beta-lactamase
  misc_feature (1)..(346): Xaa is any amino acid
MTKIQKYLDNCVVQGVFPGASWAIGNSGAVLEKGSVGLLGNGLGPVKEDTIYDIASLTKVFTALALMKQFEDGLVRLIDPVEYFLPSYKDCPLGKASIYALLTHTAPFPEGPPLFRRVKTREELLEALRLSKLRTDNLDQVLYTCEAFILLGEIISAIDSSTLDEVIRRRVLEPLGMRETCFNPPESLIERIAPTEECPIRGRLIRGEVHDENAWIMGGVSGNAGIFSCVPDMTRIGAAMLASLENGAFLHKATAKLMTFNHTPGMGENRGLCWVIAGPGYSCGDLFSPASFGHTGFTGTSLWIDPERKLYGLLLSNRIHPKRDNTRLFRTRNIFYNLTVLDYDHG

SEQ ID NO: 90132 - protein, 313 aa, Unknown
  Obtained from environmental sample
  misc_feature (1)..(313): Xaa is any amino acid
MIMVENLQNSSSNTISAETLAQFTTEQRNEASLDIDSKSALEIVSIINNEDKKVPAAVTQILSEIAALVDDIVAAFKKGGRLIYIGAGTSGRLGVLDASECPPTYGVEPGMVMGLIAGGQEALTKSIESAEDRADDGVRELKALGFDKKDVLVGITASGQAPYVLGALEYARNIGAVTAAISCNANSKTFDYARHRLYANVGPEVVTGSTRMKSGTAQKLILNMLTTAAMIRMGKVYKNLMVDLKPVNHKLVLRSIRLIREVTGCTPEEAREKFDASGKRPKTAIVMILLKKDRDEAEKLLKEADGHISLLIE

SEQ ID NO: 90133 - protein, 234 aa, Unknown
  Obtained from environmental sample
  misc_feature (1)..(234): Xaa is any amino acid
LHNEGAVLILDDLLQKYGQNILNAVGPDRMASWRQVDGHIYTITGIVDIEGSYSWMVRKDWLDKLGLKEPSTWNEWLTVWRAFRDNDVKGNRTPVIPVAFDRSGSRVAAPIMWAFGIQSSADGQFCVYNNKYIPVYEHPRYVEFLKATADLYKEGLLDREFSSRSQNELFTAMTSGLVGSTMTWAEYASIATTANRGAGEETALWKTLAPPIGPYGDQNIQSRDWRQTSLCITT

SEQ ID NO: 90134 - protein, 320 aa, Unknown
  Obtained from environmental sample
  DOMAIN (63)...(296): Iron only hydrogenase large subunit, C-terminal domain
  misc_feature (1)..(320): Xaa is any amino acid
MQQQTIYTITANCQDCYRCVRECPVKAISIKSGQAHVEDDLCIKCGTCIRECPQHAKTVRSDLEEAKALLASGRIVAASIAPSFAAMFPGALSRRLPSALRQLGFKYVSETAEGAKFITVQSFAKPQKGSICTACPAVVNFVEKYHYEYLDALIPVVSPMIAHGRMLKEQHDGCAVIFIGPCAAKKQEILRPENTDAVDVVITFTELSEWLSSENIQLENCSESGFDQSYETGEARLFPIQGGMLKTGGIQSDGTQTDVIHISGADDVLELFSNNSDFDGKLIEPLFCKGGCVGGPCFGNVESEGNPAQNLFTRRESVIR

SEQ ID NO: 90135 - protein, 292 aa, Unknown
  Obtained from environmental sample
  DOMAIN (2)...(182): Stage II sporulation protein E (SpoIIE)
  misc_feature (1)..(292): Xaa is any amino acid
CDGVGSGIYANISAITCANRILELIRRGMSLRMTSETVAASMHRARKEDIPFSAFSAVLISPDGQFTVYSYESPNPILMQNGHAKVLTPRFYTAGFEVIGESSGILNMGDSLLMFSDGVSQAGLGHGQGMGIGSDGVSSYINLNYKPHDSISTLSKRIVEMCKTVSGGNHEDDTTLILLNCREANELTLLTGPPSNRSMNHNYALKFMSMPGKKILSGSTTTDIISEELGLKVETSMSKTYGQLPDYSIEGIDLVTEGAITLNQAYNILDEPVERLSTSTAAERICLLLHAA

SEQ ID NO: 90136 - protein, 305 aa, Unknown
  Obtained from environmental sample
  DOMAIN (1)...(304): Bacteriophage Mu P protein
  misc_feature (1)..(305): Xaa is any amino acid
VKDIKDAITPFSFKKSEVYYLGQILFKGYLLTPDPELQAGATEITLQGYPLCGVLNDCTIPPSKYPLEYYNVTLKDIADPIADIYGIKIVFKDGPGDPFTEVGIEPNEKVLSFLLKLAQQRKLLFTNDENGRLVFYKAASEKAFIQFKEGSMPLLSITPQFNAQGFYSHITGHTKNDTLTDPLSYTYENKYLINKNVIRHETIMVDDAETKTDLEKAVLAHAGRMFADCIAYNLKCDTHLNSEGKLFKKGMTVCIEAPGAMISRQTNFKARNIKLLRNTEGKTAELDLVLPGSFTDELPEVLPWD

SEQ ID NO: 90137 - protein, 318 aa, Unknown
  Obtained from environmental sample
  DOMAIN (1)...(318): Borrelia P83/100 protein
  misc_feature (1)..(318): Xaa is any amino acid
LSFIVFRGRKTEKIDADIFGLGVDTGVDHVRNLRTIIQGYLQNAYSYSEKDAALLAEYITIYNAVYRGSWDYFAGRYKTQVIGNLDKSKAGLSIRYDEWPGRTMMLIPLGPGGLSAIDTSTISDKRVVEELRKEDDKGIPQRQDMVNLKEREADQADKKAQNVRQEVRRDENKNAQERQNIEQERQKTKDDQAAGKITPEQAQQKQQELDKREQAADDKDKEIAARKDEAQKLEDFAEKKSDEAQQERQSISNDLQAAIPQPADGVIGVMISRDTPTPMGNLVRINMTGSETKRSPLDSVHTRTLTMVGGKILAVAGE

SEQ ID NO: 90138 - protein, 755 aa, Unknown
  Obtained from environmental sample
  DOMAIN (568)...(601): Tetratricopeptide repeat
  misc_feature (1)..(755): Xaa is any amino acid
LVESADKDAFEGFDPLSGVGQDKASGEAAGDNLDTLDDIDDFSFPDLDNALGESPKDKKAPSGKAGKAGRRKDRQKGEIPIPEDEKDIELNDSELGYLQETLAGYPLNLRIACEEIIAEQDVRPEQMVRLIRNLIRGAPARETAQLASEILDRPITIPRGFEKSSVEALEAEKATFAYIFIHNFLPVLRLVLIIGTVAACAFFLTYKFVYIPLKAESIYKMGYELIPKGEYQRANERFSEAFNTHRKKDWFFKYADAFIKERQYIYAEQKYDDLLRYYPRDKQGVLAYARLETKYLRNYAKADSLLRHQILDYNPDDIDALLALGDNSLAWGEIDPSKYEDARFSYARLMDILGQLPFIMERMMMYFIKTDNLKEVLPIWLWFNSNTKERPLSAETLSELGGYFLDKQLEEVRGVPNEYVAYIDDVREILLRAVREDPSLPEPHYNLARYYKNLGNSHEERVTLEIALREFEKAEEGSLRRLTYRIDAYQRYADNLINSREFLHAEEQLQQGIKLYDDAIQRRLLSPSPQYGRFYAGLGDLEYFVKTGDMEAALRYYNMAQQNGWAPPDMQYRMGAAYYQLGDWRNALENFFTASSKLPQNRRILFALGNSALKRGDYFAAQGYFSRLLDMLERHRTRLPLLLPNDRPEYLDLAERLMMARNNAGVANEMLAARTGSRAYHSRAMSLYSESQRAWDSLTRDPSSMVRSASTSLPYLNMRNVLYPRQGYEPQMYMRIDREASESSRWEQLAPSFKD

SEQ ID NO: 90139 - protein, 289 aa, Unknown
  Obtained from environmental sample
  misc_feature (1)..(289): Xaa is any amino acid
VFIDPHQDVWSRWTGGDGAPAWTLEKLGIDLDKLDKTGAAITRQHYGELHKGKPFPKMIWPSNYNRYAVATMFSLFFGGKTFAPDIQIDGKNVQDWLQGHYIAAFRHCYRRLKNCSAIKGWGVINEPHDGFIGCKDLVKNDNSMMPIGPRPSPWDTIRAASGYSVAVPVYSTGTFGMYSAKREIFNPGAISLFKEGFVCPWKQAGIWDDKDGVPRLLRKDHFSMFEKRHLNFMDDFHKPFVLNYIEAMKEADEKTIFFLEGMPSGTRAPSHPRWGKNDPQNVVNAFHWY

SEQ ID NO: 90140 - protein, 83 aa, Unknown
  Obtained from environmental sample
  misc_feature (1)..(83): Xaa is any amino acid
VEAVKQNPYAIKRVPDKIRTLEFCLDAVKFNGKCLLFIPKKLKTEELCFIAVKNTSSAREYVPKEIREKVFKLADAYKEYPIS

SEQ ID NO: 90141 - protein, 255 aa, Unknown
  Obtained from environmental sample
  misc_feature (1)..(255): Xaa is any amino acid
MLNCIRANGINLQGVPESMKTYELCLKAVSDNGYALQYVPPHIMDETIVLAAVKSNNGALKFVPTSFRTDEVYIEAIKRDSFYDVMRIVPPKYHTKENYLAIISQAEPFWCSELLEKMPKSFKTDDFLTAAARVNGAALEFVPKELITEELCLEAAKSSGAALEFTPPEFRTETICRAALENDPFALEYFPARLKTHEVCLLAVQKDGATIKYVPKKFIDANLCRMAVEQNADAILYIPKKFHTIDLWRITLQKT

SEQ ID NO: 90142 - protein, 589 aa, Unknown
  Obtained from environmental sample
  DOMAIN (415)...(503): Hpt domain
  misc_feature (1)..(589): Xaa is any amino acid
MSHEVRTPMNAILGISEIQMENETLSPNAKKALGEIYNSGYLLLGIINDILDLSKIEAGKLELAPSVYDVPSLINDSVHLNVMHYDSKPIEFNLYVDENIPSKLYGDELRIRQIINNLLSNAFKYTDRGEVSLTITAEYARQKEEPQITLVFCVADTGQGMTHEQLDMLFDEYTRFNTEANRTIEGTGLGMNITRQLVNMMGGNISVESEPGKGSVFTVCLPQETVDAEVLGREVSKNLVQFRNNRAEQMKKGPQIIREFMPYGRVLIVDDVETNLYVVKGLMAPYGLSVETASSGFEAVDKIRNGSTYDVIFMDHFMPKMDGIEAVKIIRGLGYTRPIIALTANALVGQAEMFMENGFDGFISKPIDIRQLNASLNKLIRDRAPPETVEAARQQAAKIMEKSSYERIQTASGRELSAIFIRDAERAHTILKTIISKAFRRDDDFRQYVINIHSMKSALANIGEESLSAIAFKLELAGRAENIPVIMAETPAFLDNLGEVIEKNKANAADNLLKEETEDTKFLAEKLRIIKTACENYDEVTANKELAELTQKKWSYYSNAILDSIAEYLLHSDFEEAAKLIEDYETAVS

SEQ ID NO: 90143 - protein, 235 aa, Unknown
  Obtained from environmental sample
  misc_feature (1)..(235): Xaa is any amino acid
MQTLNEKQGADNAGIGERINEFIQKNRKPIFITAASALALLFALIAAFSLMEVFRNRAIAAVEELGGRYETLLPSVNEEYSQDDVTAFIEELTAFAKKNSGYPGGRAWLLIGGLYTAKKDWAQAEAAYAEAAGTAAKTYLAPLAWFNAGVAAEEQGKTSEAIGYYESSLTAPAVFSAAPRAQFSVGRLHEALNEDEKAIEAYRAVISNWSYDQVWTNLARSRIITLETKSAGEQE

SEQ ID NO: 90144 - protein, 354 aa, Unknown
  Obtained from environmental sample
  DOMAIN (22)...(345): Adenosine/AMP deaminase
  misc_feature (1)..(354): Xaa is any amino acid
MTQGEDTDKNRQSSKFKEILLSLPKTEIHLHLEGLASIDSIWALWQKNNLISADIQTKEDLLRRFKITTLDEFIDVFINIIQHSFRTEDDFAYLINDAGEYLKNNNIVYSEIFFAPTKFLKMGFSFPKIVEILTEGAYSIHNKYGVEIKFLIDVSRTFGPENAMNNLNLMLEYKSNAIIGIGLGGTEKLGPSKDYAEVFKKAREHGIHFVAHSGEDMGWEEIGETLTYLDPERIGHGTSAIQNPNLVKYIAENKIPLEICPTSNLFTRKYVSEIETHPVKQFYENNLFVTINSDDPALFSTSLVDEYMLLFNKGVFSQNEILALIKNNIYASFLTEDKKNALWSNCNTIFNNTW

SEQ ID NO: 90145 - protein, 411 aa, Unknown
  Obtained from environmental sample
  DOMAIN (15)...(104): Cyclic nucleotide-binding domain
  misc_feature (1)..(411): Xaa is any amino acid
MQKGVIMSGEFQPVTVNLKKDAYIFVEGKHHADKFYIIKQGKVRIIREALTDETGSVVGPGDMFGLISAMAAHGYIESAVAMTNVSLMAVERKQYGSLIRKVNSVAVNSIKAFSQRLRELDVAFSQRALKNTASADPSHIEQIGDYYKNSNKLKSALYAYSRYVDLCPNAYDIDYIKAKIAELKSCVAEVRVEYAPNKMVQAYPKEHLLFAEGETGNTMYIIQNGSVKITKIVDNKEIILAVLSKGDIFGEMALLEDKPRAATAEVYEDCTLLAVNRDNFTNLIKDQPDMVVRMATLMSERIWLLYRQLDNTFIENPLGRIYDALLIQLEKNRVDINSGEPYQCSFGIKELMGMAGMPESENKYLDRKVAGDGKLTFKDDKIQINKISDILKESAFYRKAQKIAENRTSNK

SEQ ID NO: 90146 - protein, 1593 aa, Unknown
  Obtained from environmental sample
  DOMAIN (1005)...(1030): The GLUG motif
  misc_feature (1)..(1593): Xaa is any amino acid
TGIKYKPTEVGSYTVTVSAAGYNHKTSGAVTVTLSDLAGAITISPNTGVNIGTELTATYSGSETVSYQWQKDGANVGTNSSKYTPTEAGDYTVTVSATGYNSKTSSMVTVELLRGTEENPFLVTNEADLRKVGTETADGGWTLSVHYKQTANITLSGNFTPIGYAAGSGTTKFSGGYDGGGHTISGLTITGTANYLGLFGSVDADATVKNLNVSGTITQNEDTTYTGGIVGTNFGTIENCSFSGTVTGSACDIIGGIAGQNNGTVINSRNTATVSGRTQVGGIAGENQGKIDNSYNTGAITGSQQVGGISGGNSSSGNYIKNCYNTGNVISTTVTTTSNAGGIVGQSSALVEYCYNTGNVSGTGGVGGIVGYTNTGSTVRYCVSLGARVTGGNNTCRVVGVMSGTTTLTNNKARADMKVGVSGSEAIPTINIGANEREGESVSLGAAQNSVFSSFFTTTIWTLGSTLTVGGNLPILQMNTQSPAPTLPGSNPTLGTAANPFLVTNETDLKKVGTGTDGWTLSAHYKQTQNITMTTSNFTPIGNDANRFTGTYDGDGKTISGLNITGTGNNLGLFGVIHSAGTVKNVSASGTVTNTGTGTVMEYVGGIAGANNGSIENCSFSGTVNGGSGNDNIGGITGWNNGTVINSRSSATVSGRTDVGGIAGRNSGTIENSYNTGAVSGRNRVGGIAGINLNSGANIKNCYNTGDINASHTGASFAGAGGIAGVNQTSATVEYCYNTGNVTILSTVAGGIVGHNDSGSNVRNCVSLGARVTGTDNIGRIGVNSGVFTDNKSRADMKTGASGAETTKTGTGDSPNGGSNTIGTAQTSFFLGWDSTIWAISGTMTINVNLPTLKTNTQSPAPTLPATYTAPGTADNPFLVSNEADLRKVGTETAAGGWTLSAYYRQTANITLTTGSFPTIGTNSTNSFTGSYDGDGKTITGLSMTGTANNLGLFGYIGAGGTVKNVNASGTITQNGTTNAGGIAGANAGTIDNCSFSGTISGGASSNQFGGITGYNLDTIKNSRSSATISGNNYVGGIAGVNNGTIDNSYNTGAVSGNQYVGGIAGSNTGSGNYIKNCYNTGNITASATSNTYAGGIVGANQSNALIEYCYNIGNVSGPASVGGIAGTNDTGCTVQNCVSLGARITGTGTSSIGISRVSGTYGSGSTLINNKARADMKVGLSGAEATATGASNNGNGADITVGSTTTQTSVFSGWDIGGWNTSTIWTLNATLLLSGSDLPTFKSPNQQSPAPTLPAAYSPLGSADNPFLVTNETDLRKVGTETTAGGWTLSAHYRQTASITMMGGNFLRIGSSTTPFTGTYDGDGKTITGFTINGTNAYMGLFASIGATGTVKNMNVSGTITQTGGATATNTGGIAGGNDGTIDNCSFSGTVNGGTTSDYIGGITGQNNGTVKNSRSAATVSGRTSVGGIAGVNNGTIENSYNTGNITGTNQVGGIAGANSGTGSFIKIRNSYNTGDITGTGAFVGGIAGTNQSSSTVEYCYNTGNVTSSTNTAGGIAGSVSAGSTLQNCVSLGGKVTSTNNPLGRVVGGANGTLANNRARSDMKTGASGSEVLQTGTATDRNGADVTVGSGT

SEQ ID NO: 90147 - protein, 145 aa, Unknown
  Obtained from environmental sample
  misc_feature (1)..(145): Xaa is any amino acid
MGQERVSLKKVARLMRENGLNARKSRKHIPTTDSNHALAVFENILSREFHAESGGVKWVSDITYLRTVNGWVYLTVVLDLYDRKIIGWALSLGMEASETSIAAFEMAVKNRSPQGGLIFHSDRGVQYCAQSFRDVCGKAVRMLVR

SEQ ID NO: 90148 - protein, 160 aa, Unknown
  Obtained from environmental sample
  DOMAIN (1)...(141): Glycosyl transferase WecB/TagA/CpsF family
  misc_feature (1)..(160): Xaa is any amino acid
MPFEFAVSLLAILEKREFSSYLLGGRKQILMRTEKNIRLTFPKLRIVGRYAGYFRHQEEATIIEAIRKASPSLLLVGTGVRGEERWIARHNAALGNGLRMWCSDLFDVFAERKKHPSKAVFNYGLEWIGYCFQQPLKLFRIFPFLYYKLLLLIYKLFVKK

SEQ ID NO: 90149 - protein, 111 aa, Unknown
  Obtained from environmental sample
  misc_feature (1)..(111): Xaa is any amino acid
MGERFVGDEITPGLAASQDQARERVTFLKIPIDIVEPNRLGLLAFQLLTEGKEQNIVLLSLWDLLRARRNAEYRDYVKNAALVIPISKSIISGIRFLLGKKRSAICRLNLR

SEQ ID NO: 90150 - protein, 257 aa, Unknown
  Obtained from environmental sample
  DOMAIN (32)...(154): Domain of unknown function (DUF477)
  misc_feature (1)..(257): Xaa is any amino acid
MKTKLLKLCFLLLIVFSVSPAFSLERIIDKAGILSQQEKASLLAAIASAASTYNFDLVIVTEKNIGSSTPAEYADAFFDENGYGLGQNRDGCLFLLVTESRDYRFSTSGRGVKILNSAAADKLVSSVVKLLKENNFNGAFNAFLIDWKEFLFLDAKGRNYNFFYQWNLVLVIIAWVLALAIGCIIVQIWKRGMNTALGQTQAAAYMIPGSLSFREKKDSFLYCTITKTKLQTENSPSGGSVHSGSSGSSHGGRGGKF

SEQ ID NO: 90151 - protein, 543 aa, Unknown
  Obtained from environmental sample
  DOMAIN (266)...(455): Adenylate and Guanylate cyclase catalytic domain
  misc_feature (1)..(543): Xaa is any amino acid
MFTNPGETRDKFWGAQAGADVYMEKTPENFEELTGQIRRLLGESRPVDYERIKKEGGKINDDSLVEMVNNLLDNKLFQATLGSLLAELSGNVSSLEETVKGFFALLNNACRAEMCSIMIKDADDALVVYNANNGGYTEAIAEDFKAITIADFNTRFSDYKVVSKEVHDFFPAGERNEKIESYILIPLTSGGEEYATVHIGSSVKEYFSPLILENINVFLSAASPIIANALHLKQMETLQKKTRAAFARYVPIDVMDEIIKKSASPASQSESRVVTILFSDIRSFTKISENTPARELVDFLNTYFSAMGDQIIAEGGNIDKFIGDAIMAIFGAPKTLENSAVSGVRAAIRMVKNLPLVDTSNITLPEIGFGAGIGLNCGECVVGNLGFQNKMDYTVIGDTVNLASRLEGITKYYHQTIVVSEYIYSAAKDHFIFRKADSVRVKGKDQPVGLYTVYDAFRGEEEEGTPAVLVIDREALDQYNKGLKLFAMREFETAKQYFTTALSIEEKAGKSDYLASLYLSRIEEFLVNPPPCDWDGTITMTEK

SEQ ID NO: 90152 - protein, 168 aa, Unknown
  Obtained from environmental sample
  DOMAIN (28)...(168): Bacterial extracellular solute-binding proteins, family 3
  misc_feature (1)..(168): Xaa is any amino acid
MLVFPLLCALFIGCAKSGDSPTIKKGILSVGVEIGYPPMEYYGTDGALLGFDIDLTKALADKLGLKVDFIDTAWDSILAGLDAGRYDIAVNITVLPERQKKYNFTKSYINSFMTIVTCTDSHIKINKIEDVAGCRVSFQGNTTAQYFSERLNNQGIKFTSFSYDKIIN

SEQ ID NO: 90153 - protein, 358 aa, Unknown
  Obtained from environmental sample
  misc_feature (1)..(358): Xaa is any amino acid
MYALLKNLLLLLCAVLCAGSVFSQNNSVKLEQDFSNSEPLWRQALGGSVLSMPSVQAQSVVVALDGGNIKAYSVSGAPIWNYSARGRISPYVTRSPEGTSYFSRTNGILIAVNRSGRELWRRNIGSSLSARVIIGWDGRLFVPAGKTLLCYTASGNLLWTRTFETAISLAPCLSHSGGIIFALENNEVYRIDPFGNSNLWKLSNKPAALVSIDHYRFMSLYTDGSMEIIGAAEDWYLSSQNEFQFTLLPKLPAGVLSAEYRNGNIAAVLNNGKISLVSLDERKIIWESDSHIRDNLIRGGKSENEAEIIFNERGIYILSKNGASGFSHEGKRLWLINLQNSASIPVIDENRTALFRRK

SEQ ID NO: 90154 - protein, 110 aa, Unknown
  Obtained from environmental sample
  misc_feature (1)..(110): Xaa is any amino acid
SFARENLKGRNAEFLTLCDTDWEKAVLRNKFKFGFAVADPPRAGLARNCAISLAQYGPSLLAYVSCDAASLARDSKILVKGGYKLIKLKLFDFYPQTAHIESLAVFERHA

SEQ ID NO: 90155 - protein, 158 aa, Unknown
  Obtained from environmental sample
  misc_feature (1)..(158): Xaa is any amino acid
MAADGVIKVKLESIASGGDAIGRLDGKPLFVEGGAPDETILCRSIEEHKTWARAQLLEIIEPSPVRVKSVCPFYGKCGGCSLQHIEYNAQLAAKAAILKDSFLRIGGFKLDRLPKLEIIPSSPFEYRNRMQFHCLREKAKNDSPSFGLKGRGSGEIIT

SEQ ID NO: 90156 - protein, 251 aa, Unknown
  Obtained from environmental sample
  DOMAIN (14)...(250): Uncharacterized protein family UPF0007
  misc_feature (1)..(251): Xaa is any amino acid
MSLSNVSIGDNGSIAAIICAAGSSARMGGAKKEYLPLSGASDSLTVLGAAVSAFAAVPVIKTIVIVVPEEPETGETAARNALPPKIKADPTVRFITGGSTRRASVLNALRALAADAPNYALIHDGARPWISPALIERVIRSVKQYRAVIPLLPLTETPKETDLPLKGFVGCDSWGPVFIKRQLKRAFIGTAQTPQAFAFPEILVAHEKAADQDGREFTDDAEVWAEFCGPVAVIPGETGNRKITFKEDMSC

SEQ ID NO: 90157 - protein, 314 aa, Unknown
  Obtained from environmental sample
  DOMAIN (188)...(307): SCP-like extracellular protein
  misc_feature (1)..(314): Xaa is any amino acid
MNRTGRTAFLAAIIALLAGAAAGAWAQSNVMFNKLNKQTAKPKAEEDTAETKVYKHGDKDRYKDKDRDRDRDRDRDRQTQTATPTPTPAPAPAPVQTTTPAPTPAPAPVQTATPAPAPTAAPAPASADWDIKSLDAARDLDYLTDLEKDFILELNMVRSNPKRYAELYIQPRLPRYTGDKYAAAQECVAELSGAAGVGILRPEKGMHLAAKDHATDLVKAGIAGHVGSDGSRVGDRLSRYGSYKGGWAENCSYGTITARARVIGLLIDVGAPSRGHRKNIMNGAYTRVGLAVAGTHPKIGDVCVMDFASEYVNK

SEQ ID NO: 90158 - protein, 259 aa, Unknown
  Obtained from environmental sample
  misc_feature (1)..(259): Xaa is any amino acid
MRGFRHSSGMNKTVRTVVWSVMAAVLAVAGSGWLFGASAQTAQTAGTFTDSRDGKKYKTVKIGKQTWMARNLDYAPDSGKPWQYTAQNLDYAPDSGKSWCYNDSASYCAKYGRLYDRGTARAVCPAGYHLPSRDEWDDLGKAVGGKLKFGEYWDNRNNNYWVGAGKKLKAKSGWDKNDGKSGNGTDDFGFSALPGGKFSYGDFQNVGNEGGWRMSDMVESAEIKSLYHNSDVLSENYSEDPVSDNDGYSVRCVQDVRNS

SEQ ID NO: 90159 - protein, 134 aa, Unknown
  Obtained from environmental sample
  misc_feature (1)..(134): Xaa is any amino acid
MESALIISCAEKETAFFTELLSSASINHIASIKSVESAHKIILQEDFDLVIVNAPLGEEGGEIFARYIASRGIAQVILLVKNECFDSVSAVCENNGVFVISKPVDKAFFLAALSLAKSAQNRIKTILNENVQLK

SEQ ID NO: 90160 - protein, 231 aa, Unknown
  Obtained from environmental sample
  DOMAIN (2)...(231): Cellulase (glycosyl hydrolase family 5)
  misc_feature (1)..(231): Xaa is any amino acid
MTRVTEVVNYAVENDMYILLNTHHDESIFKFTNKEKNASINAFIKIWSQIAGNFRNYNEKLIFEGLNEPRTIGSSAEWNGGTAEERANLNEHYKYFVETVRACGGNNDKRFLVLNTYGASGLATAMNGLTIPADTAQNKIIASYHAYEPYNFALNPGSGSVKTWSQSNSSDTSPITSRINQANTSFISKGIPVIIGEFGALNRDNESARAAWVEFYVKSAAQKGIKCFWWD

SEQ ID NO: 90161 - protein, 388 aa, Unknown
  Obtained from environmental sample
  DOMAIN (100)...(347): Transposase DDE domain
  misc_feature (1)..(388): Xaa is any amino acid
MEYFKNVEDPRRETRNKKYPLIEVIVIAFLAVMSGADGWESIERYGVMRQKWLGKFLDLKEGIPKHDVYRRVFGAIKSELLESFFVNWVRDIKQNIKREVIAIDGKTLRGMATRSHFKAGTEVQSIHVVSAWATENRLVFAQVQTEEKSNEITAIPMLLEQIAIEGCIITIDAMGCQYEIADKIVKKRADFVISLKGNQGNLHDAVIEYWEVLDFNKPAAQAKHIKFRSVSTYDEKHGRKEARDYAVSDDVQWLRELFPQWKSINSIGVVESTRETGEGEAKTERRYFVSSLVADEKLFAHAVRAHWGIENRLHYMLDVVYREDACRVRKDHSPRTLGLIRKIALTIARSDKESKTSIRGRVQQMAWSEDYLETLLFRSDFASVQKIS

SEQ ID NO: 90162 - protein, 132 aa, Unknown
  Obtained from environmental sample
  DOMAIN (37)...(103): Glycosyltransferase 36 associated family
  misc_feature (1)..(132): Xaa is any amino acid
MFSFIEFCLWNANDDMTNFQRNFSIGEVEIDGSRIYHKTEYRERRNHYAVWAVNVPIEGFDTDRQSFIGLYNSFAHPQAVLTESQKIPSLQAGRLSALTTSGRILRPASLKLLFLFLVTAKIPRIKNGKDRE

SEQ ID NO: 90163 - protein, 297 aa, Unknown
  Obtained from environmental sample
  DOMAIN (35)...(296): Domain of unknown function (DUF323)
  misc_feature (1)..(297): Xaa is any amino acid
MKNTLWVIAILTAFTLSTTSCFAQSSGGGATTSPTGIVMISIPAGTFTMGSPTNEPYRTDDETQHSVTLSGFKMGKYQVTQEQYQAVMGSNPSYFSSNPENLETQGRRPVENVSWYDALVFCNKLSIKEGLTPAYSISGKTNPAEWGTVPTSAYAYDTDYETWNTAVIVNGTTGYRLPTEAQWEYACRAKTTTAYNTGNTISDNTGWYDSNSGQTTHEVGKKPANAWGLHDMHGNVLEWCWDWYGTYSSSAQTDPMGASSGSARVLRGGSWSDSAEGLRSASRYGISPNSRHYYSGG

SEQ ID NO: 90164 - protein, 315 aa, Unknown
  Obtained from environmental sample
  DOMAIN (153)...(310): Aspartate/ornithine carbamoyltransferase, Asp/Orn binding domain
  misc_feature (1)..(315): Xaa is any amino acid
MSVSLKGRSLLTWLDYSDEEIQYLLDLSIKVKAESKKGVVSQRFLGKTLAMIFEKRSTRTRCSFETAFGEEGGHPVFLSTADIQLGGKETIEDTARVLGRMFSAIQFRGFKQKTVETLARYSGIPVYNGLTDEFHPTQALADIMTLQENFGAVKGKTLCYVGDGRNNVANSLMVISAKLGLNFTVVTPPELNPDPVLIGKCAPLAAASGAKLTVSADIAAVSGADAIYTDVWVSMGEDDKREERVKLLSPYQVNQTLMEINQRKDSIFLHCLPAVKGEEVTSGVIDGPHSRVWDQAENRKHTIKAIMLATLGTGD

SEQ ID NO: 90165 - protein, 413 aa, Unknown
  Obtained from environmental sample
  DOMAIN (211)...(408): 7TM diverse intracellular signalling
  misc_feature (1)..(413): Xaa is any amino acid
MDYRSYFAAFLAVFLAVLSTFLSTTTAQARENRFYIDLQKFPLYVKSGFTPSDTASPDLQDGSWQVREQWYGAVIHNLGLSEGLPKLAFLSPFGRPEQEWTFALPFTMDTSSMDAAAPVIPALYLASIGINWEIYLNGTLIKEEMYLTNGRITKQRYERDVIVPINSELLQKGGNVLVFRIVGDPTDDMTGFIYQSPYYIADYDYITHKHSKTAQIIIISILVILGIYHFLFYAIFRENRYSLLCGVFFLGRGVYHLLRTWIHPIIPDTAVAMKLEYFMLYFVTMAFMAYTDKLCNARYSIVTKAYGVFCLILAITQLFFFQTSSVIWEYSNIIVIVWICIYNIVLPFIRELKKGRNFTDALANTYPGNLLIATLIIGITSIFDLIDSLALHLSLHLPITVLSSSRCRLHLCY

SEQ ID NO: 90166 - protein, 102 aa, Unknown
  Obtained from environmental sample
  misc_feature (1)..(102): Xaa is any amino acid
SKGAGHWAALIRHALRNALIPSITVLGMIVAEVFSGSIVIEQVFAIPGLGRLLIAGISSRDYPLIQALVVYIAFVVIIANTLVDIAIQAVDPRIRLEGDARK

SEQ ID NO: 90167 - protein, 288 aa, Unknown
  Obtained from environmental sample
  misc_feature (1)..(288): Xaa is any amino acid
YLIFTVKGKTFDQFFQFEKNFKNGDPVFSIGNALGEGVVVRNGLILGTVPEEDSGRWNQLKSSADGNPGNSGGPLVTPEGKVVAVVRALRENILYSVPAEVILGGSRSELPYRQKSGVRHLLLANDLDYIFETNPKLPDTYTSVRKSICDAYNTFYDKTMETLFKEAPEYLTGPNNAYLLNSSLSSISPEVSFVDRNDNNWKLSGLEEKSYPLDDDGRLYHASVQGINFYKLKRPLTVSVEKVCTDSKYIMDLILSNIRTDRTLPGSGDKYRILSYGEPSSRELSGCA

SEQ ID NO: 90168 - protein, 207 aa, Unknown
  Obtained from environmental sample
  misc_feature (1)..(207): Xaa is any amino acid
MEKIKLSLGILAVTGLVSCASGPRISGAGLLTPATLSLVQNAVFEVVLDKPAEDPTVYEKELNWSLVPYVIRNDKYYSIGTAFAISKTELVTAFHVINLGFESMIFSKFHIRDSKGNVYEVDQVTGGSNEKDYLIFTVKGKTFDEFFEFEKKFKTGDTVLSIGNALGEAWWCGTGLSLAPFPKKIPAVGICLKVPRTAIPEIQAGRW

SEQ ID NO: 90169 - protein, 489 aa, Unknown
  Obtained from environmental sample
  misc_feature (1)..(489): Xaa is any amino acid
VRNGLVLGTVPEEDSGRWNLLKSSADGNPGNSGGPLVTPEGKVVGVVNSLRENILYSVPAEVILGGSRSELPYRQKSRVGHLILSNKLNYIFEYQARLPDNYTKVRASICEAYNGFYDDTMTKLFKEAPEYLSGPNNAYLLNSSLSTIFPEVSFVDPNDDNWKLSGLDKKNYPLDDDGRLYHASVSGIDFYKIKRPLSVSVEKICTDPKYIMDLILRNIRTDRSLWGNDKYRILSYGEPSSKGSFRDALGRTWITAHWVIGFEDEVLIMYILPQPNGAAIDSTKQDSSYLHIYEWDLRKTCDHLFSAYDGSFEEWSSFITLEQFIPDFLKDIHFDWNSGEQSFSFGSGPLSISADKQVFDWNARSELFLAHSWYKLNGKLEFGIRRVILYGDQRGKEYAHIYRNIKPDPKLGTNAMENWNDLIKEKPPFDEKPILSPKDNNGFVGAILKARRPNPDTLFTLYLSMENPQNEEDLYRRFESLKTGVSVEY

SEQ ID NO: 90170 - protein, 793 aa, Unknown
  Obtained from environmental sample
  DOMAIN (149)...(330): ATP-grasp domain
  misc_feature (1)..(793): Xaa is any amino acid
MVDTCGGEFEAKTPYFYSIQNGTENEALPFIQKSVKQRIVVLGSGPIRIGQGIEFDYACVHCVWTLKSLGYEVIVINNNPETVSTDFDTADRLYFEPLCVDDVMSIIEIEKPLGVIVAFGGGTAIKLTKKLYERGVNVIGTSADSIDICEDRERFDALLERLQIKRPRGFGVFTEAEALAAAEKLGYPVLMRPSYVLGGQNMIIAFSKDDIREYMEIILRSKQENPVLIDKYLEGLEIEVDAICDGDPSLGGKGAVLIPGIMEHVERTGVHSGDSIAVYPALNITDALAEKILAVTEKLCMALNVKGLVNIQYVLYENDIFVIEVNPRASRTVPYISKVTGIPMCELATKVSIGETLSSLGYSSGIAKIPPYTAVKVPVFSFEKLAGVDTHLGPEMKSTGEVLGIGKNLEEALYKGLVAAGYKMKKRGGVLITVRDSDKPEIIDIAEKFLLAGFSLYATRGTARYLGESGFEVQATDKISDNKDNNTATLLESGKISYIISTSEKGRDPANDSVKIRMRACTLGVPCLTSVDTANALADGLLSGYSEINTELVDINRLRSKRTKLAFTKMHTCGNDYIYFNCFDMEINSPESLSVFLSDRHTGVGGDGVVLILRSSIADAKMRMFNLDGSESSISGNAIRCVAKFLYDNEIVKKRDMRIETKSGVKELSLSTQNGAVSSVKVDMGRAELRPEKIPVNLAGESVIAKELTIGGDVYEITCVSMGNPHAVVFHDNLDDLDLSKIGPLFENDAMFPDRVNAEFVKVVARNRLKIRLWERGSGETLASGSAACAVAV

SEQ ID NO: 90171 - protein, 576 aa, Unknown
  Obtained from environmental sample
  DOMAIN (1)...(576): Inorganic H+ pyrophosphatase
  misc_feature (1)..(576): Xaa is any amino acid
MKKISASVRKGANAYLKRQYTGVAMFFVVMFVVLGIMAINGLLTPFVPFAFITGGFFSGLSGFIGMKIATSANARTAQASSESLNRGLRVAFSSGTVMGFTVIGLGLLDLSIWFFLLKYVFYTPESKAIIGFLASNPGKSIDAAQIQLISSAMLTFGMGASSMALFARVGGGIFTKAADVGADLVGKVEAGIPEDDPRNPAVIADNVGDNVGDVAGMGADLYESYVGSIVATMALAVSAGYNFNGAVVPMLMAAVGTVASIIGTFFVRCGEKADQKSLLGALRKGTYISSAIIVVASYPVIRIALPENQGVYFAVLSGLLAGVLIGFFTEYYTSDHYKPTKNLAAASLTGPATIIIGGISLGMLSTLLPVIIVGASVLISFFVSGGAHSFAYGLYGVSISAVGMLSTLGITLATDAYGPVADNAGGIAEMSHLPHEVRQRTDALDSLGNTTAATGKGFAIGSAALTALALIVAYLDEIEIYIPTVKPNFELNLTLTNPPVLIGLFVGVMLPFLFSSMTMSAVGRAAQNIVKEVRRQFKEIKGLMEGTADADYSTCVDICTRGAQKEMVLPALTGII

SEQ ID NO: 90172 - protein, 347 aa, Unknown
  Obtained from environmental sample
  DOMAIN (195)...(343): CheW-like domain
  misc_feature (1)..(347): Xaa is any amino acid
MSIRMVQVKTVFNKFPRMLRDLAKASGKKIELQMVGEDTEIDKSLIEELGDPMIHLIRNSADHGIELPDVRRAAGKPESGTVVLRARHEGDSVIVEIEDDGKGIDPAIIKKKAIEKGIVTQERADQLNNDEIINFIFAPGFSTAEKVTDISGRGVGMDVVRSNVRRLNGSVVVQSVVGKGSVFTLRLPLTLAIIDALLMKSKEQIFALPGTSVEETLLVSQEELSYLTRRKALNLRGEVLGISRLSELLNLKDNHPQDESESEEADAKQPEKQQASSIPVVVVSAGGRRMGLVVDAFVKRQEMVIKPLAPYLASLPGISGASILGDGGVVLILDPAELITLAVQVAS

SEQ ID NO: 90173 - protein, 151 aa, Unknown
  Obtained from environmental sample
  DOMAIN (1)...(122): IPP transferase
  misc_feature (1)..(151): Xaa is any amino acid
TARPLSSYKEKSSSPFRFLLVGLRRNREELYRRINERTAAMFRAGLPEEVQRLYEAGFTPENPGLRAIGYREFFVRDPGGVWRLSEDFAGVEALVAQNSRRYAKRQMTFFASIPDVKWIDCEGDTMPDLDGIIIEKINSRKGAKAQRNLGY

SEQ ID NO: 90174 - protein, 346 aa, Unknown
  Obtained from environmental sample
  DOMAIN (261)...(343): Mur ligase family, glutamate ligase domain
  misc_feature (1)..(346): Xaa is any amino acid
MVIKNPGVPPDSPFLQAARLASRRIETDISLFLDASPARLTAVTGSKGKSTTASALHWALAHSGEKKTGGKAYLGGNITVSPLTFLDELKEGDDVVLELSSWQLGDLRGRRKDSNHANSILLKPKTAVLTAIMPDHLDRYGSMEAYVADKRVIYQGQDATDFTVAGDDEWGKSFIAESKAVPLIYSHTPLPEGVSGGWIEGSDGPGLARLGDGVAVELVPARPLVPGRHQKQNLLAAGLALLGLGLPAEIIRKGLETFPGVEHRLELFHQAGGIKFYNDSAATIPEAAAAALEALGGDKGGGRLILVTGGTDKNLDFSPLVQAAGQAKALILLAGTGSEKLRSLFD

SEQ ID NO: 90175 - protein, 144 aa, Unknown
  Obtained from environmental sample
  DOMAIN (27)...(138): Glycoprotease family
  misc_feature (1)..(144): Xaa is any amino acid
MNLLAIDAACSVLSVAVCRDSDYYYAQTEAGMKHSELIMEIINEQMEKAEMKPADLNGILCMGGPGSFTGLRIGFSVAKGLALSLNIPFVPVPTLECIAFSAIGLSLPGIHARKDAYFYSLFNDGRRITEDGDGTISQITEVII

SEQ ID NO: 90176 - protein, 125 aa, Unknown
  Obtained from environmental sample
  DOMAIN (5)...(73): HD domain
  misc_feature (1)..(125): Xaa is any amino acid
KKGPLSDWKWEVMREHTKNGAFILSTYPNPMAKEIALSHHEKWNGTGYPFRLEGEMIPISARIVTIADVYDALRMERSYKPALKHEMTKQKIMEQSGALFDPNLIEVFNEISDDFANIYDSYADK

SEQ ID NO: 90177 - protein, 342 aa, Unknown
  Obtained from environmental sample
  DOMAIN (220)...(335): HemN C-terminal region
  misc_feature (1)..(342): Xaa is any amino acid
MDLFIEALIDDVKYQIEYFNIKEIFTVYIGGGTPSVLGAKRLHVLLDALNAIPGFSPVEFSIEVNPESVTEEFLSVCREGGINRISLGVQTFKEDSRFAAGRRGDVNLLQKQLALVSNMFPDSFSADLITGLPFQSEKSVKEDIKRLLAYNPAHISLYSLTLEEGTPLEKRVKSGAVNLPDGDIADKIWLTGRDILINAGFSHYEVSNLALDGKRCLHNIRYWVMDGWLGAGPGASGTMINEDNGTAERFTYAPDLQSYINSPCIKKAAYEKLERDALIRETLLMGYRYCDGPDKDKFKRRFGCNIENYIPKTLERWKDKDKMLFLNQFLIEAFSELSAEIF

SEQ ID NO: 90178 - protein, 218 aa, Unknown
  Obtained from environmental sample
  DOMAIN (12)...(153): RNA pseudouridylate synthase
  misc_feature (1)..(218): Xaa is any amino acid
VKNIEILYEDDNIIIVNKPAGLAVQGGEGVKTSLDKIFAEIRDPKPLLVHRLDKDTSGVLLAAKGRENAARFSSLLNSPKITKQYTAICAGRPKNEKGVINDKLLIHGNLKSSETRYKVLKTSVFTEENLEYSALELELGTGRMHQIRRHLAMNGNPVLGDDKYGDFTLNKKLRKSAGLKRLLLHASRLIIKESFNLDIRAPLPEYFSCFYEQRIHDN

SEQ ID NO: 90179 - protein, 505 aa, Unknown
  Obtained from environmental sample
  DOMAIN (172)...(223): Acyl-CoA dehydrogenase, middle domain
  misc_feature (1)..(505): Xaa is any amino acid
WKLFTDNEDILFHLDHLDLDRIIHFKEDNFEQAKQFAYAPRDVEDAKDSYRRVLSIVGEIAGDYMAPNAPAVDEAGPTLANNQVTMHPATQKALDMFAKADMMGFVIPRRYGGLNMPNTILSIAAEIVARADGSFLNLGLQQDNAGTINKFASEEQKQAYLPKLCSGEWDSAMVLTEPDAGSDLQSVNLKAVQDADGKWYLNGVKRFITNGCGTIGLVLARSEEKGKGARGLSFFLYKRDDDSGKPTMIIRRLEHKLGIHGSPTCELQFNHAPAELVGERQRGLTKYTLWLMNNARLGVAAQGVGIAEAAYREADLYAAKRIQFGAPVRDLAPVFEMLTEMKVAVEAGRTLLYETARFVDLKEVLEEYSDKHPEEKGEIIEEKKRYAKLAGFFTPMIKAYATEMANKVANDAIQIHGGTGYMKEFNAERHYRDARITNIYEGTTQLQVVAAIGPVTSGVAQMILDQYDAATYTYGEDLLATIGKAGKSSMKPLNTQRRMKATINS

SEQ ID NO: 90180 - protein, 261 aa, Unknown
  Obtained from environmental sample
  misc_feature (1)..(261): Xaa is any amino acid
MRYKEPFTVYPRKLKTVTVFYYQCYDNNGKRICGHSTGQRTKTAAKMYCMELYRAGKLIPENKPVSFAEFADGWWNIKTCKYLEWRQAQNPLAPSTIDHYKTNLELHIKPFFGKIKLNEISAELVQNWIMGLSREKYNNSSINTLIATLKVMMKEAARLRLIPSNPMERIKKLIALNKEVQILKNEEVQKLFPEDWRKIWDSYEIYIFNKLAACTGMRFSEIIGLQISHIRDDHIHVCSQYSQKYGIRPLKTKDSRNIPIT

SEQ ID NO: 90181 - protein, 527 aa, Unknown
  Obtained from environmental sample
  misc_feature (1)..(527): Xaa is any amino acid
MGNRFLGRKIKKAFKIAGIVFIAVILMAVVFAYANARDKHPHYTLDLNIKSAGDASLMAGFAAVTITSEIPDRWHDNDGNSRYEPNKGDTYDDLNGNGKFDAYWIAGFGYKRAANGIHDDLWARTMVIDDGTTRIAVVSLDLVGFFHSEVIDIRKMLPVDSGITYLTVASTHTHEAPDMMGIWGSSYVKSGVNKQWREYIKRRIVQSVAEAVGSMRPAVLRFSQNLTDGEDTVADTREPRVFDNGLHMLQTVDAEDGHTLGTLIQWSNHPETLWGGNLLISSDFPHYIREAVEKGVYNNGNLVEEGLGGVAVYVNGAIGGLMTTNPSLGVKDPFGNTVYSQPSFDKARAQGDTVGMIILRTMRDEPVVVKEAGISLRAKTFTVPLANNLFRLGSVLGVLDTGMSGWMKKHTEGAVWSIGPAEFLQIPGELYPEILNGGIVALPGRDYEIAPVETPPLRELMGGSFRFAIGLANDEIGYIIPKSQWDVKKPFVYNGKAYYGEGNSAGPDTAPIVYRELAKLIEELPRP

SEQ ID NO: 90182 - protein, 273 aa, Unknown
  Obtained from environmental sample
  DOMAIN (110)...(245): MotA/TolQ/ExbB proton channel family
  misc_feature (1)..(273): Xaa is any amino acid
VSIALDLVSFAQAAPPALANPPALLPRAAPVPAAVPAAAVSNIILMVTGAGPVVKGVLLALLAFSLFSWAIILAKAVQLSRAARNSNAFLDSFWQSRSLANLYAEAAGFGSSPIAQIFRVGYQELGRVHKARLDQRTAMENVQRALRRSGAAESTRLFKYLPFLATCGNAAPFIGLFGTVWGIMDSFHEIGQAGTANLATVAPGISEALVATAVGLAAAIPAVIFFNYFNSRVRELEAEMGNFNADFINILERDLLKRGPAAPQPGRPGPKET

SEQ ID NO: 90183 - protein, 174 aa, Unknown
  Obtained from environmental sample
  DOMAIN (31)...(174): ABC transporter
  misc_feature (1)..(174): Xaa is any amino acid
MEQSKIEVQNLSKQYGQVQAVTDVSFSVGSQQVLGFLGPNGAGKTTVMKILTGFHFPSSGKAFVDGIPVDEQPLEVKKRIGYLPENVPLYGDLTVDEYFAFAAEARFIPKHERKAAIDKCLEACSLTGYRGRKIETLSKGYRQRAGLAQAILHDPPILILDEPTTGLTRIKLSR

SEQ ID NO: 90184 - protein, 94 aa, Unknown
  Obtained from environmental sample
  DOMAIN (4)...(92): Nucleotidyltransferase domain
  misc_feature (1)..(94): Xaa is any amino acid
MDGIEILKKVIRQSDLLNKYMLKQIGVFGSFARGEPANDIDFYIDTDNCKWADLKKLKRDLEILTNKKIDIMIKKYANPIVLHRALKDMIYVSA

SEQ ID NO: 90185 - protein, 262 aa, Unknown
  Obtained from environmental sample
  misc_feature (1)..(262): Xaa is any amino acid
VSSHTFLAEKLKSPIKKVSIINSEQLGKTRLNRNAVFDVYCEDTSGARFIVEVQVDKQEYFIRRTFYYLCMIISNLAKKGKKYDFNIPKLYSISFLDFDLDFGKNCTEVVQHLSIRNDKHPEVSYDMLQMTFVILPRFSKTESECKTVMDKILFAFKNGHKLKKAPKSFKEKELRDIFSIAEISNFTESELYKYEAIMRNEYDQRAILAYAKKEGEVIGETRGLKKGILQTAKNMLAKGFSVADVLKATNLPREQVRALNRA

SEQ ID NO: 90186 - protein, 343 aa, Unknown
  Obtained from environmental sample
  DOMAIN (232)...(328): Peptidase family M23
  misc_feature (1)..(343): Xaa is any amino acid
MVSVHDYKRLENKLVQKVKNDANKAANFIGECFVSIGRFFTRRYTVVFVPHSEKKVYNLHITVLSVCCFLLVVFGVIGAFFWYGASYSSTMYAMANKDGRLKDTQASLDQLRDETAALLREARSFESALSNVLSALGIGNNNSLSQNTSSDLSQILGLKETPQGLIQEVDDVRRLAAYLNEAVEPIKELGDVMNSQSALLTEIPSIWPVKGGIGHITMFFGQNIHPITGQWHIHRGIDIATYRSGDPIVASADGQVVTAEYTYDYGNFIIIRHKHGYYTRYAHMLRFNVSVGQRIQQGDIIGYIGNTGISTGPHLHYEVHIGSDVVDPYRYITIRNSLAKQGR

SEQ ID NO: 90187 - protein, 272 aa, Unknown
  Obtained from environmental sample
  DOMAIN (99)...(132): Tetratricopeptide repeat
  misc_feature (1)..(272): Xaa is any amino acid
MNNVNYEEGFYSEIKEECARISLEITEASHLFGERRTREYQKLLGEILELKKQDPNDEVFELHSLLGLMYLRTEQQKSAIGEFKLSLSLSQGCSSNDVAGVWYNMGIANMELNLFDEAYECFESSLALRPHNIKCFTSMAVVKQMQRDFKKSYEILCDVLKNENPQNSDIEKVFISLGYTLFHSKNLTEAMECADKILQQVNHRSEKALKLKGTIYHAQGLYKEAWDSCDLLFSFSPNSSEAHLLAGGLAFSEKNYRKAFSHYNKARKIGRM

SEQ ID NO: 90188 - protein, 348 aa, Unknown
  Obtained from environmental sample
  misc_feature (1)..(348): Xaa is any amino acid
MTSSALPDEAEDIAEKGENKSFDQTCGGPNMDKLFSRTKEFVDQIGSEFPKIVLESLVTDFSNGETTYVNSNGVEFNSSSECYDMHTMFSAKDGGKSSSFSGCFARISSLDIPFMELDMQRQLLDESSKSLDPRMVDGKFVGKVLLTPACDDMIWYTLFENFLSDTSLVTGTSRWKDALDTKVADSKLTLRTVPLSPLVVSGERFTSDGFESRDMDIIRDGMLKNFALTLYGSRKTGKPRALNSAFGNIEVAAGDKPLEEIIRRIDRGIMMNRFSGGAPSASGEMSGVAKNSFLIENGKVTDALKETMVSFDIVNILANITAVSFERCQNGVSILPWCCFDGVTISGK

SEQ ID NO: 90189 - protein, 70 aa, Unknown
  Obtained from environmental sample
  misc_feature (1)..(70): Xaa is any amino acid
MKKVFVLFVVALCAVSLVLSCKKKESDSVSIGAIFPLSGPVAFYGNESRDGALLAMEQVNAAGGLLGKNA

SEQ ID NO: 90190 - protein, 137 aa, Unknown
  Obtained from environmental sample
  misc_feature (1)..(137): Xaa is any amino acid
MLSDLISPHKASFKDYTELRAQVNTTRAVIFMAGNMVTNMQNSIGGVSARVYRGGTYGFASGAEYSDESIKNVLAAAADNAKFMNTHVNKGLGPLPTVAPGKVGLKKEHSKDVEQGVLIEFAKVLDSLIVERYKKLS

SEQ ID NO: 90191 - protein, 96 aa, Unknown
  Obtained from environmental sample
  misc_feature (1)..(96): Xaa is any amino acid
MNYEDAGVSLKRADAAMVGVKKSVRTTFNAGVLGDIGNFGGLFTLGHLGLKEPVLVSSVDGVGTKLKVHFGLKSHNLPGQDIVNHCCDDIWFKVRA

SEQ ID NO: 90192 - protein, 392 aa, Unknown
  Obtained from environmental sample
  DOMAIN (80)...(274): von Willebrand factor type A domain
  misc_feature (1)..(392): Xaa is any amino acid
MINRRRSVSIYFLIPAILLVAAVWVIKQFLYKYNLSDELGKKMKASAVFFFLFAAFSVIAVLNPKWGTQLTVSEYRRGLDTVFAIDVSRSMDIHDAQTNGSQSRLERGALIARETVKAAAGARFAVAIGRSKGYLAVPLAWDTETPLSFLHSLDAASMTGRSTNLEALLEAAADAFQESSPAKKVIVLISDGESLGGIFGNALNRCIKENIIVNTVALGSDTGRPIPQYSNNAEGPAIISRRDTSVMRMAAEKTDGIYIDGSRDDAAVILSNHLLSISQQTGAGRSYHEPKERRTFFIILAIIAYIISKFIPLLPGFPLAPLAAIIFTLTSCSESKLLLLEANYLQTRGRYDEALLRYLKAQNYEDAAPYAEYGLGLTLYLLDEGKAALKSF

SEQ ID NO: 90193 - protein, 452 aa, Unknown
  Obtained from environmental sample
  DOMAIN (177)...(266): GAD domain
  misc_feature (1)..(452): Xaa is any amino acid
VKKNILLRSKVISFLRAKMEELKFIEIQTPILTSSSPEGARDYLVPSRKHHGKFYALPQAPQIFKQLLMVSGFDRYYQIAPCFRDEDARADRSPGEFYQLDFEMAFADQEDVFHVAETVMYSVFKSFSDKMVSPLPFIRIPYAEAMLKYGTDKPDLRNPLVIADLTGFFADVEFQPFKNIPVRGIAVKRAALQSKSFFEKMLAFAMEIGMKGLGYISVLEDGSLKGPIVKFLSAEKQDALKKDLCLEINDTLFFIADAPDRVNNLAGQIRTALGNQLNLIKKDRFEFCFIVDFPMYGINEEASASTEEAGSVEFTHNPFSMPQGGLEALETQPPLDILAWQYDIVCNGVELSSGAVRNHLPEVMVKAFEIAGYTQADLEKKFSSLYNAFHYGAPPHAGMAPGIDRIVMLLAEEENIREVTVFPMNSNAQDLLMEAPCEVSEQQLREAHIRIR

SEQ ID NO: 90194 - protein, 279 aa, Unknown
  Obtained from environmental sample
  misc_feature (1)..(279): Xaa is any amino acid
MPFTTDAIWQNIRSPSDPESVHLTDFPVVRNDRRDPDLEFRMAAVQHAVSMGRALRSQYNIKVRQPLKSVEMVTKNQEEKKVLREMEEIIREELNVKELIFRDNEEELVEYEAKANFRVLGKELGKDMKAAAEKIAAFDQSEIQGLLEGATLSIELANGAQTERRRVDITAEKLDIRRLEKPNLKVLNEGTLTVALNTEITEELSKEGDVRDLVRGVQNLRKESGLEVTDRIKLTLTGSGRLKSAWEAFSDYVASEILASQMVWAEVDGMVEIEAGEEK

SEQ ID NO: 90195 - protein, 573 aa, Unknown
  Obtained from environmental sample
  DOMAIN (17)...(573): tRNA synthetases class I (I, L, M and V)
  misc_feature (1)..(573): Xaa is any amino acid
VYKSVDPKVNFPKLEEEVLAFWEKNKIFEKSVSQREGKEEFVFYDGPPFATGLPHFGHFIPSTIKDIIPRYQTMKGKKVERRFGWDCHGLPIENLIEKELNLNSKTDIEKYGIANFNEACRAAVLRYVKEWRRTITRLGRWVDFDNDYKTMNPDYMETIWWVVKSLWEKGLLYEGYYNLPYCPRCSTVLSNHELNLGGYKNVHDPAITIRFKIKGTGELGIGNREGTTPLNAYFLAWTTTPWTLPSNLALTLGPDIDYVLIEDLPSPQSPFPIPHDYYILGEARLSAYYKKESDYKIIWRKKGAELKGIEYEPLFPYFSWAAENNAFRTYLGDFVTTEDGTGIVHTAPGFGEDDARVLKGTGVPVIVPIDAECRFTSEVPDYAGLFVKDADSAIMARLKAEKKLIKKEQILHAYPHCWRCESPLIYRAISSWFVSVEKIKQDMIDANSQILWVPDHIKAGRFGKWLEGAREWAISRNRYWGNPLPIWRCPDCGKTVCVGSRAELKEYSGVAAIDDLHKHFVDKVTFPCSKAPGEKNCSGIMKRIPEVLDCWFESGSMTYAQNHYPFENRGIFE

SEQ ID NO: 90196 - protein, 392 aa, Unknown
  Obtained from environmental sample
  DOMAIN (3)...(278): CTP synthase N-terminus
  misc_feature (1)..(392): Xaa is any amino acid
MDTKYIFVTGGVVSGLGKGITAASLGRLLKQRGLKVAAQKLDPYMNIDPGTMSPFQHGEVFVTDDGAETDLDLGHYERFIDENLTKFSNLTSGKVFWNVLERERAGGYLGGTVQVIPHVTEVIKEFIYSGAKGSGADVLITEIGGTTGDIESQPFLEAIRQIALEKSRQNCLFIHVTLVPYLKCSGEHKSKPTQHSVKELRAMGISPDVIIARADEPLSKGIKDKIALFCNVKPDCVIENMTLPTLYEAPLMLHRNGLDGVVCRGLSLDVPEPDLREWQSMTGRIGSRERAVNIAIVGKYIKLRDAYLSVIESLNHAGFETAANVNIKWIDSENQIGQNAADALGGIDGMIIPGGFGDRGIEGKIAACRYARENDVPYLGICLGMQVAVIEY

SEQ ID NO: 90197 - protein, 74 aa, Unknown
  Obtained from environmental sample
  DOMAIN (13)...(67): Helix-turn-helix
  misc_feature (1)..(74): Xaa is any amino acid
MKIKDSKSFGAAVRAYRRRQGATQIQLAAAANTGVRFIGDLENGKPTIQLNKALRVADILGIKIEALNINEDGK

SEQ ID NO: 90198 - protein, 404 aa, Unknown
  Obtained from environmental sample
  DOMAIN (139)...(218): HipA-like N-terminal domain
  misc_feature (1)..(404): Xaa is any amino acid
MNRKLNVYLCGEKIGELFEDDLLQLTFQYYNNASPLSVRLPVRTEIYPHASAYPFFENLTPEGEAFEILTKDHVSGNNVFSILNKFGGDCAGAVALYETTPDNSGENISEISSKKIAQIIDRLPQDPLLTSIEKPPRLSLAGAQSKFAVYKLAGKYYRSSDVNPTTHIIKITNKRFPDLLENELFCMKLAKMVLSNVPEIELLEAENRPYLEITRYDRYVENKTVQRIHQEDFCQALGIVSDKKYQAGGGAKLKDCYRIINEFSENRLSDIIRFTEWIIFNYLIGNTDAHAKNLSLLHTSSGIKLAPFYDLLSTEVYPENIIDHETAMLINGKGKYSSLNPKDFIALFENLEQNATNMMKTIKDTFADFVPAAEKIRKNMPTPDMPIYKKIIAIIKKRFSVLFG

SEQ ID NO: 90199 - protein, 471 aa, Unknown
  Obtained from environmental sample
  misc_feature (1)..(471): Xaa is any amino acid
MYRYDYTPAADGAFQLSALYTTTMSDNVGISGVFIDMRDSSIVALKADTVSSFRPMQRVFNIVTNQKLTAFVWISESGTYTLAPGNGVGYQWRVRRFYITTPQNYNPPDWMNGRGSVSLSQGLYELEIMPGGSKGGAEFSFGSGSSWKRASGQQNEGVSPKMTLGPFDLKKGRNYRFYFNMIPLELASVIIDKYPPPVKESIADVYLTGAAADKADSASARTSQTAALAMGVTRYVTLGKRGSADYGFKIKEPGIYKVETTGRLHTQLTLRDRFGGLSKSQSGNGVGRNALAVEFFLPGDYLAIAETKGESAGRMGIVLSKGELRKGGTLQDGVDKRAAVKANSAVVYNFKAGKKARYRFESFGAAGSQEMRLEDSDGWPLIPHGSEAPQEVVLDKGSYKLYSLPCQYENYRVTRVDAVRTPQKFNGPGPHNIAVNEPASATWLESGTGSAARFLFDISAPIDAKIFLSPD

SEQ ID NO: 90200 - protein, 87 aa, Unknown
  Obtained from environmental sample
  misc_feature (1)..(87): Xaa is any amino acid
METIEVQVDDGTKTELDSLFSGLGLDTPTAVKIFFAKSLEYDGIPFAVNHRALSPETLEAIEDTRLRRNLIGPFKTAEEAVAAMLEE

SEQ ID NO: 90201 - protein, 756 aa, Unknown
  Obtained from environmental sample
  DOMAIN (648)...(735): Hpt domain
  misc_feature (1)..(756): Xaa is any amino acid
MDDNAPYLVDPNAPENYWYNMTLYRTKEYNLNINYNPDLNVTNLWVNAPVFSAEQAKPLGMVGMGVDITAFIRKIYEQRIQRVGRADIYYFNALGEITGSRDLGHVVGKRRVEDHLGAAGTGILSKALKLKEGGILAFDSHAGKTAICSIPALGWYAVAVMPESLSDYKNPITAVFVLMLIVIALILVVSNIFIARFLESLRSTMDSLEASSKYKSEFLAMMSHEIRTPMNAILGMAELAMREKGLPPRAMEHVLTIRKSGTNLLSIINDILDFSKIDSGKLEIVSTDYRFMSLIKDVTSIIGIKTSESQIEFRVNVDDTIPPALVGDEAKIRQIILNILSNAVKYTAKGFVALTVKNQPVDDEFVNIIIEVADSGRGIKQEDIGKLFKDFVQIDLVKNKGIEGTGLGLAITRSLVKAMGGTIEVRSEYGKGSVFTIMLPQEISKMEGLADETSSAELFRAPAAKALVVDDVPTNLAVAQGLLSIYEVGVDTCLSGAEAIEAVTVHDYDLVFMDHMMPDMDGIEATARIRDLGGRYKELPIIALTANAVSGMKEMFERNGFNGYISKPIEISKLSSVLEKWIPKNKQIKIRQEESAADHPTAQTERAEGGQSERPKETATAAAEIKIEGLDTVKGLEMMHGNPQIYRRIIGVFHKSGQEKIDEVAKAHKDSDIRLYTTYVHGLKSALASIGATELSAAALALEMAGRGDNREYIDEHTPKFISGLESLLAGIGEFFGTAGTGDSVPTGKMGTRKRD

SEQ ID NO: 90202 - protein, 419 aa, Unknown
  Obtained from environmental sample
  DOMAIN (5)...(419): EPSP synthase (3-phosphoshikimate 1-carboxyvinyltransferase)
  misc_feature (1)..(419): Xaa is any amino acid
MNVRITPRRFTGTFKIPASKSHTIRQLLIASLADGESVIKYPLDSLDTRSCLCACKAFGAEIAEERNGDEIISWKIRGNSGFKKRVVPRTVIDVGNSGTTLYLALAVAGLQQQPIEFTGDEQIKRRSAAPLLDALAGLGVNSQSNDGCAPIKISGGWKGGKVSLPSPTSQYLSAILIAAPLAPAGTVTEIEVPLLNEKPYIEMTLSYLKAHGIPYSTLPDFSFFSISGGSSWKAFSSSVPGDFSSAAFPAAAAAITGGPVTLLGLDPKDTQGDKFFFEMLEKMGCDVQYNDNGGNNQSITVSRGSSLRGGTFDLNKTPDLLPAAAVTAAFADGDTRLVNVAHARIKETDRIAVMKQELAKLGIRCTELPDGLVIHGKGALSVMKSPVIDARGDHRIVMSFAAAALGSPVPVEITTAECA

SEQ ID NO: 90203 - protein, 68 aa, Unknown
  Obtained from environmental sample
  misc_feature (1)..(68): Xaa is any amino acid
MPGMGGWDTCIRIRNLTRLHKVPIAIYTTSDNPQDKAKAGEMGSVDYIIKPIKKDELLNRVEKIIKRA

SEQ ID NO: 90204 - protein, 612 aa, Unknown
  Obtained from environmental sample
  DOMAIN (147)...(283): ATPase family associated with various cellular activities (AAA)
  misc_feature (1)..(612): Xaa is any amino acid
LRIQKKIQREINEKIEKSQRDYFLKEQLKAINAELGMATDAKSSDLQRFKEKFNSFKLEGEVKEVVEQEMEKFSIMEPNSAEFTVTRNYLDVIAALPWNDPAPEEFELKKAQEILEADHYGLKDVKLRIVEYLAVRKLRKDTKGSIVCLVGPPGVGKTSVGKSIARALGKQFFRFSVGGMRDEAEIKGHRRTYIGAMPGKIIQGLKIVKTKDPVFMIDEIDKMGASFQGDPASALLEVLDPEQNNAFRDHYLDLPFDISHVFFIVTANTLDTIPVPLMDRMEIIQLPGYIDTEKLEIAQRYLLPKSLEKNGLKKNQVKYTKDSLLHIANAYAREAGVRNFEKNLDKIHRKLAKQIVEAQEALLPAETADKVDKKEADAAVKPVETVANKKPVDTAANNKPVKPTVFHIDKKFVEKQLGKPIFPEGDIKKADRPGMSVGLAWTSMGGDTLVIEATSLPGKEGFTLTGKMGDTMKESATIAMTVARKLAVERYGIDHEWFDKNHIHLHIPEGATPKDGPSAGITMATALISLLREKIITDKLVMTGELSLTGQVLPIGGLKEKTVAARRNKAKHIIFPKQNERDLDEIPDHVKKGIEFHPVTSYQEVLSLALPD

SEQ ID NO: 90205 - protein, 314 aa, Unknown
  Obtained from environmental sample
  DOMAIN (123)...(314): Cation transport protein
  misc_feature (1)..(314): Xaa is any amino acid
AIAAGERYMIRGFAVPACITAILALVSFVSLRKTKIQLTVKLGFLLVCGTWIWASFIGAVPFYLAGLNFTDAFFESACTFATTGGTVIDNIEIMPRSLLFWRSLAHWFGGIGIVMISVALMPLLGIGGFQLVKAEAPGPEREKITPRITATAKILWLVYCALTFIVFCLYLLGGMNWFDAMCHALSTMASGGVSTKNAGLIAFNSPFIEVTATVFMLLAGLNFNLYYRLLQGKFSDIKNNTEARAYLIIFISAAGIITLSLLPVYGSFASALRYAAYQSASMLSTTGATIADYETWPALARDDLFGLMFIGGCS

SEQ ID NO: 90206 - protein, 423 aa, Unknown
  Obtained from environmental sample
  DOMAIN (106)...(187): Cache domain
  misc_feature (1)..(423): Xaa is any amino acid
MYAVENIATVMEQYRYMTIAHRRAFFNYILAGITLENPGIIAAWCVWEPDVLEGDDRQYIGTKGTSTNGRFSPYYYWDNGNVEYLALEDFEDPAYLLPKKSGLQTVLDPYEYKVGGKTVLMTSLAVPISTDGKVVGVIGFDIPLTEIQKISQTQKPFPNSITAVFSSNGTVTAHFDESRIGKNLRVTETDMAGRHLDDFVNAVTAGRQYSFNNYIEALQENMKIFTVPIPVGSATTPWSYAIAVMRNTIMAPVYEMISLTIVISVVVLALVVAAALILSRSISKPIVKVADTLRDISEGEGDLTRSIAVHSNDEIGSLALYFNKTLEKIRNLVIIIKKEAASLHDVGNDLAGNMTETAAAVNQITANIRSIKQRVINQSAGVTETHATMEQVVANINKLNSHVENQSGNISQASSAIEEMVAN

SEQ ID NO: 90207 - protein, 287 aa, Unknown
  Obtained from environmental sample
  DOMAIN (211)...(285): HisG, C-terminal domain
  misc_feature (1)..(287): Xaa is any amino acid
VNQSDKLRVLIPKGRIFEKVASLFADAGFPIAMADRTYRPSMDADWLDVKIMKPQNVAELLELGSHDAGFTGIDWIEESGSAVKEILDLGFDKVKIVAAIPEALDEAALKSKKLVVATEYVNLAERWLKASGYKYRILRTYGATEVFPPDDADMIIDNTSTGQTLRDNGLKIIGTVLESSTRFVASHTALENATKRDRIEELAMLFRAVLDGRERVMLEMNIPKDCFDVAVNGLPAMRSPTVAPLFGDEGYAVKIAVKRNEVSEIIPRLKKLGALDILEYDLRKVVP

SEQ ID NO: 90208 - protein, 513 aa, Unknown
  Obtained from environmental sample
  DOMAIN (117)...(312): Mur ligase middle domain
  misc_feature (1)..(513): Xaa is any amino acid
MLSLSSILHPGASIYFVGIKGTGVCALAELIHGIGVKTTGSDTSEVFYTDGILRELGIPFHENFDPAHITTDIDLVIHSAAYSEENNVELAEAARKNIPRISYPQALGEFSANFDSTGITGVHGKTTTTAMAGCLVRSLGLPAQVLVGSAAANFGGRSTLAQGDKYFIAETCEYRRHFLLFHPRRIVLTAVESDHQDYYPTYESIRDAFVEYCRLLPSGGELIYCADDPGALSVADIIKNEERDASERSAASGNAITLIPYGFTASGDFQITSYRIENEMAFFRVNVFNLELGLPVPGRHQALNAAAAIALVSSLLKKEIAEGAASRSGQSHSHRNELTQFSIKKALEEFKGSKRRSEILGAVSGILFMDDYGHHPTAIETTFEGLRGFYPTRRLVVSFMSHTYTRTAALLDEFAASLAGADVLFLHKIYASAREKFDGHINGRSIMEKIESLPAKRAEVYYVDEPLDAFDQLKDILKPGDLFLTLGAGSNWPLGVKLFEYFNGSERATRLPK

SEQ ID NO: 90209 - protein, 62 aa, Unknown
  Obtained from environmental sample
  misc_feature (1)..(62): Xaa is any amino acid
MVESLGEKLKTAREGKNLSLDDAGKDTKISIRYLEALEKEDFSGFPGEAYITRFYKKLRLVS

SEQ ID NO: 90210 - protein, 316 aa, Unknown
  Obtained from environmental sample
  DOMAIN (249)...(316): Histidine kinase-, DNA gyrase B-, and HSP90-like ATPase
  misc_feature (1)..(316): Xaa is any amino acid
MTEERKKIIVVDDNLEDLTALKYTLKDLYGVYPCQSTVNMFDLLEHIKPDLILLDVEMPDMNGYEAARKLKNNAQYREIPLIFLTSMNDPTSEMEGLKLGAIDYIFKPFLGPLLVQRIKTHLSLIEHQMKAMKASQAKGEFLSHMSHEIRSPLNAVIGMITIASGTDDIQKIKHCLERADSATRFLLGLINDILDMSKIEANKLELSYGEFNFEKMLTSIINVTSVRAIEKHQDIVVNINANVPPFIVSDELRLSQVITNLLTNAIKFTPDFGRIVLSAENLDEKHGRPPQAAPAADEITLKIKVEDNGIGISQEQ

SEQ ID NO: 90211 - protein, 239 aa, Unknown
  Obtained from environmental sample
  DOMAIN (18)...(131): Response regulator receiver domain
  misc_feature (1)..(239): Xaa is any amino acid
MADDMETPQDANSGETLKTLLLAEDDPATQTLFRAGLRKLAGYQVIIVGNGLEALEVLKLQVVNVIVTDLYMPEMDGYQLISIVNERYPNIPILVMTGLAETTHQNAPLFLGALGIIPKPVKMSSLIEQIREAGNRKPDGVIKGIQLNGLLQLMQWERKTCTITIQSPDGIGMLYVQEGDLIHALFKDLEGLDAAYRVLAIPSTHVEFTEVCRANRTINIPLTELLLNLAMKKDMDNGN

SEQ ID NO: 90212 - protein, 187 aa, Unknown
  Obtained from environmental sample
  misc_feature (1)..(187): Xaa is any amino acid
MNTTKLKEKLNGKLQTTQPVNEERIITMPVSNAVLTKGCNSNYIALTSNAIGLINENLKHQQLSQSLFDVIKSPSGGITSFSVPSLSGDEMQKELTGIILDYSTPRAYWNTPEPVEGTPPVCSSGDSIMSYEGKPCCTCLYNTYGSKGGDSQAKACKESVQILLLRPDNIMPIIVRVPVSSKVIYQK

SEQ ID NO: 90213 - protein, 90 aa, Unknown
  Obtained from environmental sample
  misc_feature (1)..(90): Xaa is any amino acid
LPQEAVSLIEQYDSANEKVSQFTEEKQEAENLLKQMIGEYEMATAGDRIITWKSVSQERLDTKTLKAEHPTLYKKYVNQTSYRRFSIKAA

SEQ ID NO: 90214 - protein, 483 aa, Unknown
  Obtained from environmental sample
  DOMAIN (265)...(471): Mechanosensitive ion channel
  misc_feature (1)..(483): Xaa is any amino acid
MKKLFVLIALVYLFLPLSFSSAQEKDQTETSADLTSDLSSADVTSTEIKPAEERPAENISERETSSEENKKEEKTKDKASANKTVSDETEEEEPEHFVLNINFFVRLVIVIAILIMLALLIRLVWYLFKKLNNKIEESANEKIKPLVIKKLKVLNTKQILGIIEFFLRIIKYVITFFQIFLTLPVIFSLFSATRKFAMSIFDYILNTLKDFGISIGKYIPKLLTIIIIILITHYLLRGIKFFVTHIEKGRVAIPGFYPEWAQPTYKILRVLLWAFSFALMYPYLPGADSKAFQGVSVFIGIVFSIGSTSAIGNLIAGLVITYMRPFKIGDRVQIKEITGFVVEKNLMVVRIKTHKNEYVTFPNVIILGSNIINYNTSSDEDEEGLILYTEITYAYSVPWETIHELLINAALETDYVQKRPKPFVLQTKLDDFYTRYQINCYTKEVDKVPLIYSMLYQNIQKEFREAKLDMTAPHFGIITTRKE

SEQ ID NO: 90215 - protein, 436 aa, Unknown
  Obtained from environmental sample
  DOMAIN (79)...(386): Pyridoxal-phosphate dependent enzyme
  misc_feature (1)..(436): Xaa is any amino acid
MQFRSTKSKFPLVSYKDAVLNCLPDDGGFYVPDQTADIRKLLFSMNEKTTFNNMLAAVAPNILEGGINPASASKIAASAYNYEPELINMDENFSLLKLYNGPTGIFKDYGIAFLSAILEEFMKGRERSMIVSAARADTAVSMAHAFNGRKGISLVLLYPSGQIRGLDPSSFAQNGGNIIPIQVKGTFDDCQRLVVEVIKDREFSTRYNVTSSNTINPGRLLPQVFYYLYAFIQIKNKFSKDLFFSVPCGNFGNLIAGLYAWKFGMPVNGFIAAMNINNSFGDYIRGKTFRPKPLVTTKSPSLDVSVPLNYERLASFYAEAPAIMRNIVYPASINDDLTMQTMEQVYKKYGIYIDSNTAVAFASAREIADEYKLNGQAHTVVLATGHPAREASLTGDAVGQSINVPDSILALKKRCDPIAIIQPQLDAVESAIASCF

SEQ ID NO: 90216 - protein, 328 aa, Unknown
  Obtained from environmental sample
  DOMAIN (15)...(252): Metallo-beta-lactamase superfamily
  misc_feature (1)..(328): Xaa is any amino acid
MYVGFYSLGAAEEVTGSKHVLEIDGQSYLIDCGAFQGSRAEADKKNRDFGIAADRIESVILTHGHLDHCGLLPLLVKQGYKKNIYATPATRDLASLIMMDSARIQAHDAVFLKKQAEKKGEKFTWTPLYTEQDAIAAVGQTIGVSYNRPMPLDNGVSLEFYDAGHILGSAIAEIKIKKGGEELTILATGDLGRKGKPIIRNPDIPKNPPDYIILESTYGDRQHGSTDDALKKLAEIAKRTVEKRGRILIPSFAIERTQELVYYFHLLTDDGTIPEVPIFVDSPMATNATTIFQVHPECYGEDIKEAFIKHHKNPFGFNSLHFTTSVDE

SEQ ID NO: 90217 - protein, 282 aa, Unknown
  Obtained from environmental sample
  misc_feature (1)..(282): Xaa is any amino acid
VGMGLLYQEGYFSQYLNNDGWQMERYPVNDFDNMPVTRVTDASGRQVKVKVLFKGLEVAVAVWRVQVGRVPLYLLDTDLNENEPEFRGTTAQLYGGNRETRIRQEVVLGVGGVRALKALGLQPTVIHMNEGHSAFSALERINLLRKDHNLSFDAAREVVQASTVFTTHTPVPAGNDTFDQELARAYFEDYAKELGINWRVLLGYGRINPRDEGEPFGVTPLSLRLSAHANGVSRLHGRVSRGMWQDIWPKNPVEDTPIDYVTNGVHVSSWASREIARLYDSY

SEQ ID NO: 90218 - protein, 110 aa, Unknown
  Obtained from environmental sample
  misc_feature (1)..(110): Xaa is any amino acid
VSIQSIASDADGGQKMVGEDLEFEARVVLGDLTPEDVTVEAYYGPLNHMGEFTDRLTLPLEPIRSLEGEGWLFKNTVTCRSTGKFGYTVRVTPSQKRLANPFVTGLICWA

SEQ ID NO: 90219 - protein, 368 aa, Unknown
  Obtained from environmental sample
  DOMAIN (4)...(110): Uncharacterized BCR, COG1636
  misc_feature (1)..(368): Xaa is any amino acid
MPGRCLICYRLRLEKTAAFAQEHGFDAFSTSLLISPYQQHETIRQLGEELAAQYGVAFLYRDFRPLFRKGQAAARALGLYMQKYCGCIFSEKERYEKKPTPYSPLPIFQRLALLTGPDVLEKLKQTNVLIFGVGGVGSWCAEALVRSGVGKIGIVDFDTVNASNVNRQVQATSGTIGRSKVEVLRQRLLEINPDCEVSIWAKNFSRESAAEFGVEKTDYAIDAIDTFPHKLDLIEFLFNAGVKFFSSMGMALKLDPTRIKTGSIWESRGCALARLVRQGLRRRGFAGSFTVVYSDEPPINADQNPAGNNPSEESTDEGALSGKKRINGSCVTVTASAGMALASLVLRDIADKCPVGRSPVNQGSAGKQ

SEQ ID NO: 90220 - protein, 283 aa, Unknown
  Obtained from environmental sample
  DOMAIN (13)...(173): Insulinase (Peptidase family M16)
  misc_feature (1)..(283): Xaa is any amino acid
EGFTGKLPNGLRYYILENSLPENMAQLALVVNAGSVLEREDQRGLAHFVEHLCFNGTKRFPSNSIIEYFRSLGMRFGGDSNAYTSYDETVYHFDIPVEKTGGVKRIPDKALAVLDDWTYAVTFLNEDVKSESRVVLEELRSRSDAMDRVRKKLLPILFEGSAYADRQPIGLAEIIENATSENVKEFYDRWYTSDNMAIVFAGDFDGKALEAQLAQHFTMPAASKPVNRPRHELPPPKNGNFNVNIITDPELTSTNFICLLQNEQRCAKRNDCVLQRIGNRLFN

SEQ ID NO: 90221 - protein, 314 aa, Unknown
  Obtained from environmental sample
  misc_feature (1)..(314): Xaa is any amino acid
MIISASRRTDIPAYYSEWFLNRLKEKFVYVRNPINMRRVSEINLNPEIVDCIVFWSKNPKPMIDKLQSNSTPLKDYSYYFQFTLNPYGPDVEARLPPKTEIIDTFKKLSDMICPQKVVWRYDPILINGKYNTAYHIDEFGRVAGVLKGYTEKVTISFIDFYKKIAENIKPLGIIEISTEEKMTIAQKFSEIAKNNNFLIDTCAEDIDLSEYGITRARCIDDRLILKITGYNLSVEKDRNQRPECGCVKSIDLGEYNSCSNGCVYCYANYSNNIVEKNIKKHIPSLPLLTGDIYPDDIIKERKVTSEKIFQNELF

SEQ ID NO: 90222 - protein, 290 aa, Unknown
  Obtained from environmental sample
  misc_feature (1)..(290): Xaa is any amino acid
MADRTLISFDYAVKYLLREQEGYVILSGFLTELMGRKIDVIGLIPEETIKSDPDEKTNRVDLKAQIDGGEFAVFEIQFHQEYDFFGRVLYGVSHAITDQVRSGKLYNVKKVYSINIAYYNLTAKREYLFFGKFSGFQGIHFHEESIPFAQTATKDSKELLDIHPEYYLILPNMFDETLRGKFDEWIYILKNSKVRDDFTAAGIKEAAEKLNELTLPPKELAAYHRYMENIRSINSQAIAAEINGISKGRTEGIRTVVLNMHQLGYCIADIAKAVALSEQEVKNILDSQTK

SEQ ID NO: 90223 - protein, 425 aa, Unknown
  Obtained from environmental sample
  DOMAIN (17)...(384): Major Facilitator Superfamily
  misc_feature (1)..(425): Xaa is any amino acid
MTPPLSPYRQGKARAVFNIFNTFNALSWNLLVGSIITLFALRLGASSTYIGVLSALLYMSLFFLPLGRVLAQRFRIVSIFSFAWVVRALGMIPVVFAPFAAYMGHHDTALGLTMLGVAIFHVVRGIGMIGNNPVLSHLSAGADQGSYLTQIQIINSATGMFSGFAIAIILGRNPPLFLYSFIMTAGIICGITSGVLIKKVPEPPGVGKAEKINLIGIFRDALSQPPIKLFLIILMIVALVSGVSRTFLVVYAREAFFQEDGMILLYSVFGGLGNLLAGMLIKFFVDKLGAKPIFIICTIISLVTMIPIVFFSSSAAGYLTTGILFLSFLFFMLNFGFLGSEGIAQTYFMGLVPPEKTLDMGILYFFVFGIAGAGGSFLAGVFLDILKFFGCSHFVSFKILYAIIIVLTAIAIYLQRTLTPLGALS

SEQ ID NO: 90224 - protein, 419 aa, Unknown
  Obtained from environmental sample
  DOMAIN (166)...(314): ATPase family associated with various cellular activities (AAA)
  misc_feature (1)..(419): Xaa is any amino acid
MKFRLLVIDDEKNIRNGLAESLQEDGYDVVCAENGDEGWNRFSNGDIDLVITDLKMPGLSGDELLKKILAQAPGFPVIVLTGHGTVENAVAAMRDGAWDFLTKPVDLDHLSLKVKRALDNRELFFQHRRMEEEIERKKQFNSIIGNSRNMRDVFDLINKAAPTKASILITGESGVGKELVADAIHDLSPRKDQPLVKVHCAALAPSLLESELFGHEKGAFTGAVTQRKGRFELASGGTLFLDEIGEIDQNIQIKLLRVLQEKKFERVGGEHTVEIDVRIITATNKDLKAEIEKGNFREDLYFRLNVVNINVPPLRERKDDIPLLAAAFLKEFALENGKKIEGINEKARARLYGYDWPGNIRELRNCMESAVVMCQSNAINVGDLPPAFRNAEDDGWINIKLGSNMEECEKIIIRDTLSH

SEQ ID NO: 90225 - protein, 266 aa, Unknown
  Obtained from environmental sample
  DOMAIN (93)...(132): Putative Ig domain
  misc_feature (1)..(266): Xaa is any amino acid
LSKDGRITGYPTTSTSGPVQFTVRAANSVDYGIRLLSISVESLAEITTYGLPNGALTKEYNQTLMAESESPVTWRFPGEDDYAYDCYDYEKDEYVACRFPDGLTLSSGGVISGTPTATGKFLFYIIAENSAGPTYAMLSITVGIPIDYSVIGAGTATDVLSANLGNASGTSIESGSGVPSGSDVVFTVDLPSPNYRVKEWKVNGTITNADANPANKTVLTLTNITAPTVVSVELEAIFTVTWSSTPVPNTVTATYGWPPEPLTSGN

SEQ ID NO: 90226 - protein, 179 aa, Unknown
  Obtained from environmental sample
  DOMAIN (17)...(179): von Willebrand factor type A domain
  misc_feature (1)..(179): Xaa is any amino acid
MSLNEEIEAIPRKSIVLFFLIDTSGSMGGSKIGAVNAAIEEVIPELKDISATNADAEVKIAALEFADSASWITDKGPISVDNFLWRYVDAFGNTSMGNAFRILNEKLSTKGFMSEAFGSYAPVIFLLSDGEPTDDFAGGLEELKRNKWFNAAIKVAVAIGDDANKNRLAEFTGSMESVL

SEQ ID NO: 90227 - protein, 292 aa, Unknown
  Obtained from environmental sample
  misc_feature (1)..(292): Xaa is any amino acid
GYSYQDLNDGNFFVNPKNGAVLICDNDNVVEYGKNLCVAGKCRYMAPEIVIGEALPGIHTDKFSLAVILFFLLMGNHPLEGKRSYPPCTTEDIERKIYGEEPLFIFDKDDTSNQAVPGINNNSIKRWPLYPSYIREKFTEAFSQAALKDPSKRVIEKEWLKNFIRLRGEIYKCKECGDIFFSDPVNDTPCPSCRHIQHFDHYIALPKVNIAIHERTKLYNYHIDSDSDDFRNIAAETVINEASGSFELKNKSKKTWLIINKDGKQMSKNSGKTVAVQAGTQIIFGNAKGEIK

SEQ ID NO: 90228 - protein, 119 aa, Unknown
  Obtained from environmental sample
  misc_feature (1)..(119): Xaa is any amino acid
MNIKKGTQLNNEQQSAAFCEENAVVAAGAGSGKTMVLANRFAWLLTEKGYNVDEILTLTFTKKAAAQMFSRIHALLTEIAEGEDGENAARAQKALNNFVHSRIQTLDSYSSSIVKQYAP

SEQ ID NO: 90229 - protein, 570 aa, Unknown
  Obtained from environmental sample
  misc_feature (1)..(570): Xaa is any amino acid
TATDANLNDIIIALRVGSRSNPEVVNVSLKDNLGAGGLPEWTSTAVTVKSRDAEERLSVTSTATPGEWEWTLKILEKDLYELQHDSSYGKAVPCFISVNTRDLANNDADGGAKHWRFSMDTEKPKITFPAFDVPLYIDPISITGGSVSDDNKVKTIRYYLQKYDYPSGEWRYPTGNGTWNTNVTPSPLPWDDLSSPSNPGSSENWTLSGEQTPSRYGSGDIFAGDKGQGWYRLWIEATDWSLGGATAGNVVINNKEFYVDRKDPDIKWADDTKDKMFFRNITAAGADKGSLTVPLVFTTTDVNSIKTVAVNIKGPSASAGKDLTGSEVILSALTGNGIDGYSQTVTIKPNLNSGNLWTNGRYTLTLAITDFSGNKTTLTRDIIVDNKAPEIAINDVKGNNTTTAIDNLTAITGRQEFRGSFTKDTGMSPVAFVAFYVAENGAVAPPANIPVPDDTDLDLDGKTALYNNGWRFYDSTPNSNYPVLRDTNSANNNRLLMRIADGLTNVNMLIPNTSALTISSPKYTGNDITNAAIPAGVKYDNKAIPAGDAINKLKIYFLAVDEAGNRNVSI

SEQ ID NO: 90230 - protein, 449 aa, Unknown
  Obtained from environmental sample
  misc_feature (1)..(449): Xaa is any amino acid
LNRWHIEWSRRTEAMLANNNRDCRFQRLWLIDFFNGLLGETPERQGSLTAAWGENQEICEQQGYDPELMEYSALYPISATKYTSKKTANIRKIQISPVLPGNERMSSLPVSATIFELENPTNKTREITIVQMQDNLCGYNVLKDRHGVQDSSFVLQPNAKFQEAQSYGQVQSDGRNTIGIEFYTKKFQAESDCAGRMAMAATWNPGTIAQASTKPMFYKQDDAAVLKGALLSGRVSKSWVKNVYSGRETMAGVLCVTVELPPNTSTRVQFSLALDFPLIRMNGLTSVKKYTVFYPDPDKRVKPMLSEFIEAIPRLESVIPQNYDKLVPEHSSKNFKTLAINTMSFLPEATVWDKDDRFLVRECADYPFFNSLDVYFYGSFSLLALLPRLDGCVMRNFADAVLAVNPQTRRHNSYVNLPYADLPDQKLEGPRGVKGAVIHDLGSPFDALP

SEQ ID NO: 90231 - protein, 497 aa, Unknown
  Obtained from environmental sample
  DOMAIN (169)...(238): HAMP domain
  misc_feature (1)..(497): Xaa is any amino acid
NIALTYDNTIEYPLSIRDAILETQVAYRDMRTMTNKITAYAPQGDSEYIDSIYKDAVSAYEQAINTIHEFKALLKINPLLNEEERSTRLYNADMLETYVRQYKNEICDPITEAARAGDYEKAIEILSSMGELVNETRSHVAALRELATAVAERSSNRAHNTASQSKIMLGITSVIAIVVSIILAMLIASLIARPIKKMTDVANDVAKGNLSVNIDTSTKDETGELAKSFADIVNVVNLLTTELKNLSKDIKTDGDTDVKLDSARFSGAYSEVVESINTFTETLLEAQKSALLTVSTMFESNPQINLLFNDKLKLIDCNPEASRFLHFKTKEEMLEGFHDRMSKIIPKVRSDGQPSMSLEEQLKVAADDGRANLETEIHFEDGIRRLVVNLRKIPYKGSFAIVAYVFNITEIFQREMQLAHAMELNELQLAKLNLVVQGTKIGLWDMEVVMEDPVNPNNVFVWSKEFRNMLGYTDEKDFPNILSSWSDLLHPEDRKGR

SEQ ID NO: 90232 - protein, 346 aa, Unknown
  Obtained from environmental sample
  misc_feature (1)..(346): Xaa is any amino acid
KSTWVPRAVIVLCGNSETAKTRFGIEGDSPGIIYTRTGRHFFLEEKANEQAILLRLKTALDNSGFWEAFSTNWVCLDTELMPWSAKARSLILEQYAPTGTAGQNGLAKAVEALRTAKVSYNGKDASGVTLVSGTPGDMNLAAVLADYQNRQECVERYIEAYRRYCWPVNSVDDYRIAPFHVLATEGKVWHDENHPRHLSVIRDYITAGNDPVFVATNHLTADLNNETSIAEAVDWWLNLTKSGSEGMVVKPLDFIARNKNTLLQPAVKCRGREYLRIIYGPDYTTAAHLDRLRNRSLRRKQELALAEFALGMESLQRFVNKEPFYRVHECVFAVLALENENVDPRL

SEQ ID NO: 90233 - protein, 470 aa, Unknown
  Obtained from environmental sample
  DOMAIN (8)...(470): tRNA synthetases class I (K)
  misc_feature (1)..(470): Xaa is any amino acid
MKEDRKTVHWADECAPKIVREKGEKEQYTCASGITPSGTVHIGNFREIISVELVVRALRDLGKKVRFIYSWDDYDVFRKVPKNMPKQEELVKFLRFPITMVPDPWERDSSYARHHEVDVENSLPAVGISPEFLYQAERYRSSRYAQGIRRALEHRDILKNILDKFRDEEHKIQGEWWPVSVFCNACNKDETEIDGWDGEWGLSYHCASCGHKETVDIRNASTVKLVWRVDWPMRWEYEKVDFEPAGKEHHSHGGSFDTARHVCKEVYNWDAPVSFRYDFLSIKGKGGKISSSSGDVVDLGDMLKVYTPQLVRYLFAGTRPNTEFAISFDLDVIKIYEDYDKTERIAWKLEPAKNEEAYLWERRIYELSQPQTSPDGKTLPLEKMVKPFQIPFRHFCSLIQIADGDVEKALSSVAASPNGPSEEQLPPLRARAECAKYWVENYAPEEFRFKLRAPGAAGAPCAEGARTKRT

SEQ ID NO: 90234 - protein, 68 aa, Unknown
  Obtained from environmental sample
  misc_feature (1)..(68): Xaa is any amino acid
MSKAHRGKGIRELAAHGRGTCPVCGTSGIKLLYEAGEQKVKVCKPCRAAIKHGKKSAPAPVQAAPAAE

SEQ ID NO: 90235 - protein, 737 aa, Unknown
  Obtained from environmental sample
  DOMAIN (647)...(730): B12 binding domain
  misc_feature (1)..(737): Xaa is any amino acid
MKISDSYTALLSLAKERIMLLDGGMGTMIQRFNLTEKDFWQHKGNNDILVLSRPDVIESVHTEYLKAGADIIETCTFNSNAISQADYGLEGECYKLSKAGAEVARRAIDAFGGTSRKFVAGSIGPTSKAAGMASKVDDPASRGITFRELANAYQVQIKGLLDGGADILLIETVFDTLNCKAALYAASLEQEERGVRVPVMVSGTISDASGRLLAGQTLEAFWNSVSGYDLFSVGLNCALGAEEMGSHIAELSRIANVFISAYPNAGLPNPLGGYDETPEGMAKHIEKFAANGWVNVVGGCCGTNPETIAAMKKAVQGKSPRKIPELPKTTRLSGLEPVEITENSNFINIGERNNMAGSLKFAKMIRENNWSEAISLSVAQIENGAQIIDINVDDGLLDSREKMRHFVNLYVSEPAAAKCPVMLDSSSWDVLLAGMECFPGKGIVNSLSLKEGEEVFLKKASEVKRMGFALVCMAFDEEGQASSYEKRTEVCKREYDLLTEKLNFNPCDIFFDPNILSIGTGIAEHADYAKDFIETCKFIKANLPHSHIVGGISNLSFAFKGNNAIRESMHSCFLYYATKAGMDFGIVNAGSLPIYDDILAEERNLIEDLIFNRSPDATDRLLQYAESVKERKSELASHADALAWRQLSLEERISYALVKGIDTFIESDADEARVAYGSPLKVIEEPLMNGMNKVGELFGAGKMFLPQVVKSARVMKKAVAVLQPYIDSSATPTAKAG

SEQ ID NO: 90236 - protein, 414 aa, Unknown
  Obtained from environmental sample
  DOMAIN (1)...(97): MgtE intracellular domain
  misc_feature (1)..(414): Xaa is any amino acid
EIFDEWDREIVIQLFRILPKAIASDVFAYMDSDHQQIIVEALTDTEIGEIMNKLFVDDAVDFIEEMPANVVNRVLKNVQPEKRKLINHFLQYPDDSAGSIMTTEYVDLREDATVREAFDTIRSTGINKETIYNCYVIRRDRLLVGAISAKTLMLAKPQERIGDIMDTNLFFAHTTDDQEAIAEQFKKYSLLAMPVVDKEQRLVGIITVDDIVDVIVEESTEDIEKMNALAPSDDPYLKTGVFRLARNRIIWLLVLMLSATITGIIISDFENGLAALPILVAFIPMLMDTGGNAGSQSSTLIIRGMAIGEINPKDVIRVIWKEVRVGLICGLALGTVNFIRIFIMNGQNLMLCVTVTLSVCCTILIAKTVGCVLPLVAKCLKIDPAVMAAPLITTIVDALSLIIYFLFAKAILGL

SEQ ID NO: 90237 - protein, 113 aa, Unknown
  Obtained from environmental sample
  DOMAIN (1)...(113): Ribosomal protein L14p/L23e
  misc_feature (1)..(113): Xaa is any amino acid
MIQEETRLVVADNSGAKEVACIRVLGGSNTRYAHIGDKIVVSVKDAIPQSKVKKGSVAHAVVVRTRKEYGRKDGSYIRFSDNAVVLISKDGEPRGTRIFGPVARELRDRKYMK

SEQ ID NO: 90238 - protein, 85 aa, Unknown
  Obtained from environmental sample
  DOMAIN (12)...(80): Ribosomal protein S17
  misc_feature (1)..(85): Xaa is any amino acid
MEERNRRKVRQGVVFSDKMDKTITVVVENRKRHPVYNKILTTTTKLKAHDEKNEATEGDLVEIMETRPLSATKRWRLVRIVEKKK

SEQ ID NO: 90239 - protein, 55 aa, Unknown
  Obtained from environmental sample
  DOMAIN (1)...(52): Ribosomal L29 protein
  misc_feature (1)..(55): Xaa is any amino acid
LSNEQLGEKLKDLSIGLLKTRFEMKTGHVDNPCIMREIRKDIARVKTIATARGKK

SEQ ID NO: 90240 - protein, 93 aa, Unknown
  Obtained from environmental sample
  DOMAIN (3)...(83): Ribosomal protein S19
  misc_feature (1)..(93): Xaa is any amino acid
MSRSLKKGAFVDTSVLKKAQSMNASGKKQAIKTWSRRSTIIPEMVGLTFSVYNGKKFIPVYVSENMVGHKLGEFSPTREFKGHRKEEKAGGKK

SEQ ID NO: 90241 - protein, 88 aa, Unknown
  Obtained from environmental sample
  DOMAIN (4)...(88): Plasmid stabilisation system protein
  misc_feature (1)..(88): Xaa is any amino acid
MLDYEISSPFNKDRKLMEKRHKNIHKLRDVMRMLINEQPLLPKHKDLHGEYQGKRECHVEPDWLLIYRIDKKDHRIIFYRTGSHSDLY

SEQ ID NO: 90242 - protein, 340 aa, Unknown
  Obtained from environmental sample
  DOMAIN (211)...(329): Response regulator receiver domain
  misc_feature (1)..(340): Xaa is any amino acid
VHLLGIINDVLDMSKIEAGKFDLEKVPMNIEKMLMKVSNIIIDNIEKKNQKLNVNLAKGIDLDYIADDLRLSQVITNLLSNAVKFTPEKGEITLAVEKIRSKGNFNTLRFSVTDTGIGMTEEQIARLFNAFEQADGSISRKFGGTGLGLAISKNIVEKMDGRIWVESKAGAGSSFIFEVDLERAPLREGTAQKSPEIKAEATVETPDFSGVNIILAEDMEINREIFTTLLEDTHITIDSAENGLIAVSKFRENPEKYNLIVMDVQMPEMDGYEATRTIRAMDMPRAKTIPIIAMTANAFKEDVDRCLDAGMNDHLAKPIDEKSVLEKIARYAREQVTENR

SEQ ID NO: 90243 - protein, 120 aa, Unknown
  Obtained from environmental sample
  DOMAIN (3)...(118): N-(5'phosphoribosyl)anthranilate (PRA) isomerase
  misc_feature (1)..(120): Xaa is any amino acid
VKIKICGLFREQDIDFVNEAKPDYAGFVFAESKRQVSPAFAAQLRRRLSDEITPVGVFVNAPVADIAALYNDNVIAIAQLHGEENNEYITQLKEESALSGKKPIEVIKTMRINEMPDATI

SEQ ID NO: 90244 - protein, 269 aa, Unknown
  Obtained from environmental sample
  DOMAIN (3)...(264): Indole-3-glycerol phosphate synthase
  misc_feature (1)..(269): Xaa is any amino acid
MTILDEIADKTRLRVAKAKDTAPFEQVKKKALALAEEEGSGEEKTLFPFERALAAPGLSFICEVKKASPSKGIIAADFPYLQIAKEYEAAGAAAISVLTEPDYFLGSDRFLREIAAAVAIPTLRKDFVIDPYQIYEAKLLGAKAVLLICSLLDAQTLAEYVKIADELNLSSLVEIHNEAEAEQAVRSGAKIIGINNRDLKNFKVDLAVTARLRSLIPSDILTVAESGIKSPEDIRAISGIGIDAVLIGESLMRAADKKRFLAELKAGEN

SEQ ID NO: 90245 - protein, 86 aa, Unknown
  Obtained from environmental sample
  misc_feature (1)..(86): Xaa is any amino acid
FKNAKKKNCQAELRAENAQITRDILGGAKGPRRDAVLLNSAAAIHIARPEIAMKDAVELAAQTIDTGKAQAQLEEFIKLSRAAETV

SEQ ID NO: 90246 - protein, 129 aa, Unknown
  Obtained from environmental sample
  DOMAIN (6)...(127): short chain dehydrogenase
  misc_feature (1)..(129): Xaa is any amino acid
MRLAGKTALISGAAQGLGAAMARRFAEEGARVFIGDLKAEAGKATAAEICGKGGKASFLSLDVANEQSWIDAMAAVLQEAGRLDILVNNAGINIREPVETMKVENLDMMLAVNVKGPFLGTKQRHPPDE

SEQ ID NO: 90247 - protein, 333 aa, Unknown
  Obtained from environmental sample
  DOMAIN (1)...(230): tRNA synthetases class I (W and Y)
  misc_feature (1)..(333): Xaa is any amino acid
MLSYEQLDANTESIRAQLDRFVHFDDTTRSVNNKDWLADLNYIDFLRDIGRHFSVNRMLSFEAYRMRMETGLSFIEFNYQLLQSYDFLELYRRYGCRLQIGGDDQWGNIVAGVELIRRVEGAEVFGITFPLITTADGKKMGKTEKGAIFLDPALTSPYEFFQYWRNVQDADIRRFLLMFTFLPIGECEALTAQGRNPNEAKERLAWEVTALIHGKTEADKALAGARAAFGFGAGGALGGDKSAMPHAELSRAAFEKGYNVVDLFYDAGLFSTKSEARRLVEQGGAFVSGPNGELSAVGNVAALIGVDRLNAEGELVLRAGKKRYCLIQMSSEQ

SEQ ID NO: 90248 - protein, 273 aa, Unknown
  Obtained from environmental sample
  misc_feature (1)..(273): Xaa is any amino acid
MELTEEFIKTLAVDEKRLVKDIAQNMGTDEAQVLAVIELFAEDCTVPFIARYRKEKTGGLDEIQVRDIEHKYNSGKNLESRRIDIIRLIFEQGKLTEALYSNISLAATLAELEDIYAPYKRKKKTRGMIAVEKGLQPLAGAMKELEAGPLLAKAAEFVTPAGAEIAPELVVATVEEALQGAMDIIAEEVSQEPENRARIKAFYIKDGKIIVKGSGKEGKGDEEAKKTSVYQMYWNYTEALSAIKAHRVLAINRGEREGVLDVTIDVDADTAAR

SEQ ID NO: 90249 - protein, 583 aa, Unknown
  Obtained from environmental sample
  DOMAIN (15)...(291): ABC transporter transmembrane region
  misc_feature (1)..(583): Xaa is any amino acid
MRKLVKYLKPFTLLFILAVLILFLQVFCDLSLPNIMSRLVNSILGQNVPETGEADNILNLGLRMLIIALAGGAAAVSVSFLSTRIAAGIARDLRFAVFQKVESFSSREFDAFSTASLITRCTNDINQVQGIFIMGIRMICYAPIMGIGGIIMAVRHAPGMSWIIVLAVLVLICMVIVLVSLVMPKFRLIQNLVDRMNRIARETLNGLMVIRAFGAQDHEKKRFDSVNRELTKTSLFVNQIMILQMPLMQFIMNSAIILIIWTGAHRIAASAMGVGDMMAFIQYTMQIIFSFLFFSMMFVMLPRTAVSADRIAKVLNTEVSIRDSETPSTAGKGAVSGQRVEFKNVSFRYEGATEDALKDISFTAEGGQTTAIIGATGSGKSTLVNLIMRFYDVTGGSIAVNGVDVRSLSQMELRGGIGYVPQKSILLSGPVSFNLRYGKTDASAAEIREGAEIAQILDYIEESPEGFESGIAQGGANVSGGQKQRLSIARALVRDPAILIFDDSFSALDFATDARLRHALEEKRKEVTKIIVAQRVGTIMHADKIVVLEKGKIAGMGKHDELMETCAEYREIAESQFSHGDAS

SEQ ID NO: 90250 - protein, 463 aa, Unknown
  Obtained from environmental sample
  DOMAIN (41)...(107): His Kinase A (phosphoacceptor) domain
  misc_feature (1)..(463): Xaa is any amino acid
MYRNTTRYIEWPDGRNVLIEHAVDVTELITAKEQAIQANKDKSSFLAKMSHEIRTPMNAILGITEIQLENETLPPDMQEAFGEIYNSGYLLMGIINDILDLSKIEAGKLELSLAAYDVPSLINDTVHLNAMRYDSKPIEFKLFVDENIPSTLYGDELRIKQILNNLLSNAFKYTDEGEISFSVAAEYEPQEKAPQATLVFRVSDTGQGMSAEQLDKLFDEYTRFNTEANRTTVGTGLGMAITKYLVKMMNGTISVESEPGKGSVFTVRVPQGTVKGSGVLDKELAENLKQFRLGKAEQMKKAPQIIREYMPYGKVLIVDDVETNLYVAKGLLAPYGLTVETARSGFETIEKIKDGAVYDIIFMDHFMPEMDGIVTTKKIRELGYTRPVVALTANALAGQAEIFAANGFDDFISKPIDIRQLNAALNKLVRDKYPAKIVEESAQYKDNLTKGPARRSTARYTAG

SEQ ID NO: 90251 - protein, 310 aa, Unknown
  Obtained from environmental sample
  DOMAIN (1)...(153): Type I restriction modification DNA specificity domain
  misc_feature (1)..(310): Xaa is any amino acid
MTDKKLIEICTVIAGQSPSSDTYNKERIGLPFYQGKADFGTVSPTPRVWCSSPLRIAEKGDILLSVRAPVGPTNMASETCCIGRGLCAIRANDDVDKGYLISYFKMFEENISKLGSGSTFSAITTEDVKNLVVPLPPIDEQRRIAAEIEHQFAAVERAKKAAAEQLAVARGLNAAYLREVFERDNWSAVELGQICEITSSKRVFESDWAKSGIPFYRAREIVQLANKGFVENGIFISEELYSRLSEKYGYPKAGDILVTGVGTLGVSYLVTQTDKFYFKDGNIIWLKNIDESVNSQFLRLIFDTVYVQNQ

SEQ ID NO: 90252 - protein, 559 aa, Unknown
  Obtained from environmental sample
  DOMAIN (210)...(283): HAMP domain
  misc_feature (1)..(559): Xaa is any amino acid
AYLSAKDGASRDKMLKAASLVAAEGGVDFLTILDAAGVAVANTHEPAKYGDKQIDNVSVRNALIGKQYTTIETGTQVKMSICSGAPVKDASGRVIGAVSAGYRLDQNRFIDELKESTLSDVVMFLRDTRVASTIKDSKGAYAVGTKAPVEVSKKVLGGENYMSGDKIDGKLGRAEYSPLRNAEGEVVGMLYSRIDTDYVLTDGVKMITTALSIGVVLCVAAAFFATSVANRITKPLKEITAVAGHVAQGDVEFEMNIPADHNSKDETMQLAASFKDMIEASREQGRLLEGVAHGDISHNIVPKSDKDKLSYAIEHMLENSKTQVSVMERLANNDLTAAVVPRSDLDSMNIAIKKMLGNLNAAMGEINDAAARFKDVAHQISSGSQSLAEQSNEQASSLEEVSSSLEETSSMTKQNAEGSDKAKGLVDQVTYDLSEVSIAMDRMAEAIRQIKRSCDNTAMIVKTIDGIAFQTNLLALNAAVEAARAGDAGKGFAVVAGEVRNLAKRSADAAKNTADLIETSVMHAESGVAITKEVERALSQSVEHAGKVGGLITEIAKAC

SEQ ID NO: 90253 - protein, 472 aa, Unknown
  Obtained from environmental sample
  misc_feature (1)..(472): Xaa is any amino acid
MNGNNRKKIVPTVFLVAGIMMMFIDSGAAKVLGGLFVGSGLTFLLRLFNAAGSKGNIGRHTEARSTAVDSPAQKAGSAANEEAVAMHGQRLGSEYQRRQWQVTEIAVDEMLDMFIKLTASHFSNHNTIAVFFPANNGEYAIRRHISKTGFVNKHAMIIPNRGLLGSLLTKGLQPFYEPGFTNSNATLFYYDENHDFAPTENIRSILLSPIATGNETRGILLADSTKANAYTQADLDFLTNIAKLLGQAIYYTYLNTKHSLDYQRLAAMSSIEKDFWKDLDFDTVMDKMCETISDAVPCDRLTISLKEEDKMSAKVVRIYGSNAGCFKDLVFALGDSGPKTLVSLAYSTDIGFFRNFNEERYEFRYSENEPQHHEFGSFMALPIGVDKRIGMIFIESRMKDAFTGFNFSLLSRLSQSAGIALEKIFIIRKTNDLASHDVLTGLFNRQHFQKILTTKIAASNRYKHPISFVICD

SEQ ID NO: 90254 - protein, 117 aa, Unknown
  Obtained from environmental sample
  misc_feature (1)..(117): Xaa is any amino acid
MDISAQLSAELSLQEIQVKNVLALFDEGATVPFIARYRKERTGSLDEVRIRELLHRYGYYKELDERRQAILDSIREQGKLAPELEGRINAALSKAALEDLYLPYKPERSTRAAKAKE

SEQ ID NO: 90255 - protein, 269 aa, Unknown
  Obtained from environmental sample
  DOMAIN (17)...(228): Cobalt transport protein
  misc_feature (1)..(269): Xaa is any amino acid
VKNKIYELYALEQLAVGSTCIHRLNPLVKLLAAAVFIVTVVSFDRYALERLIPYIFYPALLMALSETPYTMLFKRLLIALPFCLFAGISNIIFDRSTALIIGGLTVSRGVISFFSILFKTYLCVMAVLILVSVTRFSELTNELRRLRLPKFFIIMFELTYRYIGVLLNETYSMSIAYSLRSPNRKGIKMNDMGSFAGVLLIRGFDRAERVYNAMKCRGYTSGQTVQNIPQNKRLSINDFIFLFIVCLLCATFRFIDVNALFAVILGRFI

SEQ ID NO: 90256 - protein, 968 aa, Unknown
  Obtained from environmental sample
  DOMAIN (892)...(968): Response regulator receiver domain
  misc_feature (1)..(968): Xaa is any amino acid
MTNGIKPFADAVGLDRVVFYKLVDTEGGKRLGQIYRWDKSEGGLMSLADELKVIPAHPVLDKWLSITSQGGYIRFRESEYTEDVAALMRVYGIRSIYIVPIFKHGKYWGAVNFQDHTDDRYFDEDCADLLYTAARVFSNAITREEMRRHEKMEAALNRAAIMFISQNENTFEATMTAGIREIANAFNLDRFSIWRNTQKPDALHVSQIYRWDRESGGTTLPTKGLEDATYAKFAPRWEKLLASGEVINSPVRLLPEEAMLKSFGCVTAFVMPIFISNNFWGFALLEDRHTERFFEPDSVEIIRSATFLCANTVIRADMEREIADANEFNNSILKSSPVGFTVFDENFRVIDCSDITLKTLGTTKEYYLEHFHEFSPEYQSDGVKSADKAAEIMSRAFKGEKLMLEWDNCTAAGEIIPYDVTLVRATYKGRNVVLGYQYDLRNLKKMTESIREQGEQLKMRLEQQELISELSRGFISSGDSKTLVKEAVAKLGHYHKVSLVFVFSIDYEHKGTHLAYHWTADELPPRMAIANLYDYLIKIFPVTLPDCATIPIVSSDDTSNNPEDVFQALYSINVMAVIGAPLYVDGRLWGVVCVEQCNKPRKWTDNEKGFVAVTASTIAGVIMRDIYTIKLKEALNKAMEASKAKSEFLSNMSHEMRTPLNAITGMTTIGKNAKDVERKDYALDKIQDASTHLLGVINDVLDMSKIEANMLELSPVEFNFEKMLQKVVSVVNFRVDERKQKLAVHIDREIPKTLIADDQRLAQVVANLLSNAVKFTPEKGAITLEARFMGEERGFCTIQISVADTGIGINNEQQKRLFNSFQQAESSTTRKYGGTGLGLAISKSIVELMGGKIWVKSESHKGSNFAFTIKARRGTAKEKSTLLDPGIKLEGIRILVIDDDPDILTYFRDIMREYGIKCDTASGGEEALRLVEKNGPYRLYFVDWKMPVMDGIQLTRELKKKAPENSVV

SEQ ID NO: 90257 - protein, 193 aa, Unknown
  Obtained from environmental sample
  misc_feature (1)..(193): Xaa is any amino acid
GQIEVIRRAARIPTADEGLFSLLEDPAERKAAEELFNRILNSPLDSKELREICDYRTYFHYDIRIRETDNLDNEGNPAVLSLSRVLKEKSGGESQTPYYVAIAASFYRFYKARPETTVRLVIFDEAFNRMDDERIGKILSFYNNLNLQIITSVPPEKIEAIAPYMDRINVISRFGSAVKVRDCHIDDIDTGTP

SEQ ID NO: 90258 - protein, 559 aa, Unknown
  Obtained from environmental sample
  misc_feature (1)..(559): Xaa is any amino acid
MGNYNTRTVKDSIIFRQSLTDFPCPVALGKYAPSFGLHRFKQGLRFVPLDDEGFSLKGDKRRLLYKGRRRSHRFTILGDTAFEYDCILEKEPESNVISLRMEGAENFEFFRQPDFVKEPFLKGSYAVYKKETLVGEGTGKLCHIHRPEIIDARGRRCWGILAVVGDMLHITIPEKWLADAKYPVIVDPTIGTTTVGSQYEWDADPPEPWVQLMFEGAIVVNRFLVSDTINGSCTAYMYSYVDNYDDAGGRPVLYSDNGNSPLTRKSKNEQFADFTVNRNKPAGWRSSTFQSNGAISSGSYIWFGVFCDFFWEPRFDYGAKCYSDDWYMVGNSIPNTFPIYNVNWYFDFRLSMYFTYTSAQNYVRTITQGVSLSDTRKLTGNYKRSLSQTVGVNSLLGRFETFYRKCVMTAQNSMNLNRLPVFIRKVAENINVTMDFFQSLFFTRKCTEDVNANSQTGRKFSAIRKVQDNLNGTDTQDISIIYVRSLTDNVQITQAFRNWGAFIRGLRVNAESIAETSHKAEYYRFTSDTALAVGTVFRGLLLYVRIVSQVFVRDYLLRR

SEQ ID NO: 90259 - protein, 375 aa, Unknown
  Obtained from environmental sample
  misc_feature (1)..(375): Xaa is any amino acid
YALDYAWSPGTFKMPQGRYVLKEVVIRDNAGKNGLIGPAYKSAGKYAVRYDYADGYYDRARKEFYGFRLVTTTPVDENGRAYGHTQTEYHNREYYSKGMSLAVITRDESGRDLRYSEYAIDMEPFARNVRERHEVYELEMDSKGSVYSRTTYDYDAYGNVARLEQEANGSERITAEIRYWNNDAGYFHAHPREITVRGSESGLLRKRSGEYDPNTGSLVRLVQMHGESYSQQDSVSTIEWDNYGNIAKITDPGGSYVAYAYDGELNQYVKEIIAGGRGITTAYRSYVEWEYKWGKKKKETDENLQSIEYEYDDYGRLVEVWSPYDKRGRTPAVRYRYEQPEGKNWYAVTENKVQFDGDNDDTLTTVVTRTAWARA

SEQ ID NO: 90260 - protein, 488 aa, Unknown
  Obtained from environmental sample
  DOMAIN (323)...(356): Tetratricopeptide repeat
  misc_feature (1)..(488): Xaa is any amino acid
MYQAALVLDKQNLDVLAKLAEAQTAAGEIRNAIVSYEQLIVLNPNASAEYKVLGDLVTKSGKPKEGMDYYKKYLAKTPSDNEISVKVGLSEYANKQYKEAVSYLGKVTDAKLITAEVLFALGDSYNKTGDCKNAVANFEKVRGSNPSSAMLANALRPLAECYEKSGDKVKAADAYNAYTQIPNIRDADASYFGAYLREETDMNAAMKRYEANTKSYPRDYRSFMRLGLIYAKDNNMQTQAVTNLRAASALVDTIPVIWKTLGDIYGKQKNVDGELNAYTKYLAIKPDDIAVSKRVGAIQIERKQYAAGVSNLEKAAAARPDDYEVCMLLATGYANTNKSKEAAAQYRKAKSLKPDNVSIRLSIIESLEKSGDADGAKEEKASLFELDRKIATSDKKNVEARQRLVAYCRANNDNARAYTYLNELAELTPKEPTVFKSLYDIAAADGKKKEAAGHLKKYIALKPGTADAQKSLGLLLYEDKDYDGALNA

SEQ ID NO: 90261 - protein, 268 aa, Unknown
  Obtained from environmental sample
  DOMAIN (155)...(267): Probable molybdopterin binding domain
  misc_feature (1)..(268): Xaa is any amino acid
LEKGLGRILAEDIYASGDIPGVRRSVVDGYAVHAADTAGAGEAVPVFLKLTGSVSMGKQADFSISRGECAYIPTGGMLPAGADAVVMVEYAEIAGNDAAVYEAAAVGMGMVEAGEDLRNGELLLRRGTLIRPQEAGALAAAGICSFPVFVPLNLFLISTGDELIPPDQIPRMGEIRDINTNALDALALTHGYKVISKRILPDDEAQLEQALREAITSSDVVIVSGGSSQGDKDLTCDIINRAARPGVFTHGLAVKPGKPTILGCDKES

SEQ ID NO: 90262 - protein, 81 aa, Unknown
  Obtained from environmental sample
  DOMAIN (1)...(66): Glycosyl transferase family, helical bundle domain
  misc_feature (1)..(81): Xaa is any amino acid
MIKEAIIRAANRENLDYECAEAVMDEIMEGNASQIQMAAYLAAMSVKGETIDEITASAAGMRKHCVRILHDMDVLEIVGTG

SEQ ID NO: 90263 - protein, 346 aa, Unknown
  Obtained from environmental sample
  DOMAIN (1)...(119): ATPase family associated with various cellular activities (AAA)
  misc_feature (1)..(346): Xaa is any amino acid
GRPPRGAGYGGGHDEREQTLNQLLVEMDGFDSKDGVIILAATNRPDVLDPALLRPGRFDRQVVVAMPDIKEREAILQIHSAKIPMSKNIDLFRIARATPGMSGADIANLVNEAALFAARKDKPEVEMHDFEEARDKILMGVARKTLVVSDKERRMTATHEAGHALLHYFLKNADPLHKVTIVPHGRALGMALSLPEEDTYSRTRGWIEDRIAICYGGWLAEKLFYDETTTGTKNDIQQATEMARNMVCEWGMAEGIGPVAYGQEDEPIFLGKEIARHKDYSEDTAQRIDRAVMDILERARNNASQILEGHKTEVEKLADALLARETLVDDEVREILGLGPKGSPEL

SEQ ID NO: 90264 - protein, 571 aa, Unknown
  Obtained from environmental sample
  misc_feature (1)..(571): Xaa is any amino acid
VGQPELLETARRTLTDKERGYGKWNISFEEGALEHIVEVAGGDARSLLNAIELAVETSVTPWPPKEGTEIHISMEAAEESIQRRALLYDRDGDYHFDTISAFIKSVRGSDPDAALYWLAKMVRAGEDPKFIFRRMIILASEDVGLADPNALSVVISCAQAFERIGFPEGNFPLSHACLYLSTAPKSNTTMSYFDALKAVESEDAEVPNHLRDASRDAESFGHGEGYVYPHAYRDHWAAQQYLPNSLRGRTFYIPSSSGYEGKIKEDVLRKRELQAAIVLGSQNADADGEFLTWSAAAKGREGWFKRLESGRSRLLLNDRNAVFSSACVSRQDRVLIPLANDGLLLWESLRKCPEGLTAALVNNTPAKDALYQYASVLDETEKPLIAVTEEIIPDPKECEEWFSCSEFEHILIRAVRLTVNPKILASRAKAILTKKGNAVLLCSPPRLGERLSRILLQECGQKDLSSALEQAEDSFFKTGADLWEAEDFTAAFEEQNFTVSFETIDQKEERLITEKDISVWFNTEQSRWGSFMAKTLKNDDFTAIEDALRTRAAKGPLLWKWKSICLKACNL

SEQ ID NO: 90265 - protein, 197 aa, Unknown
  Obtained from environmental sample
  misc_feature (1)..(197): Xaa is any amino acid
LLTAAIPVNGYFVTYKEQYYRLFHLHYIQYPDDTMENIYWLEQAVKADFANPLYALALIENETQWEKYRYLFSMHLNIKLIEQYLLLGNKWNKRRAYFYNAPWRDQNIESLETAETCYRTALYYWDEALSWWKKANDRRFRWIDLPKVQFWQDEAFRIENGTLNYARTINRELESLQKVREKFKAMEKYYTIQDSLQ

SEQ ID NO: 90266 - protein, 210 aa, Unknown
  Obtained from environmental sample
  misc_feature (1)..(210): Xaa is any amino acid
AQEGQIKELPLIVKADNHGSVESLLGSLERLSTDKVRTRIIHSAAGTVNKNDILLAEASDATIIAFNVAAEREAEELAREGGVDIRSHTIIYKVTEEITNAMVGLLDATEKEVVQGHAEVLQLFKVQKSVIAGCRVQDGSVKRSHLVRAKRGAELLFEGHIKALRRFKDDVSEVKTGFECGIQIDGFDAIVEGDTLEFFTKEKVAATSLN

SEQ ID NO: 90267 - protein, 938 aa, Unknown
  Obtained from environmental sample
  misc_feature (1)..(938): Xaa is any amino acid
VVGNRTIGGKIFLQGGVAKNPAVPLAFAMLLDKKILVPPSPELTGCFGVALLAKRKNADGLLAEQAVVIDDIINREIGYERVFTCQACENRCPIQVLNVNNHKYMFGGRCNKYTNMRKQVKDVPVFDYVEKRQKMLFETFAAPGKNKEQLTINNEQRKTDKRDFVIGIPRAFSVHTLYPLYSWFFHELGIKTFLSTEVAHEGVARSESTYCFPAEIAHGAVQDCLDKGADYVFLPHFRDMPSYEDEIHANFCPITQALPYYIEKAFPDIDKKRWLPLVVSFKFGDTKALELFCEMTSRLGIGEEETKAAFKAAMSKQQAYFEAVEKMGREALEEARKADRPVIATLGRPYNAFTPEANMGIPRKFTTRGYSIVPFDILPFHDEGIFPNMYWYYGQQDVKAANLLKKEDNIYLAYITNFSCAPDSFILHYIKWVMGQKPFLVLELDSHTADAGVDTRVEAFLDIIDGYRAKKSELEAERYDNGWRFVSKKRDSGGFDLRIDNVKTGEQVPIAGNKRVKVLLSNMGAISTEYMGAAVRSLGISAEALPVATAKTIQIARAHASGKECVPSHLVLGSALEFFFSDRYRKDELYLLFVPITTGPCRTGQYYVFYENLFRDLQLENVVVFILSADNSYNELGPSFAREMWKGLVLSDYLKDIQCSLKACAADPVKAQADFEHAWRRVMHAVEHNPKNLWKELKHVANDVKKIPLKRKVTDCPRVLIVGEIYVRRDDFAVGELTDLMSERGIVVKVAGISEWIHYLDFVREYALKKLIKLRKPGTRLFSRPWKDLKKLKLEEWWKHHIEKKVLSILLPTGLIPETPHDMHNIMEYTQEHFVNLELNSEIAVSSGSAAAAMDAGYSGIVNISPFACLIGRVIEGLFTPWARERNYPILSVEVDGNLLPPNIVNKLNIFMVNVLRFKGGNDLSSLVDAPAGEKQIT

SEQ ID NO: 90268 - protein, 276 aa, Unknown
  Obtained from environmental sample
  DOMAIN (13)...(50): Sigma-70 factor, region 1.2
  misc_feature (1)..(276): Xaa is any amino acid
MKNAVRTSSEKQEDILQIYFNQIKAYPLLEPEEELVLARLIQQGNQNALHKLIRANLRLVIKIARPYVAPDIPFMDLIQEGNMGLMHAAEKFDPEKRLRFCTYAGWWIRQFIIRYLTNKRRIVRLPHRKEEILRRIQYTYHSLSQTLMHQPRTEDIAGELGISVQDIDFIVNMSSGPLSLELDTGREDNSTVMEMHEDYTYSPERALFRQYYRDGARRFLDRLKDREKQVLSYRYQLDDGEPYTLKEIGDKMDLSPETVCQIEKKALAKIRNHADE

SEQ ID NO: 90269 - protein, 365 aa, Unknown
  Obtained from environmental sample
  DOMAIN (51)...(324): ABC transporter
  misc_feature (1)..(365): Xaa is any amino acid
LKRPRSLTAKYLRGDLRAPRPAARRRAKGAIVLRKVTTNNLKGMDCAIPLGVLTCVTGVSGSGKSSLAVDTLYKHLALAQGMRVDQPGTIEGMDGADAIERIVAIDQTPIGRTPRSNPATYTKIFDEIRGIFSTTPDARKRGFAPGRFSFNVRGGRCEACGGDGQLRVEMHFLPDIYVTCDVCKGRRYNRETLEVRYKSLNIAEALDLSVREARRFFSNYPALDRRLGVLEDVGLDYLRLGQPATTLSGGEAQRIKISRELGKRSLPGAMYILDEPTAGLHMHEVGKLITVLHKLVDKGASLVVIEHSTDVILAADYVIDLGPGGGENGGRIISQGTPEAIVADPNSVSGRFLMHERVARRMQRR

SEQ ID NO: 90270 - protein, 90 aa, Unknown
  Obtained from environmental sample
  misc_feature (1)..(90): Xaa is any amino acid
MDTGSKAIAADPADRGVIIDLPEAKAVFQSEEHWVWTIEGKEPPPIGKVLYIIPSHICPTSALYPGVIVVKNGERVDYWEIGARNRKISV

SEQ ID NO: 90271 - protein, 469 aa, Unknown
  Obtained from environmental sample
  misc_feature (1)..(469): Xaa is any amino acid
MELRRLHEEENIPYEDMAVSVPELEEMEAELLKEFFLRQVPVTRRAGKKLGETGAGRLFVLINECAASGFSFNSLKALILNDHIPWKEREKNKALVNFGIKYNCVLNYVQNGNTVDIWEEAFKKAYGDGGRELQPYYQQLKRSVNNLAGSLVFSDIQKYYFAFRGSLLDMEKITVEDDAILSRCIAELGSLIELEEEFNDPALVPSSPFGFFLSYLNEKEYVRAGQKSGVNIFRWRVAAAAPFACHFVLNASQSAASVLYQPLKFLRQDKRKALGLEDADASGAFFLLCDTGCDTGKGAGFKTYSRISASEQTFSGWAIPHSFFAQGKTAPPPESARDPYAEERRFWREGTALPKIFPLQKSSYERWKDTLVQKENNFSFFVSPVSAHRDSQIRELLENAIRGGDGCLVVTPTRDLNVYYNCQLFWLYDRVFAVEEFSLEAALLDDTSLGILYHKILEQIFAKIKKEDR

SEQ ID NO: 90272 - protein, 308 aa, Unknown
  Obtained from environmental sample
  DOMAIN (17)...(308): tRNA synthetases class I (I, L, M and V)
  misc_feature (1)..(308): Xaa is any amino acid
VYKPVDAKVNFPKMEEGILEFWKKNNIFEKSVSQRGDGSAISEFLFYDGPPFANGLPHFGHFVPNTIKDIIPRYQAMKGKKVVRRFGWDCHGLPVENLIEKKLKLNSKTEIEKYGIAKFNEECRESVLRYVQEWRHTITRLGRWVDFDNDYKTMEPEYMETIWWVMKSLHEKGLLYEGHYILPYCPRCSTVLSNHELNLGGYKDVHDPAITLKFKIKGSREWGVGSGEAYFLAWTTTPWTLPSNLALVLGPDIDYVLIEALSESRALNSESTPQGGNAAPPLPTRQYYILGKERLQAYFKETSEYKVI

SEQ ID NO: 90273 - protein, 263 aa, Unknown
  Obtained from environmental sample
  DOMAIN (15)...(223): DNA methylase
  misc_feature (1)..(263): Xaa is any amino acid
NNEFHAEKEGMAGQVQMVYIDPPYGIKYGSNFQPFVNKRDVKDKKDEDLTTEPEMIKAFRDTWELGIHSYLTYLRDRLLLARELLSDTGSVFVQISDENVHHVREICDEVFGVENLVGMIVLRTRSTSTAKYISTLNDYILWFCKSINSLKYKQLFEEKNPDLDRFNLVEINGEIKNVNSIDEEKLSSLKPFSSSSLNSTTASGSSENQEFSYMGKIYKPAQSRSWRCSLEGLEKLKKENRIFIQGESIRYKYYFSDFPLYHI

SEQ ID NO: 90274 - protein, 255 aa, Unknown
  Obtained from environmental sample
  DOMAIN (17)...(140): Integral membrane protein DUF6
  misc_feature (1)..(255): Xaa is any amino acid
MDKRVFGADLLLLLTAAVWGFGFVAQRSGMQYVGPFAFNAIRFPLGSLSLLPLIAWRRRFKPDRKSGLLFSSFIAGTCLFIAVAFQQLGIMFTTAGNAGFITGLYVIFTPIFGIFLGRSTGKTTWLGAILTFTGLYFLSSSGPLKDINIGDIIIAVSAVFWAFHVLVIDRLVQKTDPIALSSGQFAFTGLYALIAAFWAEPFISRWFLSLSSSSLSSSDLVSWKSFPALIGGLSSGEIPFTLVSGAIIPILYGAF

SEQ ID NO: 90275 - protein, 312 aa, Unknown
  Obtained from environmental sample
  misc_feature (1)..(312): Xaa is any amino acid
KKSFIFLFLLLFIHSFAFSSPLENPTWGFSLDLPEGYEYSGGDGKTAFSFLHPDGASFEITISYAAPGQRVNNRTYASIEEMSRDVKAKLNSSGDIEYFEYRGKNASLVELVFSLPRDGRMSGWALCVELAQPNPTPVGNASTPKPLLLAMAYGPAGKQGLEALHLSALDSIIPEEGDRLAPGPITEFAYPRETRIKTPVFALDCEAWIFEEDAEAAQALIDREFLVLRRYQNSPGWKEAWIRFYRAIYRDSFERLTDIAFQVERKINVPPLENRDFANQALKWVQSFSYERDLFGSDFINLVSSATERRGD

SEQ ID NO: 90276 - protein, 209 aa, Unknown
  Obtained from environmental sample
  misc_feature (1)..(209): Xaa is any amino acid
WTHDFPALLTCIDAAGGYLLAGTLDGAVELLDFAGNMVFTPFEPGGSRLSVILGCAISQDASRLAIISGVEKQRFLLLEHSGDTYKVAYHEFLSDGFRRPVHVKFINNDAEIVFEREEGLGLYTIGSRTSTKVNLNGEILIMDDSGEGEFLFLITSQGQNEKRLIAIRYPGLIVTDAPFKSRNAFLSRRQNKIYLGGDLLMASFEMEKK

SEQ ID NO: 90277 - protein, 400 aa, Unknown
  Obtained from environmental sample
  misc_feature (1)..(400): Xaa is any amino acid
MQYLGFDAFEKSINEIDSTVVFMAEESGQTVIIIAEKNKGCRECKSESLILGFNAVELGGGIYKAALTHENALVLRKLFPFTAPVRGLKKPASFGLGDRLGIATPGHIDLFNNNDVFPVFAQQSIRELNLTGRTYEDVLDAVSFAVFREGYKKGFGADGDHLKTEKDIEYALSLDFSMITLDCSDHIKSENIDNNPLPDNYKNKYIDKTFNFEGISLVFSQEELKKCAAIYGDAIKFIIEIFNKFFSKDKKPADFEISIDETVSPTTPLQHFFVAKELFDAGVSFESLAPRFCGEFQKGIDYIGDTAQFEKEINIHAAIARFFGYKLSIHSGSDKFSVFPAIRKAVNGRFHVKTAGTNWLEAMRVIADKDPPLYREIHSFALTAFNEANKFYHVNTDISK

SEQ ID NO: 90278 - protein, 431 aa, Unknown
  Obtained from environmental sample
  misc_feature (1)..(431): Xaa is any amino acid
GLDFLPRKKREKLGLPDEDASSVFIELHKFNSFRRAAFFCCEHSFSGFTIPHSKINAPSDPKERYASDPLYSDKFSIDLYGAENSITGSGAPEELHENQIDGFENWMNRRKNAAESGGEHNTGKTLQKSIEEKFACEEKMPGKYSVSASSLAEYYQCSLKWLFNRILNIKNTQVEADLMKKNIKGIVYHAVLHHFFSYIKENKKPFLNPIVSEEGFSLPDEYRKLLEQSVNTVFNSFPKLQESKYQEMSFLTARLLYAGKRNYLIELENFLASFLSLFYGCFVIGSEIQYFAPRDDYFLHGKLDCVLEDRTGEESKYIIVDFKSGHLPKRADCTGTGDDLKEFQLPMYITVAEENEKIKIHAALFYDILELNPEVMFGTIVDKFNGKTIPQKADNRILCNGENHERYDQILIEINKKAKRFADEIKNADFT

SEQ ID NO: 90279 - protein, 595 aa, Unknown
  Obtained from environmental sample
  DOMAIN (9)...(162): Type III restriction enzyme, res subunit
  misc_feature (1)..(595): Xaa is any amino acid
MRKFKVVSPFKPAGDQGEAIAALADGIKAGDKFQTLQGVTGSGKTFTMAKIIEKVQMPTLIVSHNKTLAAQLYREFKGFFPDNAVEYFVSYYDYYQPEAYVASRDLYIEKDASINDEIERMRLSAARSMMEREDVIIVATVSCIYGMVTPDVYRKMTATCSKGETIDVDALIRRFVELQYERNDAVLDRGRFRRRGDTLEIFPAYMEEAYRVDLDWDRVERIRRFNPVSGEMLEELDKALIYPAKQFVMPANMVHNAMGAIKRELEDRLEFFKSQGKIIEAERLKTRVEYDIEMLNEMGYCSGIENYSALLAGRKPGESPDTLVDYLPQKHLTFIDESHVTLPQLGAMYAGDRSRKQSLVDYGFRLPCALDNRPLRYDEFVERLDKTVFVSATPGKTEIEQSARVVQQLIRPTGLLDPEIEVRPSEGQMEDIYGEVQKRIKAGERSLILTLTKKMAEDLTDYLSGLGLKVRYIHSEVETIERVEILTQLRQGEFDILVGINLLREGIDLPEVSFIAILDADKIGFLRSHTNLVQIIGRAARNAAGKVIMYADRVSDAMEKAIAETNRRREVQIAYNKKHGITPSTSKKSHSAHPY

SEQ ID NO: 90280 - protein, 132 aa, Unknown
  Obtained from environmental sample
  misc_feature (1)..(132): Xaa is any amino acid
GGYPAAYDEGQSKLKGNGKTVPPLSALKTPLRDGDAERQDPAYENSYFLNANSATPPGIVDADCNPILDRSEVYSGVYGRASINFYAFNSNGNRGIAVGLNNLQKLRDGEPLGGKSRAEDDFATDDDEDFLS

SEQ ID NO: 90281 - protein, 121 aa, Unknown
  Obtained from environmental sample
  misc_feature (1)..(121): Xaa is any amino acid
MKTLEIDIETYSGVDLAKCGAYKYAESPDFEILLFGYSVDGGEVHVVDLVGGETVAQDIIDALTDDAVLKWAHNAAFERVCISRWLRDQGVSLDPFADNHFSSEYLGKAKFLNPENWRCSM

SEQ ID NO: 90282 - protein, 298 aa, Unknown
  Obtained from environmental sample
  DOMAIN (29)...(298): Phage portal protein
  misc_feature (1)..(298): Xaa is any amino acid
MGFFTTLTASSKRTEKRSNGIPDFLMGNAASRSGVAVNEASVLSLSPVFSVLSRLSSILGVFPFKTYRKNDDGSLAEIDHPALKLFNVEPNEYLSGQQLKYILMSNFLLHGCGAAEISFKGGFPSALTPIHPTNVQVVNTNGRISYRITRESGQQAVLQPHQILLFKLFPKADGGWVSPLQTHRAIFEEALALREFSSLVFSQGCNPSGVITDLPPEMTEESRNTLLENLKSYCSLGRSHQLMVLPTGKFERIAAPSTDLQYIETRRFAIAEIARLWNVPLHLLAETDKSTSCGSGIE

SEQ ID NO: 90283 - protein, 931 aa, Unknown
  Obtained from environmental sample
  DOMAIN (652)...(675): 4Fe-4S binding domain
  misc_feature (1)..(931): Xaa is any amino acid
MGELSDELSAQKVPNIWGTIPDVVEMQSEAGAAAAVHGALTTGALSTTFTASQGLLLMIPTMYKVAGELTSTVFHISARALATSSLSIFGDHQDVMACRQTGWAMLASNSVQEVMDFALIAHASTLRARVPFLHFFDGFRTSHELQNVEEISHDDIRKMIDNDLVVAHRTRGLNPENPHIRGTAQNPDTYFQGREGVNKYYLEVPGIVQAEMDKLAKIIGRQYHVFDYHGAKDAEKVIVIMGSGAETCEETVDYLNSKGEKIGLVKVHLYRPFDVSLFVKALPSTVKAIAVLDRTKDPGAIGEPLYEDVRTAIAEAQANGSFKANPIVLGGRYGLGSKEFTPTMVKAVFDNLSGKKIASFIVGVNDDVEHKSLDYDPHFVLEEEGLNEALFYGLGADGTVGANKNSIKIISEAKPELNAQAYFSYDSKKSNGFTVSHLRFGTGRIRRPYLINSADFLACHKFSYMEMYDMLKSVKAGGTFLLNSPFKAADVWKNLPVEAQQRIIDKKLKFYVINAAEIARNTGMGNRINTVMQAAYFKISGILSEADAVKRMKEHIEHSYGKKGKDVVEKNYKTVDASLNAVEEVKYPSKTEGDIHMKKPFATAKDSWIRDVLGTMSIQEGDSLAVSKIPEDGTFPTATTQYEKRSVAEQVPVWNPEVCIQCGNCTVVCPHACMRFKNLTDDQVAKAPKGFKTAAIKPKPVDGQKAALVIACEDCYSCGVCLNICPMSNKGQEKPALAWKHYSDDHEFHAEQVAVWDYFLSLPETPAGELKSAKALAYKRPLFEFSGACGGCGETPYVKLMSQLVGDRALIGNATGCSSIYGGNLPHPPPTRRGRTGVGRCGQTASLKTRRNSLWASGLPATSWLSTPVKLPKRQKAKALPQVLSTKYSPMIKPTRRRSTKCGKASTNSRPRLKTTQSPRQNCSTLLPISL

SEQ ID NO: 90284 - protein, 303 aa, Unknown
  Obtained from environmental sample
  misc_feature (1)..(303): Xaa is any amino acid
MSISTYTVKPKLPNSLKPLEEIARNLWLSWNFDAVELFIRLDYDVWLKSHQSPVRTLGMVSQERLAEVAKDDSYLAALKEIYSRFLNYKKANTWYKGSRKEVVAYFSMEYGMDVSLPIYSGGLGILSGDHMKTSSDMGLPLVGIGLLYRQGYFRQYLNADGFQQESYPENDWYNMPVELKTNKAGETIKISVEMAGRVAIAQIWEVRVGRSSLYLLDTNISENSQDLRNITSSLYGGDKEVRMQQEILLGIGGIRALRALGINPAATHMNEGHSAFLGLERIRELMVEKGFTFDEAREAPCGR

SEQ ID NO: 90285 - protein, 263 aa, Unknown
  Obtained from environmental sample
  DOMAIN (1)...(258): Chorismate synthase
  misc_feature (1)..(263): Xaa is any amino acid
VKDIYRPGHADFHGEAKYGLHDHRGGGRSSGRETLCRVAAGAVAKKFLSLHEISVLAWSSSIAGINQPSPCEDGFDFVEIERNPFRVPSKLGAEKASAKIESLRAEGESAGGVITCLARGVKPGLGEPVFDKLDARLACAVISIGACKGVEFGAGFAAANLKGSENNDIPCKEGTGKFETNNCGGILGGISSGQDIVFRAAFKPTPSISKPQKVLDRDGGVKEITIKGRHDVCIVPRAVVVVEAMTALVLADFLLLSLCAKIF

SEQ ID NO: 90286 - protein, 355 aa, Unknown
  Obtained from environmental sample
  DOMAIN (19)...(325): Cellulase (glycosyl hydrolase family 5)
  misc_feature (1)..(355): Xaa is any amino acid
MARMRGINIGGWLSQIDAIQEKDPDKFPGIDKHMETFISAEDFANVKNWGFDHVRIPVDSYLFFTEDEQPLENRFDRLDKAAEYAKQNGLKFILDLHECPGHDFSEAAKTPVQKLFSGDDTYIKKTEKIWAYLAERYAGKDHVLFETLNEPVAPTPEIWNNVKDRLCREIRKYAPKSTIITGSNMWNWPSTFNLLTPFEDDNVIYSVHFYEPLLFTHQNAPWIKNPEIKAARTYPSDYGPGFVRKYGLTMSAGVWDRQRLAKEFEPVNEFRKKHNAQVICNEFGVYTPVELQAQLRWYDDLLSVLKEMEIGFSYWNYKNLDFGIISAGEKLHENLPQYNNSERINYPVLDVLRKY

SEQ ID NO: 90287 - protein, 347 aa, Unknown
  Obtained from environmental sample
  DOMAIN (177)...(347): AIR synthase related protein, C-terminal domain
  misc_feature (1)..(347): Xaa is any amino acid
MKDSHSESYKAAGVDVTAGYHAVELMKKHVDRTKTEGMLEGIGGFGGLFALPKQGSSEPVLVSGTDGVGTKLKIAMLMDKHDTVGIDCVAMCVNDIICAAAKPLFFLDYIACGKNIPQKIEQIVSGVADGCVQAGCALVGGETAEHPGLMEIDEYDIAGFSVGIVEKSKIPDKNSVKNGDAVIAIASSGVHSNAFSLTRKVFGIDKKPKILQKHFPELGKTLGEELLIPTKIYVKSILTLLEKTSVRSISHITGGGFHENIPRAFGDNVGAVIKKSAVEIPPVFKLIAAQGKVPERDMFNTYNMGVGMCVITPAANADEAVSVLRSCGEKAYIIGEIKDGVSGVLLD

SEQ ID NO: 90288 - protein, 317 aa, Unknown
  Obtained from environmental sample
  DOMAIN (57)...(280): Carbamoyl-phosphate synthase L chain, ATP binding domain
  misc_feature (1)..(317): Xaa is any amino acid
KATDISAMTDFAVKQGIDYVVVAPDDPLAIGMVDAMEEKRIPCFGPNKAAARIESSKVFSKNLMKKYNIPTAAYEVFSDSGSALNYLNSASFPIVIKADGLALGKGVIIAENREQAEEAVKSIMVEKKFGDSGGNIVIEEFLTGPEVTVLAFTDGKTIIPMISSMDHKRAFDGNTGPNTGGMGVIAPNPHYTKEIAAVCEKTIFTPTVKAMREEGCPFKGCLYFGLMLTIKGPMVIEYNCRFGDPEAQAVLPLLKTNLFDIMLAVTEEKLKTIKIEWSDEHSACVVLASGGYPVSYKTGFEISGLNAGGGSYNMGVV

SEQ ID NO: 90289 - protein, 280 aa, Unknown
  Obtained from environmental sample
  misc_feature (1)..(280): Xaa is any amino acid
MGKKENKGEIVLYQPNEVLKIEARLENESVWLTQEQIAILFDVDRTVVSKHLKNILQSGELHEDSICAIFAHMGNDGKQLYRTKFYNLDAILSVGYRVNSANATKFRIWASNILKDYLLRGYAINQRFENLENRVNETEKKIDFFIHSSMPPVEGIFYDGQIFDAYKFACDLIKSAKKSIVLIDNYIDESVLMLLSKRNTKVSAKIYTAHISQQLQLDIQKHAAQYPTITVDKFSKSHDRFLLIDDCTYHIGASLKDLGKKWFAFSKMQIKANDLLKNIC

SEQ ID NO: 90290 - protein, 285 aa, Unknown
  Obtained from environmental sample
  DOMAIN (55)...(148): Phosphoglucomutase/phosphomannomutase, alpha/beta/alpha domain II
  misc_feature (1)..(285): Xaa is any amino acid
PEDNGLKGFDNSGEKLSEDVEQAIEAAFDTEIGPSINELALGQEKKMEIQQKEMESYLDCLGGIVMPNTFPIVVDCAHGATAPWAKRLFSGAVQWLGVPSIGEKINVGIGSTHIDAMRQKVCSGKAALGAAFDGDGDRCLMVTGSGELIDGDQMAWLLALDRHKRGEKPEGLIGTQMSNGGLEQGLSELGIPFLRTPVGDKYMIREMKRTGWDLAAEASGHIIQRNLGPSGDGMATALSVLRALADKPETDRWGWRFSPWPLELINIKTKCRPALEECQAIQKAI

SEQ ID NO: 90291 - protein, 283 aa, Unknown
  Obtained from environmental sample
  DOMAIN (226)...(283): S-adenosyl-L-homocysteine hydrolase, NAD binding domain
  misc_feature (1)..(283): Xaa is any amino acid
MANVDKDTAIKDIALADWGRKEISIAEVEMPALMAIREEFAGKQPLKGAKIAGSLHMTIQTAVLIETLVALGAQVRWASCNIFSTQDHAAAAIAQDGLPVFAFKGESLEEYWGFTHKIFEFDGGANMILDDGGDATLLLHLGAKAEKDIHVLDSPGSEEATVLYASIKNRLKSDPTWYSRQLAGIKGITEETTTGVHRLYEMNKNGELKVPAINVNDSVTKSKFDNLYGCRESLVDGIKRATDVMVAGKIAVVCGYGDVGKGCAQALSSLCAQVWVTEIDPIC

SEQ ID NO: 90292 - protein, 276 aa, Unknown
  Obtained from environmental sample
  DOMAIN (1)...(142): NAD binding domain of 6-phosphogluconate dehydrogenase
  misc_feature (1)..(276): Xaa is any amino acid
MNIGVAGLGLIGGSLAKAYRSGNHTVYGFDIDDSILSFAQLSGAVNGVLDVNTIKLCDILLVAVNPKDAVEYMEKTAPYIDKHTVVIDCCGVKRYICENCFPLAKKHGFTFVGGHPMAGSHKSGFKNSRENLFRGASMILVPPVFDDAALFGRIEELIKPAGFGNLTFTTAEKHDEMIAFSSQMAHVVSNAFIKSPSAGGHKGFSAGSYKDLTRVAQLNAQMWTELFMKNGDNLINELDIFIKELSLYRSALADHNDGKMKELLKEGSQIKEKLDR

SEQ ID NO: 90293 - protein, 351 aa, Unknown
  Obtained from environmental sample
  DOMAIN (16)...(314): 3-dehydroquinate synthase
  misc_feature (1)..(351): Xaa is any amino acid
MKKITVNASKTYDINIGFGIIDEAAVILNKIGSAAAVVTDDIVAPLYAQRLEQVLSQNKIRIVRYVIPHGEASKSAEQLVSLVNFLAKEKLSRTDTVVALGGGVVGDLAGFAAAVFMRGIGFVQIPTTLLAAVDSSVGGKTAINLETGKNLAGAFYQPDAVLCDISLLSTLTPEVFRDGCAEVIKYGVIADSVLFDSFETPIKDQLEDVIARCVEIKRDIVAKDEYERNERKLLNFGHTVGHAIELLSGYEITHGSAVAAGMAVVTRAAVKMKICDDSCKKSVLQTLIRYGLPINTAYDSVSLAKACLADKKRDGGKLTMIFPEKIGKCVLKDIKVEELENLIRLGLEELN

SEQ ID NO: 90294 - protein, 90 aa, Unknown
  Obtained from environmental sample
  misc_feature (1)..(90): Xaa is any amino acid
LFQTAFIKSPSAGGHKGFSAGSYKDLTRVAQLNAGMWAELFMKNSDNLTCELDILIKELSRYRDALVVKNETKMTELLIEGSKIKEKLDR

SEQ ID NO: 90295 - protein, 89 aa, Unknown
  Obtained from environmental sample
  misc_feature (1)..(89): Xaa is any amino acid
MDFLFEGITLITWKHLVMYGVGIILIFLAVKKEYEPTLLLPMGFGAILVNLPLSGVLNQTLPGAGEVRGVIQWLFETGIETSEVMPLLL

SEQ ID NO: 90296 - protein, 90 aa, Unknown
  Obtained from environmental sample
  DOMAIN (34)...(88): Helix-turn-helix
  misc_feature (1)..(90): Xaa is any amino acid
MKGFGQDFDDFMVEQGLYDEAKELAAKKLIVLELKQEMDAQKLSKSKIAKKMHTSRVAVDNILDPDYNTSIGTLERFASVLGKKLSISIQ

SEQ ID NO: 90297 - protein, 90 aa, Unknown
  Obtained from environmental sample
  DOMAIN (31)...(85): Phage derived protein Gp49-like (DUF891)
  misc_feature (1)..(90): Xaa is any amino acid
MYREDRKEIGSDIFTVQKKFPLGLPLVEKVDTDLWEVRSHISDGICRIFFTVCQETMVLLHGFVKKSQKIPSKEMETAKKRLAEFRRLRK

SEQ ID NO: 90298 - protein, 364 aa, Unknown
  Obtained from environmental sample
  misc_feature (1)..(364): Xaa is any amino acid
QPPDFDEADAALLKTEASESEAVVPATLEADQPTKEPISEIVPDGLDITPADISPDSGQAQEVAEEQAEQIELPDQPEPLAEQEEEAEGQTDETTQTEQPEPQTEQQEEAGEEFGQSEQVGQPEPQTELQEEAEGQADETALTEQPEPPEPQTEQQEEAGEDVAEQTEQLEQPDQLEPPAEYEEGPEALAEQAKPSEKTLASSLDLSEMLDPLLGSAQGAEVLNDDTKAAETTQTAEDLFNAFRDGVAAKVGSDDYDTHYNLGIAYKEMMLADPAIEEFKKAMVDPERTLDCCSMLAMCEKMNGNNAAAADWLRVGIAAPGFPPIDSMGLRLDLAALLEEMGHHDESEELLQETKNLENAFWVQ

SEQ ID NO: 90299 - protein, 205 aa, Unknown
  Obtained from environmental sample
  DOMAIN (23)...(197): yrdC domain
  misc_feature (1)..(205): Xaa is any amino acid
MMTVYCIHPVNPQKRSMESAARVLSVDGGIAVYPTDSLYGMGACVTNPRGIDRIAHLLEKDKNRPFSFICSDFSQISRYVRLSNAHYRLMKRYLPGPYTFILNATNLVPKRISPKRRTVGILIPDSVVTLELVKLLGEPLANTSVNISGEPMNDPDEIQEALRHEADVMLDIGPLNDPEPSTVVDLTNDEPVLVRLGKGEWAEEL

SEQ ID NO: 90300 - protein, 307 aa, Unknown
  Obtained from environmental sample
  DOMAIN (103)...(268): ABC transporter
  misc_feature (1)..(307): Xaa is any amino acid
MSQILQRQAREQLKKREDKAKELKEFIQRFSSNASKARQATSRKKVLEKLDLENVPVTSRKFPYVGFKPEREIGNNVLRAEKLTFSFEGTALLKDFSLIVNKGDKIAFVGIEHSSKSAFFDIICGEKKAEAGDCYWGQTTSFSYFPKENSSFFNSDLSIVNWLRQYSSDQDETYIRSFLGRMLFSGDEALKPVNVLSGGEKVRCMLSKIMLSGANVLILDEPTNHLDLEAITALNDGLAAFPGVVLFNSHDHEFINSIANRIVEILPQEKNPGGFIDRMMPFDDYLADNSVKQLRAAAYKHSQKLLI

SEQ ID NO: 90301 - protein, 814 aa, Unknown
  Obtained from environmental sample
  DOMAIN (108)...(274): RNA polymerase Rpb1, domain 3
  misc_feature (1)..(814): Xaa is any amino acid
MKKLVDKDVVYNIKKAKMLLEAESAEIFAILDEVVKEHPVLLNRAPTLHRLGIQAFEPVLVEGKAIKLHPLVCHAFNADFDGDQMAVHVPLTQAAQMECWTLMLSARNLLNPANGRTIVFPSQDMVLGINFLTRVKPNGKRPESSKPEGKSHIPYYSSPEEALMAVENKFLDWGSLIRVKPVKFPIWDKIDHEAELPKDGIIETTVGRLIFNEEQPKEIPFINYEMKDKELRALIEHVFKKNGSWITVKMLDAIKSTGYRYATVFGATIGIDDIVVPKEKPEMIDKANREVEAIQAQWRKGIMTQEERYNKVVEVWTKTNDELTNIMMKTLEADHDGFNSIYMMANSGARGSRNQIRQLAAMRGLMAKPSGDIIELPIRSNFKEGLSVLEFFISTNGARKGLSDTALKTSEAGYLTRRLVDIAQDVVVNEDDCGTINGISYTAVKEGEDIVEPLSDRIIGRYTIEPVKHPFTGEIIVDVNEEITEEIAKKITAAEVVSVRIRTVLTCEAKHGVCRMCYGRNLATNRPVDIGEAVGTIAAQSIGQPGTQLTMRTFHIGGTASREIERFDIKAMYPGRVILNRVKAVTNREGAQLVLGKSGQLTIVDAQGREREKHTLYNGARLHVTDGQEVALDAILAEWDPFNDPIVSEVNGVIHFSDIIEGKTVQEKVDEATRQATQTIMEYRTTNFRPSISVCDENGNVKQRMHSAMPAVYSLPVGAIIMVKDGATIEAGDIVARKPRETSKTKDIVGGLPRVAELFEVRKPKDMAVVSEIAGLVHYEGESKGKRKLVVRPDVGDQKEYLVPKGKHITATDG

SEQ ID NO: 90302 - protein, 658 aa, Unknown
  Obtained from environmental sample
  DOMAIN (1)...(484): RNA polymerase Rpb1, domain 5
  misc_feature (1)..(658): Xaa is any amino acid
VRIRTVLTCEAKHGVCRMCYGRNLATNRTVDIGEAVGTIAAQSIGQPGTQLTMRTFHIGGTATKISEENRIFLKYPVYINDIIGTHVVLEDGRWLFSRRGHAIVSKVMHEYVIEAGDQVMVESGQRINPDITIIKRGSAEIKAPDSTYVQILKSPDGNSDVLYLVGKEQKIEIRNGSDLLVKKGTVVEKEKTIATFDPFSDPIIAEFSGKVKYEDIISGTTLKEEMDEVTGNIEKRITEFQLENKQPRIHILDDNENELISYHLPGGSILQVEDGDKIKAGRTIAKILKESARAMDITSGLPRVSELFEARKPRSPAELAKVSGVVLFEGIAKGKRKITVKDSFGREYQHFIPMAKRLLVRDGDTVEAGEPLCAGNINPHDVLSIMGESYLQTYLMDEIQQVYRLQGVSINDKHIGVIVRQMMRKVEIRFVGDTRFIYGQMVDKYRFHEENARVIKEGGQPAIARPLFQGITKASLNIDSFLSAASFQETTRVLTNAAIAGSTDYLRGLKENIIIGHPIPAGTGMKRYRNVKLYDEDSQDLEKQMQEILEQRRLEAEYIAEGHRRGKQGVGDLLGAIQRVINQRFFVYRVIKSFTYCQLVGGGFGEQHDRARGHERAQHGSHGNQENPRAAGHESQDSPQRPAATDAYQARAGQRVAE

SEQ ID NO: 90303 - protein, 126 aa, Unknown
  Obtained from environmental sample
  DOMAIN (3)...(122): Uncharacterized BCR, YaiI/YqxD family COG1671
  misc_feature (1)..(126): Xaa is any amino acid
TGLGIQAVFAANRRIPGIKGALMEICPPGDNSADNRIVELAQSGDIVISRDVPLAKRLIEKGVSVIDDRGRVFTPDNINELLSLRNFMVGLAENGLGMERKSNYGKKELKNFADSLDRILGKLTRM

SEQ ID NO: 90304 - protein, 399 aa, Unknown
  Obtained from environmental sample
  DOMAIN (38)...(392): Aminotransferase class I and II
  misc_feature (1)..(399): Xaa is any amino acid
MKTNFHEQDSKIIASTYAKANVDFTHGKGALLFDSKGKEYLDFASGISVNALGHSHPAIKKAIKEQSENFSHISNLFPNSPQIKLAQKMLSLTKFGKEKGKAFFCNSGTEANEAAIKFARKYFHSKGEKKRVEIITFENSFHGRTYGALAATGQEKLKEGFGSMPAGFKHVEWNNAEELQKAVGKNTAAIMLEPVVAEGGILMPSKKFIETINQIKKQSGCLVIADEIQIGFGRCGAISCSELFGINADITTWAKSIGGGLPLGMVLMSEKIALSLKAGDHGTTFGGNPVACAAGLAVVETVSNKKFLANVEARSKQIKNGLEKLSKKYKWLGEIRGCGLLLGITTEKPVADLIKACRENGLLVLRAGTNVLRLLPPLIVSEREVALALKKLEDSCKHL

SEQ ID NO: 90305 - protein, 206 aa, Unknown
  Obtained from environmental sample
  misc_feature (1)..(206): Xaa is any amino acid
MSQNPTEVYWNSDRKMRFLFAASGLAAFFALLYYLSDVLTPFVVAFLLAYILNPLVNILQKKIKYRWVAALLVLLIVLVICVGAAFIFIPMMIDQGVNLGRLLQKYAHNSAWKETLIKYLPDEFLEKIQHIWEEKDFEPVLNQLQNMDLIKISQSILSKILPSAVGVFSGVGKVLIWCISIFMIVLCLVLMLLDFENMKKSLARQI

SEQ ID NO: 90306 - protein, 169 aa, Unknown
  Obtained from environmental sample
  DOMAIN (4)...(159): Methyltransferase small domain
  misc_feature (1)..(169): Xaa is any amino acid
LLKVFSRILDEDRAAEKPPPRRLLDSGCGCGVIGICAAKAITTNDVKIRCQDRDELARLLTLHNAAHNGVSPAALEACTEPLLAGPDSEHWDMILTNIPAKAGTPVLEDFVRRSAALLNPGGRVIMVAVQPLADFFRERIAAEAELLLEHKGSGHTVFVYGGKAVQVPG

SEQ ID NO: 90307 - protein, 144 aa, Unknown
  Obtained from environmental sample
  misc_feature (1)..(144): Xaa is any amino acid
MYSKGKFFSIAAILSIIIMLTILIVTACDDGNKPDTPQSVAKPTATPAGGIYTTVQTVTLATATQGADIYYTLNGTTPTANSIRYTAPISISTSAILKAIAVKTDMNPSEILTETYALNLPGQVVQPIAVPPGGIYNTAQTVTW

SEQ ID NO: 90308 - protein, 241 aa, Unknown
  Obtained from environmental sample
  misc_feature (1)..(241): Xaa is any amino acid
MEDRAFLGGVQKFWPDDERLFRAHEFAREKNISYEFGTLDKDNEYPETVRFDLESQTGEKGELIGISVGGGMIKVFEINSFPLLWQGDSYALLVKGRNNFTLAETIIKDMDDAVLEHSIVKNSAGEEACYIELSRPPAEEFLNNFNKNDWILIPALLPVVSFNGRGNQLFRTVDEWIAYAQNHRISFLDAAIEYEKAFSGWDDAAIWDYFEQIRDVLLNQIHALEDRGIDPVPDTPLLPVY

SEQ ID NO: 90309 - protein, 205 aa, Unknown
  Obtained from environmental sample
  misc_feature (1)..(205): Xaa is any amino acid
MAKGINSEEVDVGFFAIIPATVRYDRSLPPGAKLLYGEISALVKKKGYCWSRNPYFAGLYDTSERTIIGWIWRLHAAGHVDIYFKYFPDSKKIARRYIALPYPPNKILPQELAEAHFVERKKPIEPSLLVKKSSSLNLEKDPSNQDLMVKESSPPDGSVVKESSLLMVKESSPLEGLVVKESSPPSSEENSLVIYTNSNNRSSSS

SEQ ID NO: 90310 - protein, 97 aa, Unknown
  Obtained from environmental sample
  DOMAIN (38)...(97): SAF domain
  misc_feature (1)..(97): Xaa is any amino acid
MDGEELKTLLQASEEIFLMRGGEKKALAEEQITIDFAFATVVSIANIKKGEIFTKNNLWVKRPGTGEILAAEYEKILGKPALCDIETDTHITRKMIG

SEQ ID NO: 90311 - protein, 195 aa, Unknown
  Obtained from environmental sample
  DOMAIN (3)...(195): haloacid dehalogenase-like hydrolase
  misc_feature (1)..(195): Xaa is any amino acid
MKFPAVAFDLDGTLYPNYRLNFRLIPFIIKEQRLLRALRRARIQLRKSGGGMGGDFYEAQAKIMGEILGESAEEVMEKMERLVYRGWEDTFKKIRLFPHVKETLDALRKNGVTLGLLSDFPPETKLKNLGIFEYWDTVVCSEQEGFLKPDSAAFLEIAKRMGAPSEKILYVGNSVSYDVAGAHKAGMKAALVRAV

SEQ ID NO: 90312 - protein, 286 aa, Unknown
  Obtained from environmental sample
  misc_feature (1)..(286): Xaa is any amino acid
AWHKKLVEEDPRMASVGMGQVAAGICHAISMGADLFFAEGDTLVLPDMYWDNYDQIFSIRLNGKMVTYPFYRQDGGFNYEGLAKALASVSGKVHTILNFPSNPTGFSPTPEDMQKIAGILVEAAKDRIVVVFCDDAYHGMVYEKTAATKSLFFELIEKAPNLIPLKCDGITKELAFFGGRVSFLHFGVAKDASDILVDKCKGLIRAGIGGTVSVSQVLLETELADPRHASEVKRVLAVLEERYQELKRALSKKSRHWEVLPFNGGCFCLLQMREGIDAEALRQKLI

SEQ ID NO: 90313 - protein, 213 aa, Unknown
  Obtained from environmental sample
  DOMAIN (1)...(187): tRNA synthetases class II (D, K and N)
  misc_feature (1)..(213): Xaa is any amino acid
DNAAKITGALGAKEGDLILIVADAKKNVANTALGAVRSKLGRDLNLYAPDSFEFAWIVDFPMFEYDDENKKWEAAHHLFTWPQDKYHSTMESDPGSVKGDLYDLVLNGYELASGSIRIHDPEMQKRVFKIVGIDPAQAEKKFGFLTEAFKYGAPPHGGIAPGLDRLVMIMAGHTSLKDVIAFPKNSFAVSPMDDCPSDVDQKQLDELHLIVKK

SEQ ID NO: 90314 - protein, 87 aa, Unknown
  Obtained from environmental sample
  misc_feature (1)..(87): Xaa is any amino acid
ANRTRGKMDGGRRASYMMMNLEHRHGAQKPVIKKALVHLDGKPFKTFESKREEWAVKTSYLFPGSIQYFGPPEVCDAPTITLKLEHE

SEQ ID NO: 90315 - protein, 72 aa, Unknown
  Obtained from environmental sample
  misc_feature (1)..(72): Xaa is any amino acid
MNTKELEFAVFCIENTADELALTGAEVYHLLTEKSGILDDYIIPCYDTLHTQGKEYIVNDIVGYMREKGLAV

SEQ ID NO: 90316 - protein, 85 aa, Unknown
  Obtained from environmental sample
  misc_feature (1)..(85): Xaa is any amino acid
MKADKALLQYKYDSVIETLSRLKGISLRQALDMFYQSQTYIEMREGISDMHCRSDIYLAEDIISEYTNQKTQATGQSQSAQSNRH

SEQ ID NO: 90317 - protein, 104 aa, Unknown
  Obtained from environmental sample
  misc_feature (1)..(104): Xaa is any amino acid
VKDCNSNSRAEYNEGIAFLGKYVEKHFSDEEVIQKDCGFPGYQAHRKIHEDYKAAVKTLSAKWIAQGPSKESLAEIRESVGGWLINHIKGQDVRIGAFIRSLKK

SEQ ID NO: 90318 - protein, 152 aa, Unknown
  Obtained from environmental sample
  misc_feature (1)..(152): Xaa is any amino acid
FAADAFLTQDRPATAADIEKWLSHNREESAFTLFSRIAAGDTSKAVESLHTLLAAKESAQGILATLAWCFRKLRDYLSLVRNGEPNSFELKKIGLSSPKARDDYTAASRRYQPSAVDACLALTAEYDLLTRASGTALEAVLMDVYLLKIMNR

SEQ ID NO: 90319 - protein, 206 aa, Unknown
  Obtained from environmental sample
  DOMAIN (28)...(193): GGDEF domain
  misc_feature (1)..(206): Xaa is any amino acid
MNQMFTDLDLKPGEDKHHKNEAESLNNFLHLTIIDQLTGIYNRRYLDGSLKKIIKLHSHTESSLSVLMIDIDHFKKYNDTYGHDAGDNCLKTVAGILSECVIRKEDFIARYGGEEFTVVLPNTDENGAKLVAERMLEKVRECNIPHKASDIAGYVTVSIGGTTDVVNHLQHGSDYIKAADEALYESKKNGRNRITVPRQGAKGDGH

SEQ ID NO: 90320 - protein, 415 aa, Unknown
  Obtained from environmental sample
  misc_feature (1)..(415): Xaa is any amino acid
EQFTTRLTAILLQQAALNTPGSITVSHSTTLKAVAIKDGLNSGILTVVYKIPRTYAESVQRVTFTGSTATVNFDYLSGNDIYLVKVNTSSLVVNAANTGNARVLSPDLSPSLQSDGLLYAPENELPRMGHPAADAFNANPPPIVDEGPRRSRAVFISPVVGDTRMFWVESYFNSGTFVQKQATLRATGQYGNIWIMDEDYGSGGNKVTDARAKELSDKFDLIYPIETKLLGYEYGGGPGGDGGKDGDPKIQILVYAILNASGGTNGVASGFFWGKDFNNKTGSNLGEVFYVDANTAARDPEHMYSILIHEFQHMINFNMKNIRLGAASESWYNEMLSMSAEDIIAPLIGVMPTSFYHVTKIRMPEFLKTYAQEGVTEWIKLASSSYAKGYAFGAYLMRNYGGASLLQEILANDST

SEQ ID NO: 90321 - protein, 81 aa, Unknown
  Obtained from environmental sample
  DOMAIN (6)...(78): SirA-like protein
  misc_feature (1)..(81): Xaa is any amino acid
MDDIAIDETIDVTDVVCPMTFVKAKVALEELDDGQVLSIRLNDGEPIQNVPRSIKGEGHKILKLVDNGDETYNLIVKKVGD

SEQ ID NO: 90322 - protein, 93 aa, Unknown
  Obtained from environmental sample
  misc_feature (1)..(93): Xaa is any amino acid
LYKAFPPEEARQYRNILEIHFTPKHGSWLNMAEIEINVLVNHGLSKRVPSIEQMRKEVAAWNKVRNQDANNIKWRFTTEKAKIKLHRLYPQLE

SEQ ID NO: 90323 - protein, 206 aa, Unknown
  Obtained from environmental sample
  misc_feature (1)..(206): Xaa is any amino acid
MRKLILTTAAVAAAIAGAFAGEPSFGTFTDTRDGQTYKTVRIGTQTWMAQNMNYKTDRYWSYFNISWCYNNDTSYCAKYGRLYDWETALTVCPAGWKLSSREDWDKLVATAGGKEMAGKNLKSKSGWNDYKGKSGNGTDDYGFSALPGGTRYYSYGNFDYAGYHGGWWTATESGYAYYRNMSYDYDRVDENHYYKSGGFSVRCLKD

SEQ ID NO: 90324 - protein, 88 aa, Unknown
  Obtained from environmental sample
  misc_feature (1)..(88): Xaa is any amino acid
LAGIAVSPSGERLNLAGIAVSPSGESVFLVGIAVSPSGESVFLAGFVVSPSGESVFLAGIAVSPSGESVFLAGNMVSPSGERWVLLLA

SEQ ID NO: 90325 - protein, 601 aa, Unknown
  Obtained from environmental sample
  DOMAIN (397)...(431): Putative Fe-S cluster
  misc_feature (1)..(601): Xaa is any amino acid
MTVAKAPIYTELAECHDCYKCIRKCPVKSIKVEKGQASILFERCIYCGRCVNNCPSHAKHYRNDVEKVKLLLAGDRKVAVSLAPSFVSEFTDWKPEKLIAALKKLGFTAVSETALGADFLSARSAGDLASGAALCTTSGNPPLLMISSACPVIVDYIKLYNPRLAPFISPHASPLLTHARFLRSRYETDGKIAVVFIGPCIAKKHEADLYREEIDAAITFAELREWLHKERITPQTISISVSPSALANCAFEPRRSAKGAFFPVEGGEITAFSAYIAEAAAEKGKRIHTLSASGFHAVGDLLKGFDPAAVEEPLFLELLSCPGGCLNGPGMSGAAPGAIRHIRLKDYAFSADNTLDAAALSLSPPFDAGYTLTPLSNAVHTEQEITEALLRVGKHSLADRLNCASCGYDTCRDFAAALLDGKAEKSMCASYMRGLANKTANGLIKAIPSGVVIVDRDLKIIDCNAQFARLLGNEAAELFSIMPGLEGADLTKISPFPQYFQTIIDPSGPELAQTDVRDGSKIFHLTVFTVEKGVAAAGVVEDITAPRVRIETTVERARELIKKNVSTVQQIAFLLGENAAESEAILNSIIESYTVEEEKNA

SEQ ID NO: 90326 - protein, 81 aa, Unknown
  Obtained from environmental sample
  misc_feature (1)..(81): Xaa is any amino acid
VNSITVCMGSSCFGKGNSANAEYLNRFIEEHKLQDSVEVLGCLCCNACARGPNIKINDKLFSVVSEQTAADIVVKELGLRL

SEQ ID NO: 90327 - protein, 80 aa, Unknown
  Obtained from environmental sample
  misc_feature (1)..(80): Xaa is any amino acid
MKKVTVCIGSACHVKGAGSIVEQLQSLIAQKNCGDKVELAGAFCMGKCATGVSVTVDDEYHSLQPENTKKFFEEKIMKKL

SEQ ID NO: 90328 - protein, 378 aa, Unknown
  Obtained from environmental sample
  DOMAIN (8)...(31): 4Fe-4S binding domain
  misc_feature (1)..(378): Xaa is any amino acid
MNGSGKKLLINHEICIGCGNCINACTHKARTLIDDTGRFMEDLKQDKNIIAVAAPAVASFFPEQYLNLNGWLKSLGVEAFFDVSMGAELTVMSYINYIKEKKPRTVISQPCPAIVTFIEIYHPELLPYLAPADSPILHTIKMIKEYYPQYKNHKIAVISPCIAKRREYDETGMGNYNVTMLALKKLLEDQGKDLSSFSSVAYTGLSAERAAGFPIPGGLLDTAERFNPGIRRQTLKIEGVYSIYPYLEELPKVLDSNVKLPLLVDCLNCEKGCNGGPGTGNAEKPLAMLEDPVRKRIAKLEEDQHYPKGNNAYKKYHNALNKYWKKGLYNRSYRDISGNNTIKQPSEVELTRIFHSMKKFKDEDIYNCTCCGYGSCKS

SEQ ID NO: 90329 - protein, 550 aa, Unknown
  Obtained from environmental sample
  DOMAIN (387)...(440): Ferrous iron transport protein B C terminus
  misc_feature (1)..(550): Xaa is any amino acid
TRDFLLRQKPDGIINIVDATNIERNLYLTMQLIELQIPMVLALNMMDEVQANNGSINIQSMREALGIPVVPISAVKKQGLSELMEQAVETARHQKKPERIDFCSGAVHRAIHAVAHLIEDHAQKQGIPMRFAATRLVEGDVPMLKLLFLDENEIDMIMHAVKEMETEMDTDREAALADMRYQFIEDICKKCVVRAHESREYRRSVSLDSILTHKVWAFPSFLAIMLLVFALTFGIIGNNLSDLLVLGLDTVSGIADEALTAYGLNPVVHSLIINGIFAGVGAVLSFIPIIIVLFFFLSLLEDSGYMARVAFVMDKPLRKIGLSGRSFVPMLMGFGCSVPAIMATRTLASERDKKMTILLTPFMSCSAKVPIYAIFAAAFFPKHSALVMSSLYLLGILFGVLTGFIMEKTIFKGEPIPFVMELPNYRFPSAKTVLLLCWDKAKDFIQRAFTIIFMATVVIWFLQSFDIRLNYVQGGEGSILALIGRLISGIFVPLGFSDWRISTALITGFTAKEAVISTLAVLTGADAAELGNTLHNLFSPLSAFSFLVFT

SEQ ID NO: 90330 - protein, 593 aa, Unknown
  Obtained from environmental sample
  DOMAIN (152)...(518): Glycosyl hydrolase family 57
  misc_feature (1)..(593): Xaa is any amino acid
MAAPKSGGTKNANTAKNDVFSKIVSVAHPTEIFVDGKTGRSPAFEIRFSTDGDVPFPQVIVREFGNEHIFSGAAVVTEKPNSYLVSVPAGKLPVGSFQVQVEGCKKADWRSSGGGDWVKALSEVKVSFPKTAAKKAPRISVGDSRGVKIFFGIHKHMHQPYYRAADTAYWDGEKDGIFGSRAGNYTQYLKDAVDQYVGGGLPRAGLSTSWSGSLIEQLNRCASDGLCGGVFGSWSNALREAAQYGTRSGAKRMAFSDFGFFHPLMALVPGRDIVTQIEMHRKIIRDVFGVETSRTLFPPETAFHVRMIPWLNKAGVKAVIYDSVHRYRACKDYPYAGKEEGMLPPNAAEQENAAIGGWMRLSNIWAPSHINPSMLRPEYIKYEDVDGTVHKIVGVPAERYIGNEDARGGYGALQYEHVLGQIYEHIAQTGSFDPAHPPFFLLHSDGDNHGGGADSYYRHNTGRLVEWLKNDDRFELCTVDDYLKDFPPDPNNLVHVEPGSWAGADNGDPQFRKWFSMYDQPYSPDLNSWSVLTALQNCIYTVQDAGNGGGDIDRAVRLLLTAETSCYWYWTGQEIWDRQVTDAANAAMSIIRS

SEQ ID NO: 90331 - protein, 281 aa, Unknown
  Obtained from environmental sample
  DOMAIN (142)...(247): CAAX amino terminal protease family
  misc_feature (1)..(281): Xaa is any amino acid
MKKALQYIILTCAVSWAAAGVAIWLGMRTAQGMLYTVFAAAYMLLPAICAIILQAIHKEKPFSNLNVSFKLNRWFLAAGIVPFIYSFAALGITLLIPNVSFSVTYEGLLSRVPPEQVELVKQQLSKFPPLVFLLIQVANAIIAGYTINAFFGFGEELGWRGYLLKALQNKKFMVVSLIIGTVWGLWHFPLILIGHNYPQHPIAGVGMMVIFCILLTPMMIYTVIKSKSVITAAIFHGANNAICGITVLYTVGGNDLTNGITGVAGFIVLLSANLAFFVYDK

SEQ ID NO: 90332 - protein, 132 aa, Unknown
  Obtained from environmental sample
  misc_feature (1)..(132): Xaa is any amino acid
MKDRRVYADYNATTPLRSEVKDAIISVLDIYGNASSLHTSGRQARARVEEARKAVGLLLGSDPASIIFTSGGSESNNAVFQTMRQLKSDRNEFITTQIEHPCVLNSAEFTKEQGFTVHFVPVDESRKIKMEA

SEQ ID NO: 90333 - protein, 63 aa, Unknown
  Obtained from environmental sample
  DOMAIN (4)...(56): mttA/Hcf106 family
  misc_feature (1)..(63): Xaa is any amino acid
MGFIGVQELLLILLIVLVLFGAKKIPELARGLGNGLKEFRKATKEIEGDNSKESSSISDGDSK

SEQ ID NO: 90334 - protein, 259 aa, Unknown
  Obtained from environmental sample
  DOMAIN (26)...(229): Sec-independent protein translocase protein (TatC)
  misc_feature (1)..(259): Xaa is any amino acid
VTETANKDEGGSKEMPLIAHIAELRFVLIRSGCALIVCAIPCGYYWKQIFDLVVSRTLELCEPLAVHIIYTAPVESVMLSIKIAFVCGLMLASPIIFQQAWSFISPALYKKEKIWVLPTAFASTVCFLSGVAFSCYLLPIMLKFLTDFAADVLEPFFKIDEYLSFLLKISLAFGLAFQLPVAAFVFSKIGLIDHKFLLRNFRYAIVFIFIAAAILTPPDVLSQILLAMPLLALYAVSILVSFFARQGGRSPPRSNRPQI

SEQ ID NO: 90335 - protein, 297 aa, Unknown
  Obtained from environmental sample
  DOMAIN (132)...(212): Cache domain
  misc_feature (1)..(297): Xaa is any amino acid
ASFTPWVFVAYFFIGNILENRLLGRVEEVITTVEANVRLGFSEGEVTLRNSYYVLTGMLDRKASRYDILSYLRTTTEWLTQREQGLLDFYGIYGYINGHFYDSIGLDPGADFIPQRQPWYQTAVRSGRSIGYTAPYPDPRTGNTIISIVQNIFHGADDIIGILAINVDSKKIGQYAAALTQLFGGYGILISQNMAIMAHPDNEVLGSQFQDLGGDFVKLARDLRSGEKVFDREITDRDGTDTLVFFRKIFNGWYVGSIIPKAKFYSDLYLAAFILMFLGMGLATLLCYILLRLTMAR

SEQ ID NO: 90336 - protein, 376 aa, Unknown
  Obtained from environmental sample
  misc_feature (1)..(376): Xaa is any amino acid
MLTNNIYTPISTFFRKLRQRWVLFLDIRDDNYTYRVITLVSAVFLAVFAIVLGLSLLGAVFGIKALNPFLGSFFSHSYGILAFFIPYYLVYAASVLADPHWRPDRIFFLIASPIPFLTLGTGYILIRDFEALSREYAFLDFTGKTGFGGIVVVMTFLEVVALQMLKNALFPKVTIDGKKKRVWRGNKATLLLPPPKPQGEEYGVYVKETIVSENSVSDDPPAKETNAEKIEIELPPMKPLHSPLALEYLNEANREAARRQRETGVHGDKLAGSIERAIEEAEVMAAIHSEKLRKKSTDKAASIAAAGHATSGHTARAYKRKYSIPLEILSEYPDGEYWIIDQATRDAASTLKETLEEFKIQAEGYRDQKRPCNNDV

SEQ ID NO: 90337 - protein, 809 aa, Unknown
  Obtained from environmental sample
  DOMAIN (68)...(312): Iron only hydrogenase large subunit, C-terminal domain
  misc_feature (1)..(809): Xaa is any amino acid
MAITPLTPVVRIDEEKCINCYACIVICPVKYCMDGSEDILQINHDLCIGCGNCINVCTHKARTLIDDTDRFMNDLKQGQKIIAVAAPAVASFFSGQFLNLNGWLKSLGVEAFFDVSLGAELTVITYLDYIKEKKPKTVISQPCPAIVTFIEMYHPELLPALAPADSPILHTIKLAKEYYPQYKNHKVAVISPCIAKRREYDETGIGDYNVTMIALKNLLDDQRLDLSSFPPIEYSGVSAERAAGFPIPGGLMDTAERFVPGIRRRTEKIEGVYNIYPYLKEISEILNSNVELPLLIDCLNCEKGCIGGPGTGNAEKPLALLKNPVQKRIAELEKKQNFKPGKNEFKKYHDLLKKYWKEGLYDRSYLNLSENNTIKHPSEREITEIFRSMKKYEEKDLYNCTCCGYGNCRSMATAIYNKLNKPENCAHYILALLSEKTNGEELTRRQLQEHIARAAELIEGINKLIDKLNNTITSQGETIAQSSTATEKMIDSLKNTSEISRKEQETIKEMIEDTAKSQEAMRETIQSVQDISKSVDGIAQAIKIISAIAANTNLLSMNAAIEAAHAGEAGRGFAVVAGEIRRLSDSTRENSVNISKTLKNIINGVAVTEKQSDNTGARITAMSKEISNFAETMSDLINTFGELSSESSEITAALDSLHSQSDMVKTDYAEILTMTEKLQTAMFELNMLSKKKVLVIDDDEPVLIMVKDALQNNCNVTTINSGKAALDLFLQGYIPHLVLLDLNMPEMGGWDAFVRIRNITQLHRIPIAIFTSSDDQKDKEKALELGAVEYIHKPISIDELLEKIAKLTG

SEQ ID NO: 90338 - protein, 240 aa, Unknown
  Obtained from environmental sample
  DOMAIN (27)...(209): ABC transporter
  misc_feature (1)..(240): Xaa is any amino acid
MIICEHLTKLFGDNSGIKDINLQCVPGIIYGIVGYNGSGKTTLLNCIEGLYIPTSGFVSHDNVKTTNDKEFLHCRRKIAFLPSDDYLYPQLTCMENIELSTILRTGKNKLSHETDELIRYFEIDSYLHKKFRDCSTGMKKKVQIVISLIGEIDTIIWDEPNDGLDIISNMKIKNLLKHYKSKNTTILFSSHVIEFLNDFVDTCVLLHEGNIIENKNIQDINSLETLFLNNLPQNVLEINF

SEQ ID NO: 90339 - protein, 594 aa, Unknown
  Obtained from environmental sample
  DOMAIN (1)...(579): FHIPEP family
  misc_feature (1)..(594): Xaa is any amino acid
FVVGVSGNEGLVIGFIIFIIIIAVQAVVITKGATRVAEVAARFTLDSMQVKMMAVETEYSSGSITEEESQIRKREIQKESDFYGSMDGASKFISGNVKIGILITVINVIGGIIVGMSIHKESWSLAANNYVTLAIGDGLVSQFPALLISTAMGIVVTRAAASGSLPKQILEQILYKGSIVYWICSAVLVFLSVMPGFPWYVLIPMAALIAAHAYRIGRRQKIEASNKEMMIKTRDRKDEKTGEISPVVPLDALSLELGYGLVPLVEKEKGAELLERVQGIRRQCALDLGLVIPMVRIIDNSTLEPSEYCFKIKGVDSGRGKIRIGYYLCINPGTVTTEMAGEKTVDPAFGLPAIWIDQDKRDEAERCGYTVVDPPSIIATHLTEIIRRHAADILGLQDTQKILNELKKEYPAVVEEVLREGKGLRITEIQKILHGLLRERVSIRNMVSILESIADYAPVSKNIWFLTEKARQALASQICSQYADDDRRLRVLTIDPSLEQKIIDSKYETPSGIMSAMDPPSQKMWINAVSKAVTAVKEKGWMPVVLCSEQARFLVKNSTDREMPDLAVLSVPEIVPDVIPEAVGMIRIENSTTE

SEQ ID NO: 90340 - protein, 481 aa, Unknown
  Obtained from environmental sample
  DOMAIN (393)...(481): Response regulator receiver domain
  misc_feature (1)..(481): Xaa is any amino acid
LRKRYGFLLNNKLDIIAHPASYSINDQVSNIENGLTNILPDLAEGKNIYSYKMKNYMYEDTVVFIKGINHGWRLGIVIPVKEYYANIIKTAVFLIVGGIVLALLLCIMLYNIYSAKTEADKKTRQKSNFLATMSHEIRTPLNAILGLTEIQMQNSSHPPATSEAFSKINNSGNLLLNIINDILDLSKIETGDLMLNLVKYEVASLVNDVAQLNHIRYEGIPVEFNVNVDENTPTELVGDDIRIKQILNNLLSNAFKYTDSGQVSLSVSVEVAPINIITLVFRVSDTGRGMSKDQVAKLFDDYARFNLETNRQIEGTGLGMSITKNFIDIMKGELKVESEPGKGSTFILRLPQGYVNSAVLGKEGVENLQQHNLDKKTKQKRAQKIQREYMPYGKILVVDDMEPNLYVAKGLMSPYGLSIDTALSGEKAIEKIKNGLVFDIIFMDHYMPEMDGMETTKAIRALGYKEPIIALTANALVGQAE

SEQ ID NO: 90341 - protein, 410 aa, Unknown
  Obtained from environmental sample
  misc_feature (1)..(410): Xaa is any amino acid
MRKTKIDASAFLLILIVLLLTGGVVFAASYLRSDPIVESLEEDRVINTLFVIEDKEKPLCSYVLMYYPATKRAAIFDIPGSLGLIIQRINRVDRIDRVYDPRKIASYADEMEKLLGIDIPFSIVITLENLGKITDLIEGVELFIPSPVDEFLDGHADGHAMEYIMFPSGITYLDGDKARAYITYELPEEGSEMAVYRRQRFFVGLIKRLGAQNGLLKNTQIAGVFHSFLKTGIKARALNALFEKFAGIDTDRINIQSVSGNVREVSGQQLIFPHWDGNLIKEIVRQTLASLVQPSSEAMGDRIFTVEILNGTTVNGLAGRTAELFGGFGYDVISIGNADRNDYENTVIINRTGLQDMVLAFGEVIRCSNVRSDSPTADDDEIDLNIQNLNYQADITLIIGKDFNGRYVTN

SEQ ID NO: 90342 - protein, 262 aa, Unknown
  Obtained from environmental sample
  misc_feature (1)..(262): Xaa is any amino acid
MGNFSNKAFLLSLIFLFFLGCAKDRQQTISEPAEEYVEETITFAEEQAAEEPAASFSIPIMEEEPVFAVIPPAARPGEPVTIAWSDKSISGTQTFYAELLDSRERRLAKSSFFDLDEDQGIKAAILAIPSTARIGEALVRIESGGGTIRDLPFAIEDRVFQSETIHLNQANTDLRTVPDPQKTLESEILWAIISRTGKEIYSDGLFTPPVTSKRRTSDYGDRRVYQYADGKTDTSIHAGVDCGVPTGTEVTACAAGKVVRQK

SEQ ID NO: 90343 - protein, 727 aa, Unknown
  Obtained from environmental sample
  misc_feature (1)..(727): Xaa is any amino acid
MNKKLISINKIICLFFVALCFLFITCNGPDNNNDDDNNNNNNNNNNNNNNNNNNNDDDDYENPNAGIVRELTFSNDSGLYSTQFSLTITAEGSEIYYTTDGSVPSPGKAGTIKYTAPITVKNRNGEANVLATEENSRNFYGEPGDRNNNMPEAYIPTQDQVPKATVIRVIAVDSSGKKSGVATKTYFIGNNLYGNTRIISLVSDPENLVSEDKGIMVRGKSTNRWEVGEPYNFQRKGADWERPAYLEIFEGNSRDKASLSAGVGIRVRGGWSRGLGQKSFSVYFKEQYGINNLKNYNLIPKDTTLGTTGAVKADGTPVATYKGFMLRNGANDIEYTKFYDVFIQDLLSDRSFSTQASIPCVVYLNGEYWGPYNFQERYSDNHTEYKYGVKKENVISVDNGELDDGNPGEESFFWNMVGMAKNDMSNPANYNAFCDLVDIDNFIDYWAAEIYVYNEDWPQNNYRMWRTRTVESGNPYGDTKWRYQMFDTEFSLGFYNDGELTGQSNKDAFDKILTAVGEENHANNRLFKALLKNPDFCRKFVNTMMDLYNVNFHPDNYGPKLDNYAAVYKPLMEGYYDRWGHPGDNGNGPLVYQNKTEGAKKYLNDIRPVMINNYLPKYFGGSYSGIANIGISGGNLRDVTLSAGVSGASIKINTTTPNLASGSWTGKYYSGNPITLTAIPPSGYVFDGWTVTGGVAATPSALTTTVNFTGNVQITARYKKADKIIRM

SEQ ID NO: 90344 - protein, 341 aa, Unknown
  Obtained from environmental sample
  DOMAIN (96)...(252): Radical SAM superfamily
  misc_feature (1)..(341): Xaa is any amino acid
MITSLEQLPPLLAASVSAEEKKYITETCGRGLLPFAVTEHFASLAGPEKDDPIRRQFFPDPREALRDPFALDDPLGEMLYRAAPQLVHQYRDRALLLAANTCAGYCRHCFRRFWLSAPPPLSAECLQPAFAYLAAHTEIRELLVSGGDPLTLDNADLEDLFRRLRSARPDLMLRVCTRVPITEPSRLDTHTIALFVNFHPLRVVVQINHPRELSAPTRAALAACVDAGIPVLVQTVLLRGINDDPELLAKLFRNCVDLGLSPYYLFQLDLAPGTAHFRVPLKRGLAIYRELGNLISGLGLPAYAVDLPGGGGKIRLHENVIAGEKNTPKGYVYILKDYNGK

SEQ ID NO: 90345 - protein, 611 aa, Unknown
  Obtained from environmental sample
  misc_feature (1)..(611): Xaa is any amino acid
LEEETNKVIHHLTARLPKDVLERLDVMGGIKEKLFNYFNQNYQNMFNRYMVTSEDEMVKKVRNFIDKEETKVLTRYTPKEIADLLDAVGGADKFNTGEVEKSVVNMYGHLQGHIQRGVNELETHTNSILRQKTDTGAFVRGENAYSIVKCAFKDNQIKPKTVSDVKLSVNILDSELISPIFHYQVTVEYLIKDLIAKHIIDTIDKLIEQVKDDRIDQGLEELSDGEIIFNKLNKVDTLTDDEIDDPKSKRYSVLAKKLMDKLADLRAEIDPESFDALNIRENIKKIIDMENIRNRGFNTAINSITAILDTSKMGYQYIENLKNGREVIIREYEDTDAEHLPDERYAIKLRYFDNAQLIEDRKAYDVMLKSFETEVQHLWDVLEVIYQDKKNFFKINDFDDLSRRNKNRIRKTIKEKTGEPLYEDIAKVWDEISFIKAAETEVEKSNRTYIWEKDRIRTRIILMRNKMKRMYDYLYPIERRVMTERLEWLEREYYRFDYMINPYHLQPGLLLDVDITSIKRKKVTLDAMANVLNEFLHGVSKGFSDAAFASFSRRRSTVREDINQSFATVSEEEEEPAVAAAAPKPRQAAIAAPKSSAKKPAPKKKGVVDSK

SEQ ID NO: 90346 - protein, 340 aa, Unknown
  Obtained from environmental sample
  misc_feature (1)..(340): Xaa is any amino acid
MAENANLEILSTRAGFNSAVRHIKKTMDIASKTNANLGDIIFELDDEELTSGKSGLLLRMLLVDKLGYKSASTNLSSTVNDLSGLAKEFGKWNGVDLVAAYFHPEMGLLIANPKVAEELAGFGQLNKRELLVVYAGFQGKETDENCQKAADLALRLFEGSRVTAPSSLTRGKFTVKKVSKPKKVSETETVKKVKAKTTSKGKTPAKRAAAETPAPTVKKAATIVQKSSGGPARMTPRYAVIVQNELFHNGNVEAWKRIIASYKAKHPSLEVFIYYEQERILDINSLFKWGKVKHGSAIEFAVAGNDIQDVAKLQRYLAQGASHQFEAFLRGPVNTVLKLF

SEQ ID NO: 90347 - protein, 201 aa, Unknown
  Obtained from environmental sample
  misc_feature (1)..(201): Xaa is any amino acid
GNLAAPKATARPVETSDVAYRNLFDAYHQGKLPFAQGYIVSSFFSETSNYGIYEVVSYAGVKEIFLTETGLQFVTGGKKLYILVEPDTYQIKFQEPVSRAEGEKIPKRFAELEIITAKNQTKIMIAKEPNESYGSFTILKPSGINFAVVFYQLPEIYKSLSDFFVESLNRQRKVPEHDAKAAAQKVTEILKKYMSFEGEYR

SEQ ID NO: 90348 - protein, 412 aa, Unknown
  Obtained from environmental sample
  misc_feature (1)..(412): Xaa is any amino acid
MYKQAVFNISYALEFVDEDEKTEELCQMAVKQDGETLEFVPEKFKTAKLCLEAVKNDKWAFEFVPEKLKTKELCAEAVKKEHSMLKFVPEALKTKKLCIIALSPENKETLVDSKEGIHCPLAYVPHKFITKKLCLDAVTNDSEALKFLPDKFKIPKIYLAAVKEYGWALEHVPEELKTYKLCLAAVKEHGRALEFVPEKYKTAELLDAALKDDGSALEFVPEEYKSRKVCLAAIKNDWQGIAIKYVPARLLTKKFYRKAFSLNASVFEHIPKEFITRRMCEKAIRESEYTFRDVPAEFRTKKFISKIIKNLGLFLSDIDESQKTEQLCLSAVKNHGGALKYVPYQLRTPELCLEAVKNYGWALEFVPGKLKTKELCFTAVNKAGEALTFVDAGILTKEEYDELYRLALEKRR

SEQ ID NO: 90349 - protein, 464 aa, Unknown
  Obtained from environmental sample
  DOMAIN (1)...(461): Urocanase
  misc_feature (1)..(464): Xaa is any amino acid
VANSNLVRKWANWEHFNELDRRGLFMYGQMTAGSWIYIGTQGIVQGTFETFAEAGRQHFGGDLGGRWILTAGLGGMGGAQPLAATFAGAVSLCVECQQASIDFRLRTRYVDVQAKDLDHAIELVKAHTAKRDAVSIALLGNAAEVLPRLVERVKAGSVGIPDIVTDQTSAHDLVHGYLPVGWSVEQWKDAQLDMARHAEIAREAGKSCALHVRAMLDFKAMGSKVVDYGNNIRQVAKDNGVSDAFDFPGFVPAYIRPLFCEGKGPFRWVALSGDPEDIYKTDAKLKELFPQNQHVHRWLDMARERIAFQGLPARICWLGLGERHLAGLAFNEMVKSGELNAPIVIGRDHLDTGSVASPNRETEGMKDGTDAVSDWPLLNAMLNVAGGATWVSFHHGGGVGMGYSQHSGVVIVADGTDAAAARLGRVLWNDCGTGVMRHADAGYELAIKTAKEKGLKLPMVGAGL

SEQ ID NO: 90350 - protein, 216 aa, Unknown
  Obtained from environmental sample
  DOMAIN (28)...(213): SPFH domain / Band 7 family
  misc_feature (1)..(216): Xaa is any amino acid
MYTFNAYAVAVVALVILVFTTMMFLASRYKRCPSDKILVVFGKVGAGQSAKCIHGGGVLVWPLIQDYSYMSLRPMTISIPLQKALSMQNIRINVPSTFTVGISTEQEIMTSAAERLLNLSGTNIEEMAKEIIFGQLRLTVASLTIEQINQDRESFLSSIRKNVEPELKKIGLYLINVNITDITDESGYIDSIGKKAAAEAINQAKIDVAEQEKFGA

SEQ ID NO: 90351 - protein, 401 aa, Unknown
  Obtained from environmental sample
  DOMAIN (1)...(225): Subtilase family
  misc_feature (1)..(401): Xaa is any amino acid
ALHNNAKGLFGVMDAKRASLYGYDCSAAENGIYSSDIIAGLGWTVANGAKAVNFSIGFKNGTSYSSSQDALYSSAMRNLLDMGYNYVVVHSAGNGTMDTSRNSVFAHVFYSALRQRIITVGAVDSSFQMASFTNYGPMVDVVAPGVNVYSSIATSDSSYTNYEGTSMAAPHVTGLAGLVWSADPGLTGPKVKQAIVESAKESGRAIQDTRSAVPSGERRTYYFVNAKAAVDKVTGGASVPVTGVTLSPTTMSLSVGGATGSLTATIAPSNATNQNLTWSVNPPTGVVTLSGTGASRTVTAVAAGTATITVTTQDGNRTATCAVTVAAASVPVTGVTLSPTTMSLSVGGATGSLTATIAPSNATNQNLTWSVNPPTGVVTLSGTGASRIVTAVARRHATITV

SEQ ID NO: 90352 - protein, 650 aa, Unknown
  Obtained from environmental sample
  DOMAIN (433)...(544): Toprim domain
  misc_feature (1)..(650): Xaa is any amino acid
MSQEKNYSAQNITALKGLEPVRMRPGMYIGTTGIDGLHHLVYEVVDNSVDEAMQGFCTNILVVLEENDIVRVEDNGRGIPVDIHPTEKVSALELVMTRLHAGGKFDKKSYKVSGGLHGVGVSVVNALSEWCEAFVHLDGKVYTQRYKIGVPEKPVKEIDPKGLPYRHSPDRQGTVIRWKADSIIFETTTYNFDALSNRLRELAFLNRGLKITIRDERLTTPKEHDFMFEGGVKSFVEYLNENKTVLYKEPVYLEGSRDDGAGGNIEIECAVQYNDGFNEIMFSFVNDINTREGGTHLVGFKSALTRTLNEFLKKSKHAKKLEESLSGDDVREGLTAVLSVKVPNPQFEGQTKGKLGNSEVKGIVESFINEQLEIFFDKHPEVINNILEKSVLAAKARIAARQARDATRRKNAMDSAGLPGKLADCSEKDPAKCELFIVEGDSAGGSAKGGRDRRTQAILPLWGKMLNVEKQRIEKVITNDKLQPIIASIGAGCGNDFDVSKIRYHKIIIMADADVDGSHIRTLLLTFFYRYMTPLIEQGHVYLAMPPLYKVSYDKKSFYAYDDAEKDRILSESGKDAEKVSVQRYKGLGEMNPDQLCDTTMDPGKRNIIQVHLDDTVEAERIFTTLMGEVVQPRREFIEENALLVSNLDV

SEQ ID NO: 90353 - protein, 317 aa, Unknown
  Obtained from environmental sample
  DOMAIN (156)...(236): Cache domain
  misc_feature (1)..(317): Xaa is any amino acid
LRSFLEKFKILNSFRAQIIIVLAVILIISFSTFLFFSNIEHEHLSEEVEKALNYTENEILMTFKEPEVFLISYSETIRSMIIGGYAYDTLPAYISSINGFLAKHLNQEGLIGLHGFFNSLNDKYIPCGNMTVPKNFNPKETEWYKLAEAAKGKTAVSKLYTSPFHSINVLTFSRVIFDDKGLPLGVVCLDLDLKKLTGIIFNFKITENSYGFLLNDKMEVIVHPAFFSIDDKTVNIDIGLSVIIPDLERGLNFSPYKTKNYMYVDSVIYFKDIIRGWRLGIVIPEKEYYENFPKIAAALIIGGLLLAALLCFILYHI

SEQ ID NO: 90354 - protein, 356 aa, Unknown
  Obtained from environmental sample
  DOMAIN (40)...(209): Transglycosylase
  misc_feature (1)..(356): Xaa is any amino acid
VRILKYVTRKRLIIAGALLVLLLAFIFSLPRPLFNVPYSPVLFDREGNLLGAQVASDDQWRFPGTNKVNEKFALALIETEDRRFRRHFGVDPLAIARAAYQNIRGKRVISGGSTITMQTIRLARGARKRTLFEKLIEAYLAFRLEAGRSKNKILALYAANAPFGANVVGLEAAAWRWFGRGSNDLSWAEAAVLATLPNSPALIHPGRNRETLKAKRDSLLNKLFKKGYFDEETLSLSVAEPLPGEPLPLPRLAPHLLDRLVFEAAKKSSLKKSAAFVTTINRDIQLRVTDILNRASERFALNGIFNGACVVLNTQTGEIAAYVGNTNTLHAPDVDIASSRRSSGSLLKPFLYAAML

SEQ ID NO: 90355 - protein, 1045 aa, Unknown
  Obtained from environmental sample
  DOMAIN (177)...(326): Alpha-2-macroglobulin family N-terminal region
  misc_feature (1)..(1045): Xaa is any amino acid
MNFNPGSAVPGKVTTRFLTRVFEPSGASSSEQVSKEYSPFSRYVGIKLPKGDTARGMLLTDTDHKAEIVLLDEDGKPFQGNVELDCAIYKINWRWWWEKGDEESAEFASSLSRSAISQQTVTAANGKAIFNFNIKYPDWGRYIVTARDSKGGHAAAQIVYIDWPGWAGRAQDGGQGSQSMLTLTAGKQTYNTGEKAQISFPSNKDAAALIVLEKGGNVLKSEWVTCQEGTTKYEFVAEPAMVPNIYVHITLVQPHLQTQNDLPIRLYGITPVMIEDTRVVINPQIKTQDNWQAESKVSFTVSELNGRPMAYTVAVVDEGLLGLTRFNLPNPKNTFYARDASFIKSWDLFQEVIGAYSGKLETLLAIGGGDDDEEIDPEKETQRFKPVVRFFGPFEIAKGSQKTETFDLPPYIGAVRIMVLAASSTSEPTGKALRGYGTAQTTVKVTSDLMVFASLPRVLSPGDNFEVPVYVNAQKDGKRSVKVNLSAPGAAIQGASSQDVSFDKSEEKLIRFKVKAPDKPGSIKFTVTAESAGLKTAQQVVDIEVRSTAIPVTKSLQTLISAGGTWKGNLEYPGRDGTNTLVASFSKLPPLNLESRLEYLIKYPHGCAEQTTSGSFPQLYLDKVLSLDDKQKADIRTNVNGGIERVLGMQLMSGGFSYWPGESVVNDWCSSYIGHFLLEARRLGYEVRTTAIKSWVNYQKNAAAQWQSSDSKFTEQAYRLYTLALAGETDLGSMNRLRSHKLPVQASWRLAAAYWLAGQRDTARNMIKGLTLPEGNYRELSATFGSNLRDKAMILETLILLNSPEEVGRTKQLFEEITNTLSQDKWLSTQETAYALIALVPYMTGNAGSGALTLDYTAAGKTGNISFSSPAAERQLGNVSGASSALSVTNRSSSPVYVRFTAKGLPVEGKEPALSEGLSLNVEYRDARSNVIAPENLKLGEDMVISVSVRNTFTQPVEEAALIVPLPASWEIVNTRVGGSSSSSNFRYQDIRDDRVMTYFNLKRGEERTIDFRVNKAYEGSFFRPAIHVYAMYDESIRALIPGSR

SEQ ID NO: 90356 - protein, 325 aa, Unknown
  Obtained from environmental sample
  DOMAIN (109)...(324): Binding-protein-dependent transport system inner membrane component
  misc_feature (1)..(325): Xaa is any amino acid
MYITNRLVTMAVMLFLLGLAVFALMALAPGDIVDQIMLQQLMGSSEGKGGRDNKNFSAEQLAAYRAEFGLDKPFYVQYFRWLNRVIVHHDLGVSLISRAPVSFLIASRLLNSLLLNVISLVLITVFSFALGVYFSTKAGTKTDLAVTFIALALHAFPGLLLLILLQLFASVTGLFPVTAYPPFPFSEAPVKFIFSYAHHIFLPLLAAFLGGIGGTLRMIRATMLDQLGQPYITSLRARGIAEWRIYFAHAFRNTLNPYITGSANLLAGLFSGSLILEIIFAYPGIGRLMYEAVIQQDINLVLANIMFISFLVLVGMALADIFSLW

SEQ ID NO: 90357 - protein, 294 aa, Unknown
  Obtained from environmental sample
  misc_feature (1)..(294): Xaa is any amino acid
MDIEINDIIGDLSRNYNVYFSFDEIFDLPEDSYRSKDFDFPERKTYEEYLQLINKNFERKNQVIMPCNDLNLDNYSKDYKDALYELIEECEEHERNTRSTADDIDRRVKKIKYRWEQVFQNILAAKTTEITAGFRYRTFEKANRRYIHTPDIILPVFIDRKVKISLAIIMDISGSMCDTVDKMYGVMKSIIDINDMEIDITVLEVNIEVENIIYRLDLKRETIKSKDGGGTDMGAGLRYIWETGMETDLVIVMTDSYTPWPDPPILANKTVVLTDCPEYYNGPYPMYPVVFGKL

SEQ ID NO: 90358 - protein, 491 aa, Unknown
  Obtained from environmental sample
  misc_feature (1)..(491): Xaa is any amino acid
MNEKQTITAYKLHIAPAKCALDLGDGSERGEYVNQDYILNVLDKPHRGINLMYCYYPLDKGWPARASTLAEPGKAGFAWNYAYDDYFPYQGGIGGNTNGEPFASMRDVRRHGQDVILTLTIDCAVSDEHLVQIAKELIPFGRLMLRINHEAAGTWFAFNKRYTYQQVADFYVRFHKIVKRHAPHINTILCIGGAHKTESGKLDYEDEFAGAIAEADMWSSDTYLSLHWGWPFDIAESGGKSHKRSINKDILEGLCFDFERFSARAGKPKPFVLSEINADGDVNGPYEQAEQLVDFYRRIPKEAPDITGITFYQFRDRGRLGLEIEDPNNSNVGVAQPFLEDYKKIMADSYYSPKMEQGEKLSLPVKLRWGSSEDADGITIPINFEDNPVFCEVMFSNSEDAEKLNAMMEINGKWFYKKPGVKSVDLAPAFFKNRLNGKQRLEFRLFAPPASGMNDPSQGEDWRINYYYTLNTIPEFRIRYEPTIRIDMEIL

SEQ ID NO: 90359 - protein, 205 aa, Unknown
  Obtained from environmental sample
  DOMAIN (8)...(31): 4Fe-4S binding domain
  misc_feature (1)..(205): Xaa is any amino acid
MSAAKAPVYTELAECHDCYKCIRKCPVKSIKVAKGQASILFDRCIYCGRCVTSCPAHAKQYRNDVEKVKLLLADGRKTAVSLAPSFVSEFTDWKPEELIAALKKLGFAIVSETALGADFLSAHNAHDLASGAAMHAASGKPPSIKLMISSACPVIVDYIKLYNPRLAPYISPHASPLLTHARFLRSAYGGESRAEIAVVFIGPCI

SEQ ID NO: 90360 - protein, 81 aa, Unknown
  Obtained from environmental sample
  misc_feature (1)..(81): Xaa is any amino acid
MDTITVCMGSSCFGKGNSANADYITRFIEEHNLQNSVEVSGCLCSNACARGPNIRINDKLISGISEQTLADIIVKELRLQL

SEQ ID NO: 90361 - protein, 414 aa, Unknown
  Obtained from environmental sample
  DOMAIN (1)...(414): Histidinol dehydrogenase
  misc_feature (1)..(414): Xaa is any amino acid
VKKIIEQVRANGDTAIRKYASKFDKSSPQRLEVPLTEAKCALNQLRKTTPALVNAMELAALHIKRFSEKQREQFTNFEFEMEPGLITGQRIIPVQKAAIYIPGGRFPLFSSVLMCMIPAFCSGVEEVILSSPPTVDGLPDKKILAAAMIASEITHNKNVRIFAMGGAQAIAALALGTDSVPRADVIAGPGNKFVVTAKKLLFGEVGIDFIAGPTDVLIIADGRSGDGDIEKTADLVAADMLGQSEHDPDARARALVPNKELAEKIAAAAERRLKTLPTEKTARASLDAGGLIIVYETQEDAIRIANTIAPEHLELQTADADNWIPKLKNYGSLFTGALSAEVLGDYSAGINHTLPTKTSARFTGGLSVRHFLKTVTTLRCAKGEGFEKARNAAETLARAEGLEGHAQSAAARKN

SEQ ID NO: 90362 - protein, 457 aa, Unknown
  Obtained from environmental sample
  DOMAIN (56)...(457): AMP-binding enzyme
  misc_feature (1)..(457): Xaa is any amino acid
MPVPYTEKPWEFLNDYRGKAFSGQWPTLPEMFKITVSRFPHRACFTIYEPNRISLDYTEALKVIEAVARWLHSNGIRRGDRVVVTGKNAPEWTVAYLAILFAGGVVVPIDYQLKNEEIDLLIKASGARMIFVDEERHEYYQSKAGLDKVLSLKKGVGTYIYDLDGPGAEIEQAVETDTAAILFTSGTMGIPKGVILTHKNLVSDCYLAQGTPLIVLHTDVFYAILPIHHSYTMLAVFIETISTGAEVVFGKRMVTTQILKDLKEAKITMLLGVPMLFNKVLAGILRGLKAKGPIVYGLISFLMGISGLIKKVFKVNPGKKMFGFVLDKASLTTIRICICGGGPLAPSIFRKYNQLGIDFVQGYGLTETSPIIAINPIEAYKETSVGRPCPGVDMKILNPDERGVGEVIVKGPMVMKGYYQLPEESAAAFTADGYLKTGDLGYMDNEHYLYLTGRAKT

SEQ ID NO: 90363 - protein, 225 aa, Unknown
  Obtained from environmental sample
  DOMAIN (3)...(224): Putative esterase
  misc_feature (1)..(225): Xaa is any amino acid
FYYTTANRKCNVYTPPGYDPNDTYPVLYLLHGIGGLHTEWMGGKPNEIISNLINSGQAKPMIVVMPNVRAMKNDSVPSDQISVEAVTAFHNFINDLRDDLMPFIKQNYSVSDRRDQTAIAGLSMGAMESLHIGCRMPETFGYVGSFSAAPAMPLTAAEMTIPDQYKENTFFMLCCGLQDGLISQTQNYNKNLNDNGVRTAYYTIPGGHDFNVWKNGLYYFARCIF

SEQ ID NO: 90364 - protein, 574 aa, Unknown
  Obtained from environmental sample
  DOMAIN (116)...(197): Cache domain
  misc_feature (1)..(574): Xaa is any amino acid
LQNNVKNAISQTEANIIADLKEPETILAGFSETIRGFILRGDNEKRVQEYIFFINNYMQENEKNRLLGVMGFYGYFDVFGKRYLTESLNWVPPAGYDLESRPWYIAAVEANGDIGVTAPYRNLRVGDLSVITFSRRIFDNEGNALGIICLDIKIDRVSQHAIKTQFAENGYGFLLSDSRDIIAHPEPSVIGTNFRNVRSTIASYEEELVENGYVNEVIATDYRGLKSIVFLERLENGWYMGVVTPSDKYYQSTRSIALFLTALGTALALILIIILGRISAEIREVTKKQADAEAQANQSKQSLSILTNILNGIDAQIYAVVPHTGEILFINDFMKKHFNLEGDCTGKLCYKLFLRDQDKLCDYCPCYRLDKDPHGTVVWEERNHFTNRIYRNTDRYIEWTDGRTAQIQHSVDITEIIDAKEHAEQSSRFKSQFLSHMSHEVRTPMNAILGITEIHLQNDTLSPDIQEAFGRIYNSGYLLLGIINDILDLSKIEAGKLELVPVNYDVSSLINDVVHLNIIRFDNKPISFDLQADEKIPLTLSGDELRIKQILNNLLSNAFKYTDSGKVSLSITVE

SEQ ID NO: 90365 - protein, 167 aa, Unknown
  Obtained from environmental sample
  misc_feature (1)..(167): Xaa is any amino acid
MNPQLSMIVADVFGVKFLSCFKNRLVEGFLDLIVRTPEYRYDRETFGDLSDFVLGKIRERDAFSFSGRTIHSVIKLSNEWHEFQRKEAEQAQLAASWKGLGIGRFRHETEEYVWTVTELRTAQDLVNEGRKMRNCVGGYADKCVSGSSAIFTVEQTHKVNQLTDKAA

SEQ ID NO: 90366 - protein, 338 aa, Unknown
  Obtained from environmental sample
  misc_feature (1)..(338): Xaa is any amino acid
MAFAKAERAQLYLRCALFGPSGSGKTMTALRMAKGIADKMGVPVAVIDTEAKSASKYADRFAFAVDNLEKKTIDYYLASMEEAKKAGYKVLVIDSLSHAWRELTEEVDRIAQSSASKNTFSPWAKVNPKQKRFIDAILNYPGHIIATMRSKTEWVVGEGKNGKTAPEKLGLAPEQGKGIEYEFDLLVELNQRHEAVVTKDRTGKFQDEVIEKPGEDFGIALYEWLASGKPEKPATTAAPAAKGASKPQKSQAVPEMPKPEKQGKSLSLKEQGSEIMKEIGVVITASKDGVPYFTEDEKEEARKVIKDTRLDENGITDLKDFKAFLSEELAKRESKKAA

SEQ ID NO: 90367 - protein, 166 aa, Unknown
  Obtained from environmental sample
  DOMAIN (1)...(79): Insertion element protein
  misc_feature (1)..(166): Xaa is any amino acid
MECTHCGSTGFKKNGVHKGVQRYQCSSCKQFFSDKVRKFSYHDKCRALDLYLNNIGVRKIAKFMKCSSSMIVRWIRDAAQNLKLQLSHTSECQNEIYTDIKKRLPGCCIDCLFSAKRQGYCVCDWRKNWSRAKDIQESQGAYQIHIAHLLRYKQLGISHNYQKTSS

SEQ ID NO: 90368 - protein, 620 aa, Unknown
  Obtained from environmental sample
  DOMAIN (1)...(410): UvrD/REP helicase
  misc_feature (1)..(620): Xaa is any amino acid
AAREMEQRVKELTGKKLQSLTVSTFHAFGLKIIKNECEVLGYRKNFSVYDETDKISLIKESLRECKMFSPKTDLYALSQYFSKIKTSLAKWTDDVTMQPVYDEYQQALKIYNSVDFDDLLTIPLELFEKHGDILDKYRKKYRYILVDEFQDTSLIQYKLLKFLAKDKNANICVVGDDDQSIYSWRGANYENLLMFEKDFPDRIEIKLEQNYRSTTTILDAANGVISHNTGRKDKNLWSPNTGGKPIELFFPENETHEADFIASQIKPLMIREDYKYHDFGVLTRTNALMRNIEEAFLAENIPYRVSGGTSFFQRKEIKDIISYLRVIANPDDDVSLLRIINTPRRGIGKTTIAMLNEIAKKNHVSLWDSLARLNYARSHGQQGLFQDKKAATELEEFSIMIEDFRALFLERQTQDGKPWSLSLCARTLVDNIDYWSYLVLEHGKDEKKARWKNSNIEYFIRMIDNWETDPDNFDSGLYDWLNRISLITRDDGEDDNKDKVNLMTIHAAKGLEFPVVFIAGAEEGLIPHEKSIGEDSEDEAGSIEEERRLFYVAITRAREKLYITSCQKRRTLQNTRECSPSPFIDEIPKELIKIHEPEKETVDEGSADRFMEQLKSILKD

SEQ ID NO: 90369 - protein, 418 aa, Unknown
  Obtained from environmental sample
  DOMAIN (7)...(304): Pyridine nucleotide-disulphide oxidoreductase
  misc_feature (1)..(418): Xaa is any amino acid
MKELQYDAVVIGAGAAGMAAALELDKQGFSTALIDREDHLGGILMQCIHNGFGLHEFNEELTGPEFAGRFIEQLASSDVTVYLDTTVTSLRSGSFGGKELFCVCPQGVLHISSRAVVLAMGCREQNRGNVRIPGSRPAGVYTAGLAQRLVNIDGYVPGKDVVIIGSGDIGLIMARRMSWIGCKVKAVVEIMPYPSGLTRNIVQCLGDFDIPLYLSCQTTSIFGNDRVEGVEVAPMENGIIVPEKKFRIDCDTVLLSVGLVPENELSREAGVELNATTGGPQVDSSLMTNVEGVFACGNVLHVHDLVDWVAQEARRAGIQAASWLKGISPATQIRIKAGSNVRYVNPGKLNPQGENKLFLRSMIIKNDAVLELKLDNQVFKTIRQNHVQPSEMISVTINPKDMEKIRFSTESVMEASIG

SEQ ID NO: 90370 - protein, 715 aa, Unknown
  Obtained from environmental sample
  DOMAIN (532)...(615): Hpt domain
  misc_feature (1)..(715): Xaa is any amino acid
LAKSLSPGETRTLTVPHGNLVISTVPQLKWYAIAYMPDSIDDYKTSMTALFLVVLVVILLIFIIFNVFVSDFLKSQHETMSSLELARNEAEIANRSKSNFLAAISHEIRTPMNAIIGIAQIQLQRENLPDDYATALRRIYGSANNQLGIVNDLLDMSKIDTGKMELNPVEYDTPSLISDTVQFNIVRIGSKRIDFAVDVDEKLPSKLYGDELRIKQILNNLLSNAIKYTDKGRVKLSVGYSADSDGVTLRFVVEDTGQGMKLQDKERLFSEYQRFNADANRAIEGIGLGLHITKKLVDMMDGTIDVESEYGKGSVFTVTVRQKAVESPAIGAEVVEQLRKFSFAGDRRVANLRIGRELMPYGSVLVVDDVATNLYVAEGLLSLYKLKVDMADSGVETVKRVEGGAVYDIIFMDHMMPGMDGIETTQKLRGLGYTGVIVALTANALVGNDEMFKQKGFDGFIPKPIDVSQLDGILNKFVRDRHPEEVKKHAAETTGQGDRHQGINQHHGVNQTQHAAVAVKRSKHVNYAMNPKLLKFFCKDVEKAIVTLRETVKNGDIKRFTITAHGMKSALANVGEDDASGLAAALESVGRSGDMGYITANVDEFVQTLESLMDKYGRVINTAAGAEKSDNSVVAEDTNYLMEQLRIIKSACENYDDDAVYAALNRLKEERWKPSTTESLEKIREALYVSSDFEGAAKLSEMLINPLKSNSLKSF

SEQ ID NO: 90371 - protein, 418 aa, Unknown
  Obtained from environmental sample
  misc_feature (1)..(418): Xaa is any amino acid
MADSAFTAVASRTAMAFGSREYVWAGSRTGVMRFNGKIWERGEAYIAEEGESLRSVTLRYFDVDHKDIVDSALWEIRRENKLGMKRYEQLVTLLTPYAAAIKDAFAVAESVPDEPAAVPVSEPAESVSDSTAEPASDAVAEAPSETADSVSMTEPKPSESKSEPEPPKLSMPKAASHAFSVNDYARMLILLPPDESVSSNIAENLLPKSMDEQTRKDLADRITEILGSEDRGIADVTELRIPFTVAVRDSVTVMALDAAERLWVGTVSGLWRHSNGKWRRYTAVADDEDGVLPSERVTAVAVSATGSVAVGTDNGLAVMKDLEWRKLTVEDGLPDSYVTSLAFVGEKLHIGTNKGLVVKSEDNSVAVFDTSSGLLSLGVMALFADSKGRLWIGGDNGITIYTPSVRMWTRYKFPGSTV

SEQ ID NO: 90372 - protein, 264 aa, Unknown
  Obtained from environmental sample
  misc_feature (1)..(264): Xaa is any amino acid
MNENMEDFAGQFDTYIRARVTLIVIVTQEEERAIENVKTVCEKKNRNCLAWDASDGFTVLAGRTSIDLKCKDPLVALELIEKNVLEDNGDIFICKDFHEFWVSPPVKRKLRSIAQKLTKTRTSIVITTPTSQIPDELKDEAVLTRLSRPNFEELDNVLDALLKGSNVKISLTDAGREKVVQAAGGMTTGQARRVFSKAIVTYNCLDERSIAMIGEEKAELVRQSEALEFLTAVEQPENVGGLGVLKDWLRLREKAFTKDAREYG

SEQ ID NO: 90373 - protein, 168 aa, Unknown
  Obtained from environmental sample
  DOMAIN (55)...(168): Methyltransferase small domain
  misc_feature (1)..(168): Xaa is any amino acid
LNFDRPLSEQELAKLRPMVARRAKREPLQHIIGSVSFRGHEIKCDKRALIPRHETELILDILMDSKIPAFSGVSAKQTGCAVEILDIGTGTGAIAIAAALELNAKVLATDVSKEALELAKENVALHGLENKISLIHSDLLSDVPSDVKFDALLANLPYIPLSDESKLQ

SEQ ID NO: 90374 - protein, 369 aa, Unknown
  Obtained from environmental sample
  misc_feature (1)..(369): Xaa is any amino acid
LSVYPESQPTYLELVKNGAVETFMKTGALVREAFCGPCFGAGDTPANNELSIRHVTRNFPNREGSKPNDGQIASVALMDARSIAATAVNGGKITAATEINVKYGKYKFFFDKTIYDKRVYNGAGSSNPQAELTFGPNIKDWPQMPALPENLLIKVVSFITDAVTTTDELIPSGETSSYRSNPLKLAEFTLSRKDPSYVKRAKEVQALEEQRGKGTTDGELQDILRKIQGIAGCSGLGLANIGIGSAVFARKPGDGSAREQAASCQRVLGASANFALEYATKRYRSNLINWGILPFIITDETAIGLNSWVFFPNLQKQVREKAPAIKGYVLGDKPSEIAVTLGDLTDTERRILLDGCLINFYRGEVIGNR

SEQ ID NO: 90375 - protein, 116 aa, Unknown
  Obtained from environmental sample
  DOMAIN (2)...(87): Thioesterase superfamily
  misc_feature (1)..(116): Xaa is any amino acid
SYGHVNNANYLNYLEFARYEYLKDIGFDYVRAVDKGYGLFIARIEIDYKRPAITDDVLTIKTWPIKKGAVSGTMAQKISRGDEIMIEAAVTWAFVNAKTGLPVKIPPEWDLPGLNP

SEQ ID NO: 90376 - protein, 698 aa, Unknown
  Obtained from environmental sample
  DOMAIN (535)...(610): Hpt domain
  misc_feature (1)..(698): Xaa is any amino acid
MASLFGKQVEDILGKDDIAALGLPSETAAIAAESDLKVMNEQKRIVYEEWVPCADGVKRIFETVKSPLILDGDVVGIMAIGRDITRRKEMEEEAMAANRAKSSFLANMSHELRTPLNVVIGLTDLTLEEDLQDNVKDNLAKISNAGTTLLSIVNDILDFSKIESGKLTLSPVEYYMSSILNDIITLVLTRLGEKPITFKLNIKDDLPNQLRGDDLRVKQILTNLLTNAIKYSREGSIELIVRSTREGDSVWLDVAVSDTGMGIPKEDIGSLFLDYYQVSAKSNRNIEGTGLGLPITKRLVEMMDGEIGVESEHGKGSTFSFRIKQGYVNDTVLGAEVSEKLRKFNFSDDRRIVSRKIVRVNLSYARVLVVDDMQTNLDVASGILRKYQMKVDVLTNGHAAIDRIKSGNPVYDLVFMDHMMPGMDGIETVDKIRALGTEYAKKIPIIALTANAIQGTDKMFYEHDFQAFVTKPIDVMEMDTVLRKWVRDAARDEVVIDDKLTEIELLIEKLVIEIPGVDTKKGLSLYAGAKKIYLPMLRSYAHNTPKVLEKLRSVSAENLHDYVITVHGLKGTSAAIGAEQIRTAALELENLSRGGDLQGVLAKNDKLIADTEIVVANVQQWLDKNDIHEKKPRLKAPDKELFVKLRESCESYDMDAVEDVMKELEKNEYDEEGELVTWIREKIDMSKLGDVAKKLKDL

SEQ ID NO: 90377 - protein, 278 aa, Unknown
  Obtained from environmental sample
  DOMAIN (146)...(278): Stage II sporulation protein E (SpoIIE)
  misc_feature (1)..(278): Xaa is any amino acid
MRYRLRYKLAFCTISLVLLVDLLVSAPLFFMLIRGHQEAPLKAMFIISAAALALGMCGALIMSSLLLRPIRKIINELTQELARATVSVSDLNIGKEIQKKFIPLDVDEKGNKLNTGYKDAKNAVFFGYYKGVKGLSGDYFDYLDLDGRYYAVIKCDIAGSGIPASLIMMQVATMFINFFNKWQPSARLEELVYQINGFIETMGFKGRFAAFTLCLFDSETGELRFCNAGDNIIHIYDASEKDVKSITLPQTPAAGALPNRVVESKGGYREQTLSLDHG

SEQ ID NO: 90378 - protein, 391 aa, Unknown
  Obtained from environmental sample
  DOMAIN (1)...(287): Glycosyl hydrolase family 57
  misc_feature (1)..(391): Xaa is any amino acid
ALDHYWKKGRIELIAAPATNAFIPFLCRFPEAVRAQIETALLFYRHTLGISPRGFWPGELGWTNDMSSYLYSYGLNYTIVNSHGLLFGKPPPSRGTFYPVKTEEGLFVLACDYNASALVEGMRKKGLYRDNSRDAVDEPENEENNPFIAKNGEKYHSGYKYRQIGSDSLYDPAAAKLCAQEQARELLESLSGRLASAASYMKETPISLCAFNADSFGRQWHGGDHFIESLFRLAADYKELQFMTPSEYLFQQPISALEVSHPEFSSWGDNGYAEQWLDSSNDWIYRHINHSIERMVELADRFTEDSSLKERALNQAAREILLAQTSDWPALIYREESAEYAKKQIESALQNFTIIYESLGRSHISAEWLTSLERRHNVFPNINYRVFRSRR

SEQ ID NO: 90379 - protein, 610 aa, Unknown
  Obtained from environmental sample
  DOMAIN (105)...(245): Thiamine pyrophosphate enzyme, C-terminal TPP binding domain
  misc_feature (1)..(610): Xaa is any amino acid
MDIKALEKTALSVRALSIDAIEKANSGHPGLPLGAAELGAILYGELLRHDPSDPAWADRDRFILSAGHGSMFLYSLLHLSGYKDMTLEQIKNFRQLGSRAAGHPEYGMAAGIEATSGPLGQGLAMAVGMAVAETMLAARFNTPSRKIVDHYTYALCGDGCLMEGVASEASSFAGHNGLGKLIVFYDSNKITIDGSTDIAFTEDVAKRYEAYGWQVLRGSMYNFEEIAKLTAQAKAETKKPSIIILTSIIGKGAPNKQNKADIHGAPLGADEVKAARVNLGITGDFYIAPEAQAYFSAKQTEWKKAHADWQSLFDAWSKENPEKRKEWDKFYSLAVAAPASLPSFNIGDKIATRAAGNKTLGAFALANANLVGGSADLKGPNAVGLPAAAGTWTRDNLTGQYIHFGIREFAMAAICNGISLHGGLRPYCSTFMVFSDYLRPALRLSALMKQPVIYVLTHDSILVGEDGPTHQPIEHIASMRAMPGLLVLRPGDAEECAEAWAMAMEYKKGPVVLALSRQNITVFPKADPDWRNTMRVGAYIAKQVEGSDPEIVIIATGSEVNTALDAAAKAADKKIRVVSMIGKELFESQPAAIRDAMIPPARGYSLRGGG

SEQ ID NO: 90380 - protein, 486 aa, Unknown
  Obtained from environmental sample
  DOMAIN (313)...(475): Plasmid pRiA4b ORF-3-like protein
  misc_feature (1)..(486): Xaa is any amino acid
AAFVPGDRFIVRTRDWKEAHFDLEKVGKDAWPQIELDAWFEAAESGFADSFSKLGPGSSTEEQIAFAYWYGGERMRNVPAYSLEEFLFEKTDSIENAVYGIASRFWFAGKDIPDSKRLLGIAVPPDRTYFEDILVRAGVPVSEYVLSSYARDALFRNEKDINLVMDRIIPPVIAMKDQEWNDIADYVEDTIEELRERYTLFLDQGMGPIRQRVGELHAAVVELAARLQKGEMDISWLPKHTFIMLSQIQGHAAHLLEDLDTNEAPPESELEAMDNSLDGMIDTFTDIKEMIDYDMNSFRRSNLMLVRGKDGDVSEIWRTMQICIGGTDVWRRVLVPREWKLSDLHKLIQITLDWNDSYRHHFFLEGSGKSGLEILDDKMKIQEICDQGINELQYEYGAKWNIKVIILSPYQPEKKEAVRCVAGEGASPPEKIGGPLRFRKILSAIEGGSEMEKQTALHELGREFDSELFDIEKCNRKIEAVYSVDV

SEQ ID NO: 90381 - protein, 165 aa, Unknown
  Obtained from environmental sample
  DOMAIN (67)...(143): RNA polymerase Rpb2, domain 7
  misc_feature (1)..(165): Xaa is any amino acid
EIGGAARGVQTTLYDGRTGEPFKNPVMVGCMYMLKLHHLVDDKMHARSTGPYSLVTQQPLGGKAQFGGQRLGEMEVWALEAYGAANTLQELLTIKSDDMTGRAKIYESIVKGEPSTAAGVPESFNVLVQELRGLALDISIRDSKGKAIPLTERDEELINRQGSNF

SEQ ID NO: 90382 - protein, 315 aa, Unknown
  Obtained from environmental sample
  DOMAIN (11)...(315): Periplasmic solute binding protein family
  misc_feature (1)..(315): Xaa is any amino acid
MKRLYIFPAWVLIFSSTIFSGGCLRTKPAKENGKINVTSVIFPSYDFVRAIAGDRVNLIMLLPPGSEAHSYEPTPQNIITIKNSSLLIYPGGENSDWVERILDSISNVSENMIVLNMLDLVDAVEEEIVEGMEEKEEEEPAYDEHVWTSPQNAKVIIAAITEALCELDNTNADFYRQNAAAYFAQLDELDASFKAVVDGAKRKTIIFGDRFPFRYLADAYGLQYFAAFPGCSTDTEPSAATVAFLINKVRSEKLPVIFHIELSNEKMADTISEATGAKKLLLHSCHNLTKNNFEKGITYLDVQKANVVNLKEALW

SEQ ID NO: 90383 - protein, 195 aa, Unknown
  Obtained from environmental sample
  DOMAIN (28)...(195): ABC transporter
  misc_feature (1)..(195): Xaa is any amino acid
MLITCQNVSFGYEGQPVVRGLSFSLEQGDYLWVVGENGSGKTTLIKGLLKLLNPMEGSVFFSDELRQGKTGYLSQQSAGKKDFPAGVSEVVLSGNLSNMGLRPFYNARERRAAKEAMKHLGIESLSQKCYGELSGGQQRRVLLARALVSAHAENASDKSESLKHSLLVLDEPTAGLDPLVTGEVYELLKTLNQAR

SEQ ID NO: 90384 - protein, 400 aa, Unknown
  Obtained from environmental sample
  DOMAIN (1)...(400): Bacteriophage Mu tail sheath protein (GpL)
  misc_feature (1)..(400): Xaa is any amino acid
VLPIPEPEAGTAWKKRFAVSASNAEPGAVGIVINGQLFEAAVTAGADAQAVAAAIVARINSELTLPVTAEVDAENPEFLIVTCNVKGTVGNGNSVGMESTAPGVSVEEGATTAGTGVTNIKPFLTGLGETRYNFFASDFSDAGSIKYSSDELESRFEAMRQIGGRMYIALTGALGSKTEAGSMLYKAGDVNSPHIVLLPRGGNPDLPCAWAAAWCASACRILADDPAANTYDTKVTGLIGGQDFSFWERQKLLEAGIATYRLDTTGNVLIERLVTSYTENTDGGRDTSYLDVQVPETVDAVRTYINAEAKKRFKTWKLAGTEENFGSGSKVMTPGVFRSFLAELYSEVFIKEKQWCQDFENYKKSILVEVKKGSKTRLEYLHQPNLIGQFYIGAGLLQFK

SEQ ID NO: 90385 - protein, 330 aa, Unknown
  Obtained from environmental sample
  misc_feature (1)..(330): Xaa is any amino acid
VAEEIKAGVELNLKDLFSAGMSKAAGAASVFAQKTLGAVEKIDQAISGTAAKLAALGLTLSVGAAAKGIIELDHRMTRLGLSVNASAEQVSKLKNAIFDAAQAPDVKIDPTNLLNGIDAIISGTHDLKYAEDNIRNVALAIQATGESGDSIGAIFTEFKKFGYTSEQITSLMDDMVAQSNEGAFSLGNFAKVAPQIFSVYQNIGTAPENIRKANAALQILNAGMKSPEKAVSAFSAAMNELANPEMQNKLRRLRINVRDPETKKLRDFNDIMFDIVAKADELGSTNIFERIFSASTMQAMRSYMAHGERMIGSLTDLGDTAGLLQKPVCR

SEQ ID NO: 90386 - protein, 722 aa, Unknown
  Obtained from environmental sample
  DOMAIN (224)...(516): Glycosyl hydrolases family 2, TIM barrel domain
  misc_feature (1)..(722): Xaa is any amino acid
MQGFFVWKSTGWYRKELILPDTSDKEIFLYFGCAYRNATIYVNGKKAGSHAYGYTSFELCVSLLVKPGKNLLAIRLDHGSSVPDRWYSGAGLFRDIYLRVTPKLHFTTWGLGVKAVVQSEAKGNALIKVTAEIANTATEGGDSFLRLAVKDPLTDPKANYVTTVEIPFKFSPKSKTLVEHSFQIKNPSLWSDKNPKLYRLSASIGRENVGVRELSFGIRDIKMIAKKGFFVNGENVKLKGVCLHHDCGILGAAFYSEAWRRRLLILKGLGCNAIRTSHNPPAEEFLDLCDELGFYVIDECFDKWKSLSYGEIFEKNWKKDLTDFINRDRNHPSVFCWSVGNELEKQGTPEMIETGKTLCKFVRTLDDRPVTLALSPHVTELTPRDLVGAPPEKHVEITARIAEFVDVLGLNYHEPWYPYYTKAIDKPIIGTECYEYYSGTLHSYEDYDRKNPWRYVLEDDNVLGQFIWAGIDYLGEANWPSKGWAGSSLDICGFYKDEAWLRKSYWSEEPVAHICFYDNTLPNNYARGRWNFPYTASHLNLDSLQRRVVSAAVYTNCEEVELWINDKKVGRRKLEDFRNNIIDWPFDYTPGEIKLIGFRNGKEVVVQEIKTSGPPAIISLKADKTTLEPGTLAHIEINITDEAGIPNPAENLLIGFSLAGDGDIMGASSPSLNNCLGFDLPRVYTSFGRALAIIKAGDSAGELVFSAYGEGLKTGTLKFTVG

SEQ ID NO: 90387 - protein, 433 aa, Unknown
  Obtained from environmental sample
  DOMAIN (414)...(433): SEC-C motif
  misc_feature (1)..(433): Xaa is any amino acid
VNYYELLNIERGADTNEIKRAYFSAVKLHSPDSDPEGFKAIRIAYETLYDPKKRTEYDTYFVTSGDVQNDLLAARELIRENKYKQASESLAELSGKNPDSTDVKRLLAEVLWYIKKSGTADKICAELLEKNQSDYETLLLRAKIAESMRHIDKANNYYNDAVNADPLNPKAWIAYMQYALSNAHWQISDIFYRAMEQDINMFRDEYIMYIVGAHETNLFNSEKYPEYYDKFAEFYINDKNPEEDVYPHLMALIPLLLEKKELIPFVEKILPTLEKSKQYEDKDEKSFVYIRMTIKLFKLQSDKRIHGVLNDLTVFLFYDEKNKNEQLGMEIYIVYNLTMLRPSIKVLMHEYPELFKLNQAFYLDALNEKKEDYLLDKYIAIHKKIKPGYNFYYDGDEDAEDVTPIKRESPKIGRNAPCPCGSGKKYKKCCGAK

SEQ ID NO: 90388 - protein, 120 aa, Unknown
  Obtained from environmental sample
  misc_feature (1)..(120): Xaa is any amino acid
SARERKPKEPSSSLVHEAIVSLDYQLDDYSDWSSWRWIDFLNPPVEGRHWQADPRFFQNAASRYLYNLARHNFRINPSSLDTIFCFIKLKQFEEDILTSSAEGLGIGMPVKETLSMLGVE

SEQ ID NO: 90389 - protein, 342 aa, Unknown
  Obtained from environmental sample
  misc_feature (1)..(342): Xaa is any amino acid
MGSLRPRKMKEIELTVLSRDIDAVIEFMGHRSLMHLTFGSEGSSLAEKALPKSIQDNLEKLSSSALWLGVTLPTEPWESSRLPGDAEEKLINTIVTAVSSLIKRENDQRDEKHKVEEALNEAKAFANLNAPFSDLDQLSYLTLRVGRLDAHRHEELRESLEGRAVVIPLGSGDRVLAAASRKGRFALDSELKRMDFTPIDIPEGYNGIPPELLMGLEEKLKGTAKKLEEINESKNKLRDEYGLTLQSLAASYLMAGITEKLKASLRSTRNVYLLSGWVPADMVHTLVTELEKLTDGRIAVRSYNPEEIERVKEGREKVPVSLDHGALVKGFENVVFSYGSPL

SEQ ID NO: 90390 - protein, 521 aa, Unknown
  Obtained from environmental sample
  DOMAIN (5)...(111): Ferrous iron transport protein B
  misc_feature (1)..(521): Xaa is any amino acid
KAEQIAHIEQDIRRLEMDMDDDCESIITAERYAYVDSIIRDCIDIKNKGALDVSDKIDKVLTNRILALPIFALVMFIVYFVSVTTVGSIATGWANDGVFGDGWRLFGIGSSAYENAVGKFADGAITEKPDPSDFGVWVPGVPVLLGKILEAVNCADWLRNLIIDGILKGVGAVLGFVPQMFILFMFLAFLEACGYMARIAFIMDRIFRNFGLSGKSFIPILIGTGCSVPGIMASRTIENDRDRKMTVITTSFIPCSAKLPIIALIAGALFGGAWWVAPSAYFVGIAAIICSGIILKKTKLFAGEVAPFVMELPAYHWPTAANILRSMWERGWSFIKKAGTIVLLATICVWFASDFGWGKDGFGMVDMSESILAKIGGAIAPLFAPLGWGSWQAAVAAITGVIAKENVVGTFGILYNAGSDAETWSALRGGFSGLAAYSFLVFNLLCAPCVAAMGAIRREMNNAKWFFAAIGYQCGLAYIVSLCVYQFGTLFSSGRFGVGTVAAFLLTGGTLYLLFRPAARK

SEQ ID NO: 90391 - protein, 294 aa, Unknown
  Obtained from environmental sample
  misc_feature (1)..(294): Xaa is any amino acid
IIDEYASNEEMYTKLKTGGSGYDLVFPSQDYVSIMIHQGMFEKIDKSLIPNLKNIDPVVLRKIDYDPNMEYSVPYYWGAAGIVVNTAKVPNFERSWSIFARSDLRGRMTMLDDMREVMGDALVYLGYSVNSKNPAEVEAAKNLINNQWKPNLTKFDAEAFGKGYANGEFWVVQGYAEVVYEEIIDDEQLMRDTVYFVPREGGPGYIDSMCILKGAKQKELAHKFIDFIHRPEIYAEFCDEFGFPATVNVPARQYLEGPTWYQHEDIVDTELKNDLGNSLDLYNDAWFNFIRVGD

SEQ ID NO: 90392 - protein, 485 aa, Unknown
  Obtained from environmental sample
  DOMAIN (1)...(311): tRNA synthetases class I (I, L, M and V)
  misc_feature (1)..(485): Xaa is any amino acid
VFDAYVDRAFGTGVVKITPAHDPNDWDLAKRHDLPVINILNPDGTLNGEVPEKYRGMTVKQARAAVLEDLKAGGWYIKEDNINHAVGHCYRCHTVIEPFLSEQWFVRMKPLAEKALASWRRGEIVFYPSKWQHTYQHWMENIRDWCISRQLWWGHRIPAWDCKDCSKTSVSRNDLNACPHCGSAHIEQDPDVLDTWFSSWLWPFSTLGWENSDCDTADFRRYYPTTALVTAYDIIFFWVSRMIMAGLEFTGKAPFRDIYIHGLVRDKHGRKMSKSLGNGLDPLELVDEFGADALKFTLAFMCAQGQDILVDKESFKMGSKFANKIWNASRYILMNLEGLNLVPNPDLLPVDKWIYSRLNTAARKMEEAFLSYRYNDAAQTAYEFFWNDFCDWYVEATKLSMKAEEDNTAEKDRAVTVLLDVLSESLRLLHPLLPFVTEEIYGKLPNTDGLLITAMYPSSAKGAAIRRKKKILPFCRNCTHDPHAR

SEQ ID NO: 90393 - protein, 298 aa, Unknown
  Obtained from environmental sample
  DOMAIN (176)...(245): HAMP domain
  misc_feature (1)..(298): Xaa is any amino acid
MSYVVFSIQNVTAKYASITAGPNRRLLYASDATVEFMNIRRTNTTMSTCFDNPEAAKLYYIRSVNYHETLRKLLGDWKTNLENDPTLSHEQRNTQMLILEEVLRELARYMDYTKEMYESVVLQRDKNRMEELYVKCAPIGDQLVNQIGGNRNLTQAFIDFQMNEANKKTAETDTIIIILALGILILSLSRDLLVSYLITSPIGKINHSIGEIEKGNIKYGIRLSHKDEIGQLSNHIGDMVDKIAEMNSSIATLDNLDVLVFITDLEYNLLSMNELCSKLVGVDRTASLGKKCFEVICG

SEQ ID NO: 90394 - protein, 405 aa, Unknown
  Obtained from environmental sample
  DOMAIN (172)...(290): Response regulator receiver domain
  misc_feature (1)..(405): Xaa is any amino acid
IITPKATAKGINLFCYSEPTLGKKLIGDPVRLRQIILNLLTNAVKFTNYGMVKVMGAAVNQTDENVTIHFEVKDSGIGMNDEQLAKVFEPFTQADNSTTRKYGGTGLGLTITKNFVELMGGDLKVESVIGIGSKFHFDVTFPTCDESTKTESFGDGTGGGAADMEKPYFNNAEILVCEDNEMNQIVITDHLARVGIKAVIAENGKVGVEAVAAKTAKGEKPFDLIFMDVHMPVMDGLEAVKKLAEMGNTVPIVALTANIMTTDREAYKAHGMNEYLSKPFATQDLWNCLLNYIKPVKREEAIALQGPEPQAAAAPAPQPGAPAPQAAAAAAPKAAPAESEEDARLRMRLISNFLKDNQAKDEEIKNALEAGDIKLAHRLAHTLKGVAGLVAQPGLQSASYVIENA

SEQ ID NO: 90395 - protein, 257 aa, Unknown
  Obtained from environmental sample
  misc_feature (1)..(257): Xaa is any amino acid
VTANNAQVYEENGVHSTDYGFALTNRSGTEGGSAAAVERRDYQWNERNLMKRSVNKTYQSEYRYGADGQRALKYTVSGTDRSEVRYYNRMFQVSALNGYAAESKHIYVGETRIVTKRKDAGNTGSVSQESRLMYYYHGDHLGSAQLVTDFEGKIYEHLEYTPYGELWVDHAVGDVALSPTEFRFTGKEFDKETGLYYYGARYLDPKTSRWISGDPAMGEYIPQAPINDEAKKHNQNLPGMGGIFNIVNMHTYHYAGN

SEQ ID NO: 90396 - protein, 354 aa, Unknown
  Obtained from environmental sample
  DOMAIN (45)...(135): Glycosyltransferase 36 associated family
  misc_feature (1)..(354): Xaa is any amino acid
MEVDVVPVYEFSHFDALKQLTNADWVPQTMTLEAHKESSGHVILEQYAYMKKQYAVNYFTASKPADSFDGDRKAFLGLNEITGWACPYTLHKGKLTNSTALRGDNIAAQMFKFKLARNKSGRVATQLGQEKSIAAAKSSIKKYRDLRNVDKAFAELANFWSNYLTALQVTTPDASFNSMVNVHNPRQCHTTKYWSRYLSLYQLGFGSDRGIGYRDSSQDLLGVMSHMPEEACLLAENLLSVQLEDGNAMHQYFPSTMEANEGDSREKEDRPKYYGDDHLWIVLTVASYLKETGNLKFLSKPIPFYNKKKDIKHREKGSVLEHLKRSLAFTWKDRGRHGIPHLGFADWNDTVNLP

SEQ ID NO: 90397 - protein, 215 aa, Unknown
  Obtained from environmental sample
  misc_feature (1)..(215): Xaa is any amino acid
EKKGNNVPTYTFTIFDGAGEDHEHSLDPNSNVCRYIQTSKAIIITLDPLILDAIRKGNIVDENVRQNSLAGGADEHKNAVAVVNSLADYIKTARGMDVNKILKLPVAIVLTKFDTVKNSFGPNSLVTRSSMNVRDGKVSMEEIKQVDEEIRNWLENNGERSFIDALESHFKEFHFFGVSSYGEPPENATTLSERINPHRVLDPILWFFKKAKFVD

SEQ ID NO: 90398 - protein, 315 aa, Unknown
  Obtained from environmental sample
  DOMAIN (38)...(232): ATPase family associated with various cellular activities (AAA)
  misc_feature (1)..(315): Xaa is any amino acid
MSTQSEAAAALIRRAEQVIKGKREFLELLTAGILASGHVLLEDNPGLGKTTVAKTFAALIVGQDGNPLCFKRIQFTPDLLPYDITGVDVFDPETRSFRFVPGPVLANIVLADEINRTTPKVQSALLEVMAERQVTVGSAVHRPPEPFFVIATENPIESEGTFPLPAAQLDRFMMRLSLGYPDRESELSILDENPATKALAELKPVLTETEFLAARSAATEVYCHQSLKEAVADIVRETRNHRSFALGASPRAALHFLGAIKALALVRGREYVIDEDLLVLAAPVLSHRIRLRDARAQGDRLIREICLAEINGIKS

SEQ ID NO: 90399 - protein, 151 aa, Unknown
  Obtained from environmental sample
  DOMAIN (34)...(139): Protein of unknown function DUF58
  misc_feature (1)..(151): Xaa is any amino acid
VLIRCELCLETRDGRVIRHFANPAAENSSSFPVKERGAYSSKGDRLVIFDTPGFFYLGISICHNENPRLLALPHPADEAIPLSLRSGGIEERNEPHYRKSSELINHRPYVPGDDPRRINWKLYSHVASGELFVREGESEPPPCSCLLILID

SEQ ID NO: 90400 - protein, 444 aa, Unknown
  Obtained from environmental sample
  DOMAIN (14)...(157): GAF domain
  misc_feature (1)..(444): Xaa is any amino acid
LISELSRGFISSGDSQTLVQEAVAKLGRFHHVSLVFVFAIDSQKKDTRLAYHWTFDDNPPRPAITNLYTYLTDIFPGTLPDCATLPIVACDDTKANTDAIFQALYAINIMAVIGAPLYVDGRLWGVMCVEQAGTPRKWTENEKGFVAMTASTIAGVIMRDIYTVKLKDAVNKANAASKAKSEFLSNMSHEMRTPLNAITGMTTIGKNAKDMERKDYALEKIEAASTHLLGVINDVLDMSKIEANMLELSPIEFNFEKMLQKVVSVVNFRVDEKKQKLAVHIDREIPKTMIADDQRLAQVVANLLSNAVKFTPEKGTITLEARFMGEERGFCTIQISVADTGIGINNEQQKRLFNSFQQAESSTTRKYGGTGLGLAISKSIVELMGGKIWVKSESQKGSNFAFTIKARRGTTKEKGALLAPGIKLENIRILVIDDDPDILAYFSD

SEQ ID NO: 90401 - protein, 56 aa, Unknown
  Obtained from environmental sample
  misc_feature (1)..(56): Xaa is any amino acid
ASLKYQDIPEWDSVGHMELIAVLEEAFDIMMDTDDIIDLSSFEKGKEILKKYNVEL

SEQ ID NO: 90402 - protein, 230 aa, Unknown
  Obtained from environmental sample
  misc_feature (1)..(230): Xaa is any amino acid
MWNFNKFGANIAIIEENGEKVTYAELQAVSETLISNTYGRSIAFNFCMNAKGSLLGYVAFVNSGIVPVMLDAALDRGLVSALIENYRPDYLWLPHNMAGEFSGCSEVYSVWGYMLLKTPYDKVFPLYEELALLLTTSGSTGSPKLVRQSCANIQANTESIVEYLGIDASERPITTMPMSYTYGLSIINSHLWAGASIILTHKTLMQKEFWQQLRDYGASSFGGVPYIYEM

SEQ ID NO: 90403 - protein, 344 aa, Unknown
  Obtained from environmental sample
  misc_feature (1)..(344): Xaa is any amino acid
LRRTNIKSLSFDTIKLEGSCFTAQIVENAALGKNISKITDADYQIPRGLRLLDEIGRSFQIAQAQWKSYEEGKIKAEHFIHEFFIDALLYPPPLFEKLLNIDTLERSDSWYITCDCHYLRLMRKSSLARPSYLEFDLQTILKESRFPGYQMLYRIMHGSRTVGLDNEGNGKCVWDAWKEEGEKLGVRVREGLRKGVTRALSVLGSGFLNYDTPGNDALRSALESGDLSTHDYFQELMRLMYRFLFIFTIEERKLIFDHLPETSQADKKLLALHTLYEKGYSLHRLIDRSARYTSATHHEDLWEGIKIVFRLLGGERNSETNPLDLPVLGGLFKADQCPHLDQCG

SEQ ID NO: 90404 - protein, 569 aa, Unknown
  Obtained from environmental sample
  DOMAIN (418)...(476): Transglutaminase-like superfamily
  misc_feature (1)..(569): Xaa is any amino acid
MISNTKNFATYQCKQPRIKKRQYFILSVFFVFFVSCDVKVPVITSIDPKFGRMGEIITLTGNNFGDSRDESYVTIAGISPTNSSYYLWQDNLIILKVPELGESGLVYVRAKGRKSNGVLFSNSASVPRAVDGEELGLEPKITSVTPQVGAPGTLITVTGNNFGISRENSFDSGAGVFFSWDYESGAYNPYAVREPEFIEVSETEMGYEHWSAREIKVRLPDGAVSGNLEVRTPHGKSRSFFFDVSGKPGFKNIKDKRGYTVTYSVDIRVTDASRPNMLYLWIPKPVNSPSQRNVTLISRSIEPFMENYKGVSLYKLDNLLAGTSQSINLSYRVEVYSVGSGIKPLSIKQEATELSAAHTKSSGLIPSDTPQIKTAANLIVNREQNPYIKAKAIYDWIINSMQISDSETSKSLIEVLEQRRGDPYSAALLFTALARAAGVPCIPVAGVLVNQNGHTLRHYWAEFWIDGFGWLPVDPAMGAGAVKFIDSANQRFNDEAEKDSVNFYFGNLDNQRIAFSRGELILSQIENRGRLVSHPQSYSLQNVWEESAGGLESYSSLWGDIIISGIYVQ

SEQ ID NO: 90405 - protein, 83 aa, Unknown
  Obtained from environmental sample
  misc_feature (1)..(83): Xaa is any amino acid
MSETNEELLDANMHLVLEIAKLHKGNGVPMSVLVERGKMGLIEAIEKFDSVRKKGIKFIPYATGFVIMRMQLESEWRRGRVVK

SEQ ID NO: 90406 - protein, 659 aa, Unknown
  Obtained from environmental sample
  DOMAIN (1)...(87): Flagellar hook-associated protein 2 C-terminus
  misc_feature (1)..(659): Xaa is any amino acid
MRLERIPRERTERNIETQEIRKTYWKDLGTRVTALRESARFLFSFQNPFNDRIAVSSDENSITASATREAVEQEYRFNVIQLAQADRFLSPPLDEKTKIDAGNYTFTVGNDEISLNFRGGSLREFADALNRRRRDKIGASLITVQPGTKSLLIESKVTGAENRLGFSGDSELLAIKLGILEQVNDSRREIVISEGTVRETPLPDGIEPTGPLSINDGVLGFPPLASASIPFALEVERGSPLVLKLETQTKVNPEITRSIPQPPPGPSVPSSGSVSYGGITIENNPSTAPMPEWKPPPVPKRMDNLAVLSLSFSDGTKANLRPITDSGDFIPREFSLAEYAAGKTITALNIDNANTHREISVRGAVVYDPKAIGGGLRPLNPVSIAQDAIIDMEGIKMQRPSNTIADIIPGVTLTAKGVSDRPVRLGVSTDREGIKNAIINLVGNYNRLMAELNVLTRTDERVIDELTYLEKDEAAEMKKRLGIFAADSTLNQFRASLLRTATAPYPTDEQRELAMLAQIGISTNFPGAGYSYNPAGLRGYLQIDEKKLDAAIEQHLPAVKQLFGSDTTGDMVIDTGVAFNMDSLSKPFVERGGIISLKTGTIDSRISQDRRKIDTMDRQLAAKEAELKAQYSRMENAFSRMEQMTSSLENFSRQNSNNR

SEQ ID NO: 90407 - protein, 474 aa, Unknown
  Obtained from environmental sample
  DOMAIN (385)...(474): Flagellar hook-associated protein 2 C-terminus
  misc_feature (1)..(474): Xaa is any amino acid
MRLERVPRDRTEKNIESQEASKTYWQDLGKRVTALRESARFLFSFQNPFNDRVAVSSDENSITATATREAVEQDYRFSVKQLAQADRFLSPPLDEKTKIEAGNYTFTVGKDEISFNFRGGSLREFADALNRRGRDKISASLITVQPGTRSLLIESKVTGAENRLGFSGDAELWAIKLGILEQVNDSRREIVISEGTVRESSLPGDIEPTGPLSINDGVLGFPPLASASIPFALEVERGSPLVLKLETQTKVNPEMQRSIPQPPPGPSVPSSGSVSYGGITIENNPSTAPMPEWKPPPVPKRMDSLAVLSLSFSDGSKANLRPITDSGDFIPREFNLSEYAGGKTITALNIENANTHREISVRGAVIFDPKAIGGGLRPLNPVSIAQDAIIDMEGIKMQRPSNTINDIIPGVTLTAKGVSDKPVRLGVSTDREGIKDAIISLVGNYNRLMAEINILTARSLSSGAYQVSERMELQ

SEQ ID NO: 90408 - protein, 390 aa, Unknown
  Obtained from environmental sample
  DOMAIN (231)...(346): Response regulator receiver domain
  misc_feature (1)..(390): Xaa is any amino acid
MNAIIGMTNLLTHESLSDRQMGYINDINLSAHSLLSIINDILDLSKIESGKLTLNPVNYNFHELIGNITSMFNYVAKKKGLEFKFESSGDLPEYLYGDDLKLRQVLTNICGNAVKYTEKGHIKLKISVSSGNLVFEVSDTGMGIRKEDIIKLFNPFERAEMDKNRGIVGTGLGLSICKSFVEMMGGHILVDSEYEQGSVFTVIIPAVLGNKAEVNSAKNLKKEQTLFAPNANILVVDDNEFNIRVAEGLLGLFKIKPKTASSGKKAIDIVQKNKFDLVFMDHMMPEMDGVEAVREIRKLGVQYASLPIVALTANAIQGAKEMFLANGFNGFISKPIEMQELNEILREWLPFDKIEEKPQADLIAENHDAETVSDFMRALEKIDEIKTEIG

SEQ ID NO: 90409 - protein, 663 aa, Unknown
  Obtained from environmental sample
  DOMAIN (77)...(110): Tetratricopeptide repeat
  misc_feature (1)..(663): Xaa is any amino acid
MLYVGLALCFLERSWVVKLRVLVIVALLMMFVRGVGFAQTESVEYYYNCGKEFLDNGDYYNAIENFNQALRIKPDFSEAINGLGEIYYYIGDYAKAEHYFLEATAIREKALGKEHPDYAESLNNLGVLYKNMGDYAKAERYYLEATAIREKALGKEHPDYATSLNNLGALYHRMGDYAKAERYFLEAKAIREKALGKKHPSYALSLDNLYCLYLTKKEYSKAFAYKQEQIKTNTDLVNKNFSFQTERQRNSYWNANSYSFELSYSLSLYNPVPASNILNYDNALFSKGLLLRTVNAVRDAVYASGNRALIRQFEELGLLRQQINALRQKEGNSEAYIQSLETKAEALDKSLTQSSAAFRELQADLAVNWQSVREKLQRNEAAVEFVSFQVYDKKWTDKLQYAALVLRPGMDAPAWVPLCEETQLKNILNEVEGKGYNDDYKTKLIYDTNGDKLYSMVWKPLEQELENVTTIYYSPSGLFHKLAFGALPTGDDEEVDFENFDPEDFEYEGVNRLADKYDLNLVSSTREVVRLSRGQTPAAPSSAVLYGNLDYDADAETMRKAAQPYRNNNGSASNLPEWLVFGWGRGWNILPTTREEVLAIQGYLNRKNVPTTLYLGSAGNEESFKALDGRKTGLIHLATNSFFYADVERKHEEREQARRNIRS

SEQ ID NO: 90410 - protein, 280 aa, Unknown
  Obtained from environmental sample
  DOMAIN (1)...(274): Permease family
  misc_feature (1)..(280): Xaa is any amino acid
TAVFFEGILFIILSLFKIREAIINAIPVNLRKAVAVGIGLFIALIGFANAGIVVGDTGTVIGLGNVTSGEPLLALLGLIIMFVLFTLKVPGSILLGIIITTVIGIPFGVTKIPQGWSPVGTPDAPLLFAFDFKLESILTFKFFIVFFTFLFVDIFDTVGTLVGVTTQAGLIDKNGKIPKVKEALLADAVGTVAGAALGTSTVTSYVESAAGVAAGGRTGLTSFTTAILFLLALFLSPLFLLIPSAATAPALIMVGYLMLKPVTQVLILPTRPKASPHPRH

SEQ ID NO: 90411 - protein, 249 aa, Unknown
  Obtained from environmental sample
  DOMAIN (4)...(167): Glycosyl transferase family 2
  misc_feature (1)..(249): Xaa is any amino acid
MKLGFLIPVYRHGKTACSLAERLAAYALPIIMVDDGNDAETKALLAECAAKTPGVSLVSLEKNSGKGGAVIDGFKKAAELGLTHVLQIDADGQHDEGKIPFFLEESAKHPDMVICGYPEFDETAPRSRVAGRKISNFWASVVTLSTELRDVLCGFRVYPVAVSLRITRCLFLDKRMGFDPEILIRLYWNKVFPVFHPIIINYPPDGVSNFRNVRDNIRISLMFSRLFVGMILRLPLLIALRKKRGKERR

SEQ ID NO: 90412 - protein, 124 aa, Unknown
  Obtained from environmental sample
  DOMAIN (12)...(58): S4 domain
  misc_feature (1)..(124): Xaa is any amino acid
MELVTGENDSGRRLDRILRKALADYPLPLIHRLLRQKKVLVNGKPGKAQDRIESGAKISISSLENIQINKPTTRQFPAPEIIWQDSGLIAVNKPAGLTVHGHNSLDDMVRSYLAEKLPPSLSLN

SEQ ID NO: 90413 - protein, 120 aa, Unknown
  Obtained from environmental sample
  misc_feature (1)..(120): Xaa is any amino acid
RGNDFVGWSGDFNPDDNQYTYLAGVLFNPNTEVPDGYEYRDIASCEMAVGWLLRTTDGEGDIHVNASEYISKAEKENGYEYDGKNGFFEMEYYSNERFYIPEQNGENVKLDFYSPCKKIE

SEQ ID NO: 90414 - protein, 153 aa, Unknown
  Obtained from environmental sample
  misc_feature (1)..(153): Xaa is any amino acid
MKHLGTKKLETERLILRQFTIDDAEFMFKNWANDDNVTKYLTWPTHKDINVTKYVLENVSILNYKNNDFYQWAIVLKEINEPIGTISVVDKNDEIQMVEIGYCIGKQWWNKGITTEALNAIIKYFFEEIEVNRIEAWHDIKNPNSGKVMVKWE

SEQ ID NO: 90415 - protein, 495 aa, Unknown
  Obtained from environmental sample
  DOMAIN (271)...(337): His Kinase A (phosphoacceptor) domain
  misc_feature (1)..(495): Xaa is any amino acid
IAAYFCGTEKSDELMRIMFDAMPLGANIHNKDFGYFDCNASAINLFGLSSKQEYHDNFHRLSPEYQPDGRLSKEKSAEFINKAFTDGYCRFEWMHQKLNGEPIPCEVSLVRVKHDNEFVLAAYIRDLRELKATIEQVEESEQALSILTNMLNGLDAMIYVTVPETGEILFINDTMRKAFNIKEDYIGQFCYKVFVNNDVEGKCDFCPCHKLDKAPDSTVVWEKMNPITKRIHHHTDRYIEWHNGKIVHIQHSVDVTDLVTAKEQAEQSSRFKSQFLSRMSHEVRTPMNAILGITEIQLQNETLPDDLRKALDKIFNSGYLLLGIINDILDLSKIDAGKLELSLADYDLPNLINDTVPITVMYYEHKPIVFKIHVDENTPLTLFGDELRIKQILNNLLSNAFKYTDKGEVSLSINTEYSSQQSTQVTLVLNVADTGHGMTGEQVDKLFDEYSRFNLEASHTTEGTGLGMSITKHLVRMMNGDIFVKASRERFGIYR

SEQ ID NO: 90416 - protein, 144 aa, Unknown
  Obtained from environmental sample
  DOMAIN (1)...(143): Domain of unknown function (DUF323)
  misc_feature (1)..(144): Xaa is any amino acid
TLTATATACQLKLNGNMPAVPEQQRPFYTGNNIATNNANYDGNYPYNKNAKGTYREKTTPVGSFAPNPFGLYDMHGNVWEWCWDWYGEYKNEAQTDPRGAVSGANRVLRGGSWGSNAGGVRSAFRSGYTPSNRSYDVGFRLVRS

SEQ ID NO: 90417 - protein, 308 aa, Unknown
  Obtained from environmental sample
  misc_feature (1)..(308): Xaa is any amino acid
MYFIKKNNKLSLTLEGKNALAGYLFILPFLIGLLAFIFFPILESLRMVFSTVNIDLVKNGFTMEFSGADNLKRVLMIDPQFKRLLVEEIGRMVLIVPAVIIFSLFVALILNQEFKARGVVRAIFFLPVILSSGIMIGLETNNTLLNSMADIIKEGNLMKSSITGVLEDILVSEGAASDFMGYIFNIVNQIYDIAMASGIQIVIFLSALQTIPPSMFEAAKIEGATSWECFWKITFPMVSSLILVNVVYSVVDYFIRTDNRVMEKIRVTMMQRMEYGFSTAMAWVYFLAVIAIIGIAMSLISRKVYYYE

SEQ ID NO: 90418 - protein, 351 aa, Unknown
  Obtained from environmental sample
  misc_feature (1)..(351): Xaa is any amino acid
MIDEFAEWGWKNVRIKLTGWFNRSVDHSVPNKIKLIGGLGDKKDFKNLLLAAEKNGFEVFPEVEFMYMRDVKNFGGFNLYRDAARYVNRKRVEKYPYSFVWFGERVRWGKLSYLARPAYMISLIDNFSRMMPALGIRNIAFRSLGAKLAGDYHEKRTVSREASMKMRQEKLTELKKLGTGVLLNTGYAYAVPWADFITDMAIDDQSFSITDASVPFYPMALHGLVPYTGPAINLAEDYTKNLLKTIESGAGLYFSFMSEETSVLQETKFRQFYANEYDKWSPDANALYQKFSADFAGLYDQAIVNHVILAEGLTWTEYEDGTVVIVNYTEIAAVYGGVDIDARSYTVVRRG

SEQ ID NO: 90419 - protein, 629 aa, Unknown
  Obtained from environmental sample
  misc_feature (1)..(629): Xaa is any amino acid
MGSQFSLEYADSAGVGMTLYSGVNSVALGVYGYELADNVLEVHYSIGDIARSYIIPPAAAEQRMLTFLEKMERDDRRKVEASYRLYDINNLRTGDDKSRLLADYPDLNRTKMYVLRDTTQDYMKETMEELFARAGYTYDDYYEDASRHTPSGGDEKPAFNITLRYTLDERSLILSVPFDKIAYRPAYPITLLSLLPFMGAGGINDKGYMLVPDGSGALIYFNNGKQNQITYNNNIYGWDEAMPRDAVINDNRAPFPAFGIQKNGNALLCVIEEGSSYGGVRADVSGRNNSWNNVYPRFNMVHGAIIDITGRSDRSVYLYERSLPAGEGITLRYTPCTDDGYPGMAKEYRSWLTRVYPSLDTRKEDGVPVAIELVGAVNKTRHRLGIPFDLPLKLTSYKESSDMIGDFAQWGWKNVRIKLTGWFNRSVDHSVPDKIKLIGGLGRKKDFKNLVSVAEKNGYAIFPEVDFMYMRDVKPFGGFSLYRDAARYVNRKRIEKYPYSFVWFGERTRWGKLSYLARPACMMSLIDNFMCKAVALGLRSIAFRNLGAKLAGDYHEKRLVSREASMKMRQEKLAELKGNGAGILLNTGYAYAVPWADFITDMAIDDQSFGITDVSVPFYPMTLHGLVPY

SEQ ID NO: 90420 - protein, 443 aa, Unknown
  Obtained from environmental sample
  DOMAIN (87)...(297): ATP synthase alpha/beta family, nucleotide-binding domain
  misc_feature (1)..(443): Xaa is any amino acid
EVVGLRYEIVQLMAYEETDGIEVGDRVIALGSRLEVPVSDKLLGRVIDALGNPLDDKGEISSICSYPALASAPDPLKRRRITERITTGVRAIDGLLAVGKGQRLGIFSGSGVGKSTLLGMIARNTSADVNVVALIGERGREVNDFIEYDLGPEGLKRSVLIVTPSNSPPLARLRGAYVATAVAEYFRDQGNDVMLLFDSVTRFARAMREIGLAAGEPPAQRGFPPSMFDSMPKLLERSGTSDKGSITGFYTVLVDGDDMDEPVADTARGILDGHIVLSRDLAQAYHYPAIDVLQSISRLASKVSGSASKQAAGVIRKNMASYANAEDLINVGAYRNGSNPDIDEAIAKHGPIEEFLMQAVDEPSPLEDTLRAMSEITGVQIPPEEMADNNAKLNSQDRPAQVKKEKQQAQNTSKAQDTANALNSVAALFSSIPGMGSLGMNNQ

SEQ ID NO: 90421 - protein, 325 aa, Unknown
  Obtained from environmental sample
  DOMAIN (15)...(206): ATP-dependent protease La (LON) domain
  misc_feature (1)..(325): Xaa is any amino acid
MSDQIVPIDQLLPNKLPLVALMGRPIFPGIFTPIMIGNPVDVKVIDDAVAGDAMIGLVMLQNETETPSIADLYKVGTAAKIVKKINLPDGGVNIFISTLKRFKVKKTLHASNPIVAAVEYLNEEEDDTSEVKALTRALISEMKQISENNPLFSEEMRLNMINIDHPGKIADFIASILNIDKAEMQKILEILNVRKRMEQVLVFIKKEQELLRIQKKIQKEINEKIEKSQRDYFLKEELKAIKGELGMTTDAKSSDYQRFKDAIETLKFEGEVKETVEQELEKFNLMEPNSPEFVVTRNYLDLIVSLPWKDPEPENFSMKNARDIL

SEQ ID NO: 90422 - protein, 391 aa, Unknown
  Obtained from environmental sample
  misc_feature (1)..(391): Xaa is any amino acid
DRNRDALQWLSHREIEREDSRLIVRRSVKASGRNSIYIQNVPVTRNDLAEFMGFLFDLHGQHTHESLLRKETHRVYLDLFSGLEDEVAAFSRVFTELAEKRRTLEALNRSEKEREQRLELLNYAIEEIAKADPKIGEIKELEAETQRLSDFEKLSLHVNAVSSSLFEDDTSFLSLGRRLRASLENAASIDSSLSPELKRLEDIYYEAEDLAAEFRNYRGRLTYDPAKLEEAEERLALLYKLKKKYRSAENTDSGGQDEGGILAYKTEAEAEIEALSGAGENQDRLKAEISRLEKDLAAKAAVLSAKRSEGAKRLGEGITGILSRLGMPKAVFAANVKPKTREGGAGLVCGQWGADDVEFMISANTGEPLKELARIASGGELSRVMLAIKQY

SEQ ID NO: 90423 - protein, 291 aa, Unknown
  Obtained from environmental sample
  DOMAIN (79)...(225): Type I restriction modification DNA specificity domain
  misc_feature (1)..(291): Xaa is any amino acid
VENDGLSLGAQRRPIEKNDLPGVRTEALDYLQRLRNGEDVKGLELRHGLVVEKEKIAKGGEYGLSGERYRENGKKLSQYPHVKLGELVEILDSQRRPITKSERKPGPFPYYGATGILDHVEGYLFDEPLVLVGEDGAKWGAGEKSAFAVRGKIWVNNHAHVLRPKRNMVLDQYLIEILNDADLLPYVIGVTVPKLNQEKLRSINIPLPPLEIQKEIVAEIESYQKIIDGARAVVDNYRPKIDIRPEWPLVELGNVADFISGYAFKSENMSDSASDIRYRQVLKIGNIGQNG

SEQ ID NO: 90424 - protein, 302 aa, Unknown
  Obtained from environmental sample
  misc_feature (1)..(302): Xaa is any amino acid
GADGGKELTCRVGTKIDSFISHFGSQSFHLAAVKANGETLPLSAKLEVNSALEPVWLDSPEGESIYRCTLAFLLAAAAGKLFPDKSLCIGHSLGNSYYYTFLEDESPEAAEIEKLQSRMKDLVKQDLPIECRYMAYAEAMETFTKNRQDDTALLLNERSEAKVMVNECAGFIDLYISPLLNRTGLLDVFELMPYEDGFLLRFPAIGSGRKLEPFEDSPKIFSVYNEYKKWGRIVGVHSVGRLNRLVSDQRIMEYIHIAEAFQEKKLDEIAAKIYDCKDTVRAILIAGPSSSGKTTTAKRLSI

SEQ ID NO: 90425 - protein, 294 aa, Unknown
  Obtained from environmental sample
  DOMAIN (25)...(241): Nicotinate phosphoribosyltransferase (NAPRTase) family
  misc_feature (1)..(294): Xaa is any amino acid
AYTVNFQSLIATKTARVVLASGKASSVAEFGLRRAQGPDGAMSASRAAFIGGASRTSNVLAGKEFGIPVFGTMAHSWVMAWPTEVEAFLAYAELYPDNSVFLIDTYDTLKSGVLSAIEAGKTLASKGKNFGVRLDSGDIHYLSVEVRKMLDAAGMSNATISVSNDLDEYVVKTLTDANAPINTWGVGTQMVTGGTEAAFNGVYKLAASEDGKGKFSARIKFSDNPAKTTNPGVKQVWRVKDSGGMCVADVLALEDPDEPDILETGKTYSFWHPQADYRHFNHTLDCGAEPLLKE

SEQ ID NO: 90426 - protein, 155 aa, Unknown
  Obtained from environmental sample
  DOMAIN (1)...(153): Uncharacterised protein family (UPF0157)
  misc_feature (1)..(155): Xaa is any amino acid
MIIVEYNESWPEQFISLKNILENNLSKIIRIEHIGSTSIIGMCAKPLIDIVIIIMDNFVITKYELDTIGYYHNGDQGIPGREVFKRANNIYDDTLDTIHHHLYVCDKNNKELKKFIHFRNYLNENERTKLEYRRIKKEIINETWKLMEIVKNSKK

SEQ ID NO: 90427 - protein, 369 aa, Unknown
  Obtained from environmental sample
  misc_feature (1)..(369): Xaa is any amino acid
MSVYPESQPTYLELVKNGAVETFMKAGVLVREAFCGPCFGAGDTPANNELSIRHVTRNFPNREGSKPTDGQIASVALMDARSIAATAINGGKITAATDIDVKYGKYKFFFDKSIYDKRVYNGVGSPKPQTELKFGPNIKDWPKMPALPENLLLKVVTFITDSVTTTDELIPSGETSSYRSNPLKLAEFTLSRKDPNYVKLAKEVQILEEQRSNEKADGELEKALKKIQGIEGCAGVGLSNIGIASVIFARKPGDGSAREQAASCQRVLGGGANFALEYATKRYRSNLINWGILPFLITDETAFSNGDYIFFPEIKSAVQDKKETITGFVLGETVKEMKTVLGGLTDAERQILIDGCLINYYASNNSRTT

SEQ ID NO: 90428 - protein, 723 aa, Unknown
  Obtained from environmental sample
  misc_feature (1)..(723): Xaa is any amino acid
MKTWTDYGEIFNASQVPWHNGPFDNGSTFMWAPDCVYNEKTGLYYYYFPNPTKNTSGGGNGWGDNWQIGIAVSRHPASNFIIMPTWLKGLNNGAQNQIDPHVFIDDDGQAYFYNGGGGSCYGGKLKDNMMEIDGNMEKMMGLENFHEATWVHKHKGKYYLSYSTNGGNYPSGTGYGDQLRYATSNSPLGPWTDGGVYVYPTGNGTIHGSIVEFNNKRYAFYHSDYVSYVGNDQGRSVHVDELFYNDDGNIQLVKSFGIPRAGANLTMTNTNGDPEIVALNLKAGDFNDPSDGFNPIAGVNDGGRTYGYLSRIELDGLTIVGGNETNTTYRTTVGLPIDNNGVIGPLEAREFTRYTITNPGKGGAFEVTVYASSTATGGSFFLATNGIDRTNTVAVGNTNGDIKPFILKDIPLVKGENVFEFRVLNGGFKVRNFEFRSNIAPLDIQVKEGTGVDALKKWLELTMVLTGPLSGEITLSGGSGAVGVDFSPVRFENLVEDEVIRVDLPYYGGWMLEFTVDTWTPGYESNKRPYKFPLQYNRTFADKFTGTNSLAGATPQMVADGELCKNEGYWEGSEDLSMYGSAKWDKNNLYLYLDVTDDTHASSVAGSEKGEFRSDDSSMLWAGDSVQVVVNLNKNASSGGQALSSELGFAKHQAGNILAHRWAASTGFSTGPFMQDEWSNNDKIKVIRNEITKITTYDLTIPWNLIARSQDLPQTDAEWAARV

SEQ ID NO: 90429 - protein, 64 aa, Unknown
  Obtained from environmental sample
  DOMAIN (1)...(54): Ribosomal protein S19
  misc_feature (1)..(64): Xaa is any amino acid
MIKTYSRCSTIIPEMVGGTISVYNGKAWIPVYITENLVGHKLGEFSPTRIFRGHSGSDKKAAAK

SEQ ID NO: 90430 - protein, 384 aa, Unknown
  Obtained from environmental sample
  misc_feature (1)..(384): Xaa is any amino acid
MKIYGYMTALLSVLMMTVYCANQAPPSGGPVDKTPPAVSAQFPENGQVNVDARASVEIKFSEWINRGSAAGAVSVYPAVPQGVVVRVRKNKLTVTPKSPLSANTTYHISVSAALQDLHGNAIARPIDIAFSTGAVLDSGTAKGLIVALKPTTAVRKVMLFWADSAWTDSRYFSPPEYATQSDSAGAFGFSHIKEGRYRIVAFVDQYRVGKLRMGDSCFTSLEKTVDITKSPQTIRLYPAESDTVTAKKKPVADSVGVDTTATDTTNNKTETDSIGIADTSKNKTAVDSVKTLKKKQTADTAALCIRLSGGASCLEPNERRKWIYRPISRRDTSFTVADSSGNFAFDSIPASKGILRWFIDDNGDNLITPGRLSPWRSPERFFTV

SEQ ID NO: 90431 - protein, 146 aa, Unknown
  Obtained from environmental sample
  misc_feature (1)..(146): Xaa is any amino acid
MKDNGFPDKNIPSRRKIPFSWIWFASTILLCAVFAFASVPSVLAQVREGGTQTGQADAVRNRRYTETIQQVFNFIQRHYVEEVDSKVIFEGAMTGIFNALGDPYSAFLPESEMKDLNDTTQGSFGGVGLYINKPAGNRPDGRPPYI

SEQ ID NO: 90432 - protein, 833 aa, Unknown
  Obtained from environmental sample
  misc_feature (1)..(833): Xaa is any amino acid
VSIADTSVKFTVESSTRAAVEIWGGSVELGGGTIINKDSTGNAVKLNYQSGALTFKGSAPPKITGSIETNTAGTIRADASFKPGTNKYTLKLIGSACADDAAAVKGGGANLAAFVLTNKYYELKEKDGDIIVKLKAGVTQPKYVVIGSVDAGFNALSGADTVGRGADIRRVFDSIRVNADGRPCGIQFGGGAAAVLDIGEAGIYFDSNGWGRVSISGKVVGGTLGLDQGVSIENSADISTSGDMYIYSGADFTHKSGYIKARITNAGTLTISGGTVGDTLSRRYAINNSSSGELVINGTANIISSDSSATGGTIKNRGTLVISGGKVSNVSSINQSVAVLNGVEKTDTTAKTVISGVAEVSSRVKSQYGVIHNQNGSMEISGGKVYSVGDTAQTVIRNSAPARMLITGAADIKSEARVMEYGAVTNYSVLSGMDSATASLEISGGKISANSGYAVYSEDGAKSSISGSANITSAYKNGAVYVGRYGSRLYLLDGTVSSTYAVKDSAVTAVVVFSGSQGGSAGRLFIGGSPTLTGSIRYQGSYAGNPITVQASGAAVFSPGTKKYNLAIKAYGDSVILKNGARFIQSFVLDTAGNAGITLAAKGNDVVAVPASGQVYTVSFSLNGATGTAAAPSPLLVVSGAKLGEYAMPSTAPYSKNGFKNDGEWHIRTGTSNGTEIVGEVFKFSLGADGTPITNAITLTLEWTTIPISVLNSNREIPATSTQNAVAIAPAVISAGELTAGPNPSALQSGKVNFFRTGAPLKSGKLIIYDAAGKTVGKITVNDNAAAGKRQVASWNLKDTKGRLVSDGTYVVKGVINTKAGKSEKVSIILGIR

SEQ ID NO: 90433 - protein, 278 aa, Unknown
  Obtained from environmental sample
  DOMAIN (1)...(278): Protein of unknown function (DUF1703)
  misc_feature (1)..(278): Xaa is any amino acid
MDAHLRFVFFTGVSKFTKTSLFSELNNLRDITMLPNYANICGFTMEDFDTLFAGYLSEMARGANEEDLRGQVLDWYDGYSWDGETRVLNPFSLLSFFLDRQFYPYWFSSGSPNFLVRLIKKNPGTYSGINAANVDEFSLDTMDIDKIAPIQLMFQTGYLTVKSIRQRSGASPVYELKIPNTEVRDALNRHVLASFTETDMGMAQNSRDAMLCALEDGAPDRLEKILGGLFASIPYEIHVNREAYYQSIFYAVMLLLGFHIEAEVSVSSGRVDGVLELP

SEQ ID NO: 90434 - protein, 267 aa, Unknown
  Obtained from environmental sample
  DOMAIN (192)...(265): HisG, C-terminal domain
  misc_feature (1)..(267): Xaa is any amino acid
VARLFSEAGFPISLADRTYRPSLGADWLDAKIMKPQNVGELLELGSHDAGFTGIDWIKESGADIEEILDLGFDKVRIVAAVPQDYDETKLRSKKLVVATEYVNLAETWLKSSGYEYRILRTYGATEVFPPDDADMIIDNTSSGQTLRDNGLKIIGTILESSTRFAASRSALADPEKRRRIEELAMLFRAVLDGHERVMLEMNIPKEQFESLASLPAMRSPTVAPLYGDAGYAVKIAVKKHEVPDIIPKLKNLGALDIVEYDLRKVVL

SEQ ID NO: 90435 - protein, 160 aa, Unknown
  Obtained from environmental sample
  DOMAIN (26)...(160): ABC transporter
  misc_feature (1)..(160): Xaa is any amino acid
MAIKTQNLSVGYKKPLIENLSFEISSGLTCLIGPNGSGKSTLLKTMAGLMKPLAGSIFVFEKDCSTIDARDLAKLIAFVPARFPAETNIKVFDFVALGRIPHTNSFGKLEKSDLEKVNFAMEQAEVADFAERRVNSLSDGEKQRVALARALAQDTKILLM

SEQ ID NO: 90436 - protein, 251 aa, Unknown
  Obtained from environmental sample
  DOMAIN (13)...(248): PcrB family
  misc_feature (1)..(251): Xaa is any amino acid
MENQKLKIEESLFAKIKERALFAVLLDPDSSDSDVFLETGKMAFECGADLILVGGSLIGNANLPKKVAELKKIINIPIILFPGGASQVVPGFDAMLFTSLVSGRNPQYLIEEQLKGGLIVKALGIEAFPTAYILINSGPATAVEYISNTKAIPANKPKITMATAIAAELMGMRWVYLEAGSGAESPVPLEHIITTREATSLNIIAGGGITTPQEAKARVKAGANMIVTGTIWEKNMDANLMKEFAEAVHGN

SEQ ID NO: 90437 - protein, 378 aa, Unknown
  Obtained from environmental sample
  DOMAIN (46)...(377): Aminotransferase class I and II
  misc_feature (1)..(378): Xaa is any amino acid
MSAQADELNQVIQDANPHVFDMLSQKGKRIFFPTAGILAQTAQAAAAGINATIGIALDDLGVVMQLPSVASQIQGGGADILSYAPNLGKPELRKTWRGMILKKNPTLRPDGISTPVVTAALTHGLYAAAYMFLDDGDSVITPDLFWENYNLIFSYAHGAKLDTYPMFNASDGFNVEALRDKLVSGPPGKKIVILNFPNNPTGYTPTAAEAKTIADILVEAANRGCDVVALVDDAYFGLVFEEGIFKESIFSLLANAHERILAVKVDGPTKEDYAWGMRIGFVTFGTVRGGAAFYSALESKLGGSIRGSTSSSSSIGQALLLNAYKSPAYEKEKEEKYQILLRRYRKIKDILDNHKEYAEYIRPLPFNSGYFLCLKALC

SEQ ID NO: 90438 - protein, 399 aa, Unknown
  Obtained from environmental sample
  DOMAIN (6)...(118): Response regulator receiver domain
  misc_feature (1)..(399): Xaa is any amino acid
MFDVSKKILWVDDEIEFFRSHVVFLETRGYNVTAVADGDTAIRLVEENPSAYDLVLLDKQMPIKSGNATLDEIKAIRPNLPVVMLTGYQHSAEIAMGKRYDAYLTKPIDPGKLLIACQQILDAGRGASRKLADRYLRGYTDLSARASGTLGVSDWMGLYHSLVKWDIELDGITSDAVSRMHTGLKSDCGKRFCDFAAENYTDWVRGGRDRPPMHVDVLGKVVAPELSLGHGVLMIVLNGMRLDQFLCMEPELKRNFSVSGIKLMSLLPSISNFSIAALASGYYPDEAAEAEPGIFEAEHPDPIVMKRLMRRGLERVGIGKMRTLYTSADGPNGRRHVRSAIEAMERAQTFGVVAIDIVEKVIGAESAARHVKSPVADEAEFRRRVELEFAGSTVLGVMK

SEQ ID NO: 90439 - protein, 162 aa, Unknown
  Obtained from environmental sample
  misc_feature (1)..(162): Xaa is any amino acid
GKYVGARDFASVNRTARSGLKIGVLYSGFIILLFVGIPEILVNIFVPHIIPPEWSESKALAVNMIRLAAIYVTVETVMVIYAGALRGTGDTLAVMCISSGLHWLLTITAWVFFNILKIGVIETWALTVLIWTLFPLFLYLRWRGEKWRKAWEVAEHIRSYSS

SEQ ID NO: 90440 - protein, 86 aa, Unknown
  Obtained from environmental sample
  DOMAIN (26)...(81): ANTAR domain
  misc_feature (1)..(86): Xaa is any amino acid
MAMKIFWHILKLAVDTQIVLQEMQKENKELRLKIEDIRIIDRAKCILISRLNLSEEQAHRAIEKQAMDMRASKRLIAEDILKTYEE

SEQ ID NO: 90441 - protein, 120 aa, Unknown
  Obtained from environmental sample
  misc_feature (1)..(120): Xaa is any amino acid
MEIVMKIKSYICVYEYGQNNKIPIGIILYLILKRGDVFMMEIDESKLINAALYVMGKLNEAERDFLKILKIFWFADLKHITEYGRPITEDTYYKMDNGPVLTKLYDIFKDVRDHKEPLFS

SEQ ID NO: 90442 - protein, 413 aa, Unknown
  Obtained from environmental sample
  DOMAIN (1)...(69): Surface antigen variable number repeat
  misc_feature (1)..(413): Xaa is any amino acid
KIDIRGNSKTWEKVIRREIALMPGQRYRQSLMAGSQQNIMRLNYFQSAMPDILPNDDGTVDVIFDIVERDNIGQLTVGAAYSDQDKLTGTFSTAIPNFRGAGQELRLEVQYGNFRKLGTISFTEPWAFDTPLWLTGTLFADQQVYSYSSGSYYDTTMSFGFRVGVGRSRLSWPDSKFRFQSIYQLSHQRANRESAQVGDMTIIETGIMSKMRLNVERYDLDIPLFPNEGSRLTVTPEIAGLGGDYRYFKGILSYENYFRLPAKLVFGSEVKLGAITPLTGELKISRDDLFTGGGAYGDAVIRGYSDWSLGGYRHWLDGDGISMFALNMSLRYPIIDQQIYLGIFADMGNTWSSISRIDLGDLYRGVGGGLRINLPMIGVMGVDVGYGLDPLDKSGLNNAPSGISWHIIMNRGF

SEQ ID NO: 90443 - protein, 323 aa, Unknown
  Obtained from environmental sample
  misc_feature (1)..(323): Xaa is any amino acid
MAQVENDIKGKFSNLREEKSKEIYFYNNELFADYVKFIKSHELFIKELHIKEPAVKQIVKIVKKTTPSLEERGLTRYDIMQKAQNVDNDEFYTRYEDIEKELSMYDKRIWKNKVVFCNCDDAVDYDVRRTSAFALYFLRNFEELELKKLICTHYSGHVDLFHQGAKGYIFTKTGYKEIKEYPEEYTGSFDHPLSLKILREDADIVCTNPPFSRAIDYWKILIDSGKKFIIISNESNAVTTAFIPYFKDNKVWAGYNSVYFYLNPKKEIVRAAGRWYTNIKIKNRETYKRLKIMPLKEIPEKYKRYDDSKILLVDGGYIPSDYN

SEQ ID NO: 90444 - protein, 306 aa, Unknown
  Obtained from environmental sample
  DOMAIN (1)...(211): Transposase DDE domain
  misc_feature (1)..(306): Xaa is any amino acid
LAVDGSFIRLPMDQGLIDYYGALGHEGTSATALASVLYDLENDIIVDAKIEPIEGNERSLAAEHIEALMKMGDFQQGHRELIIFDRGYPSYDFIKSLEDKEIAYVMRVQKGFIREEELGTAVDRWVALGKSGKQVRTIVVDLGGEEREILITNLPETEMEYKAFKELYHKRWGIETKYKTVKQKLELENFSGRLVENIKQDFYAMMTVSNMIASCRRVADRKVKKDREGLGNKYEYQVNVNHAIGVYKDRLIRIIIEEDRVSRRHLMNELLREMERRVVPIRPNREVVRKDINRKAKFHHNHKSNC

SEQ ID NO: 90445 - protein, 164 aa, Unknown
  Obtained from environmental sample
  misc_feature (1)..(164): Xaa is any amino acid
MRRFAPQSQNQHHWICDMMYILCLYGNYSYNINRGRLRGMKICRYLMALLSVLLMTVYCANQVPPSGGPIDKTPPTVVAQFPENGQVNVNAGASVEIRFSEWINRASAAGAVSVYPVAPQGVAVRVVKNRLTVTPKEPLSGNTTYHVSISAACKTFAATRLRVP

SEQ ID NO: 90446 - protein, 286 aa, Unknown
  Obtained from environmental sample
  DOMAIN (162)...(223): Bacterial type II/III secretion system short domain
  misc_feature (1)..(286): Xaa is any amino acid
MTKIRASRLILAAVMAVSVGAFSQQTPKTYQPSQPPVGRPAASSERYNVNGDRIVDYFDVHAAELRSVLRQLSAYSGRDIISNDDVKATVTLSVTNKSWREILSIVCMVNNLAFVEESSFIYVMTKEQAATYSANMGRGGDGAGGLMNAMAMGTDLSGPLVREVIPMRFTTAAETGAAITPFLTQRGKMTAIEHTNSIVIVDTDDNLKQLKNLVSQIDIQTPQISISCKIIEASSEAVQNMGVNWGFVDGKNNVTVNQFGQSFNGFEPATMAASTQLTATYGLLTP

SEQ ID NO: 90447 - protein, 483 aa, Unknown
  Obtained from environmental sample
  DOMAIN (209)...(276): Transglutaminase-like superfamily
  misc_feature (1)..(483): Xaa is any amino acid
MNDDLVLIVKKDPADNHILMRRSVMSGYSRKQGFYRMEEIDEKIHPLRLPSRPVQFQREGFKMASQVRQEYFIVNFDAAAFIGMKETIEIIPYENWDASSFKTAYLVESLTSDAGYEHYSQSTYNEDGDLFWPGPAELGLSEKEYALYTAYGNDERIRALAEEITADYDSYADKAEVIYEWLKYGDFRYSLKPGIAPDGDQLAWFLFQSKKGYCSYYAFAMTLLLRSIGIPARIAAGFFLDPENGAFDYYQVRSDMAHAWVEVPFPGYGWIEFDPTTVNLAEGEEFRFSAGVDPNLFERLMREILENRSRLRAKTGNELRDTLGDAQSLADLSAMLLKKILLPLLIAALIIIFMLLRCGFWFLYVMRHNKRGRAVCLWKHARRRLRLAGFGYPGVKSGLSESEWAARTDAIVKGAYDMYLGTAAARFAPEYHDEDFTAMRNNYRLFSDSYRKNIPLWRRLLAWLSPPLALMVKKFGKSGLAVL

SEQ ID NO: 90448 - protein, 417 aa, Unknown
  Obtained from environmental sample
  DOMAIN (64)...(347): Transposase DDE domain
  misc_feature (1)..(417): Xaa is any amino acid
MTAFYLIAGDKPLMYMEDWLSENESFQVGKMSSQRLSELLGAFGQKERNDFFSAWCTANSSDEYMAVDITSVSSYSQLITDCEHGYNRDGENLRQINLCLLFGEETQMPIYQTTYSGSLKDVSTFEATVAEMKAVSGGKKLVLVADKGFYSGKNVQILAERHRGDEFLIAVPFSNKWAKELVREERGRIERAANLIKTSGSPYRGVSRPVSLFDLQLTAHVLYNPECALSERNELYSHVAWLKDMAESGKKTSAFQREIEKYLSVRKGKALCVQIREDVIEQELEMSGWLVILGNGKLTAQKAHDIYRKKDVVEKAFMKYKNLLDLRRLRIHSDENKLFAAFLALTLVSYIHKVMKEKDLYRKMTMEKMFITLSKLRKVTINGYDILRPTTKEQRDIFSAFSIPRPLVGQILERELR

SEQ ID NO: 90449 - protein, 199 aa, Unknown
  Obtained from environmental sample
  misc_feature (1)..(199): Xaa is any amino acid
MKETFTPWAFMDEYRGKVFNGVWPTLPELFRITVSRHGQRQCFTVFEPDRVSLNYTEALALIQAVARWLYSKGIRKGDKIALTSKNSPEWAVAYLGIVFAGAVVVPIDYQLKNEETELLMRTARAKILFVDEEKHTHFKENPKDLTDIVSLKKGVGQYIYDLNGPEAAIEEATENDLAAILFTSGTTGDPKKVMLAHRI

SEQ ID NO: 90450 - protein, 301 aa, Unknown
  Obtained from environmental sample
  DOMAIN (23)...(283): Protein of unknown function (DUF558)
  misc_feature (1)..(301): Xaa is any amino acid
MKQFILNKEPDFSQGSGDKDGIVRLEGNDYHYLVNVRRLATGEFFPALLPNGKKTLVQVLSIERGVLTGKCNTGRFDTSTLRRFDKLSVHKLSDHTGEGVAESSAHRQENNIPPIILFQAIPKSDKMDLIVRQAAEGGITEIVPFVSEFSTAKITSEKGQKFLRWERIIKEARQQSGSKTATALHQPLTINELFNYWKKLQEKTTINSLGLLFHHQKGLEQKSLHEYLNSMPSFVTFAIGPEGGFSEKEVSLFLENGFKPLTIGDTVLRTETAALYCAAAVRILSLEKDSWELKQAKSDRE

SEQ ID NO: 90451 - protein, 220 aa, Unknown
  Obtained from environmental sample
  DOMAIN (68)...(106): WD domain, G-beta repeat
  misc_feature (1)..(220): Xaa is any amino acid
VFSPDGKYFISGSSDNNIRLWDAQTGSVIRVFSGHTESVTSVVFSPDGRYFFSGSRDQTVKLWDVIAGKEIRTFTGHTSYVSSIALNSDGKYLVSGSWDKTIRIWDVQTGNEIKKIDGLKLNVYSVALSPDEKYILSSLGGYPNTAGDLVYLWDFETCRLVRSFSGDIYYTNTALFSPDGKYILSGGTSSLKLYDIESGQETVTFNGRNGSIHSAVFCMN

SEQ ID NO: 90452 - protein, 225 aa, Unknown
  Obtained from environmental sample
  misc_feature (1)..(225): Xaa is any amino acid
MTPCSAPDWDVLESLFKTHNYWKNVSESVLFPVQEELEKRGIMVAEDRDNFDYLYLREELAELTGKKFHKKKNLVNQFLHTYPDHEQRFLTAALVPAAVEILDRWHATKTDTGGEADYRAAKEALDLFDFLKMRGAIYYVGGKPAAYCLGESIAKGKMFAIHFEKAIEEYKGVYQFINQAFAAALPGFFTWINREQDLGNEGLRHAKTSYRPSGFVRKYTGRMTE

SEQ ID NO: 90453 - protein, 138 aa, Unknown
  Obtained from environmental sample
  misc_feature (1)..(138): Xaa is any amino acid
MKKSIFIALCVIMLAFQSLFAGGVQQGAQNTGLVQGKGQAKYVFLFIGDGMSMSQISAAEVFSTARSSSDITITKLGFTQFPVSGLATTYDAGTFITDSASAGTAIATGNKTLSGVINMDAGKTVKFKPITDYIRSKK

SEQ ID NO: 90454 - protein, 90 aa, Unknown
  Obtained from environmental sample
  misc_feature (1)..(90): Xaa is any amino acid
VYRYRWLNGVDIRDNQETMAVNYVYMEIENEEKGKITYKNSWITNKAVTEENAVLIASCGRARWKIENEHNNVLKNHGYNLEHNLDRGEH

SEQ ID NO: 90455 - protein, 257 aa, Unknown
  Obtained from environmental sample
  DOMAIN (206)...(257): Domain of unknown function (DUF1732)
  misc_feature (1)..(257): Xaa is any amino acid
MPVRSMTGFGLAEAATPSGTYRVEIRAVNNRFQELQIRQPKFMLNLEPKIKKEITGAAVRGSISVFISCDKGDSGPVSLTWDKEGLDGYMRIFNEIKKTYKLSGEIAISDLLRFGDFIKSESEVHDDEALWKHLRPPLTAALKSFQESRETEGAQLVKELKKTLKEISKTLHLIEKRAPQRVKEYGAALSDRIEKMLSGNLPDPQRIAAEVTMMAERLDITEEIVRLRAHIEKFSADFDANEPVGKRMGFLLQEMNR

SEQ ID NO: 90456 - protein, 657 aa, Unknown
  Obtained from environmental sample
  DOMAIN (100)...(245): Thiamine pyrophosphate enzyme, C-terminal TPP binding domain
  misc_feature (1)..(657): Xaa is any amino acid
MDKNALTQVALSVRSLAMDAIQKANSGHPGVVLGAAELGAILYGEILRHDPSDSRWPDRDRFVLSAGHGSMFLYSLLYLSGYSGMTMDAIKSFRQVGSAAAGHPEYGAAEGIEMTTGPLGQGFATAVGMAIAETMLSARFNTPARKIVDHYTYVLSGDGCLQEGVSGEASSLAAHLGLGKLIVYYDSNKITIDGSTDLSFTENVAKRYEAYGWQVLSGSMYDFEEIAKLTAQAKAETKKPSLIILTSVIGKGAPNKQNTADIHGMPLGMEELALARKALGIPGDPATLNFYVSQEAEAYFKAKRDEWKKTREKWLAEFDAWAKENPDKKKEWDAFYSGKPVKAALPSFAVGEKIATRSAGNKALNAVANANPNLVGGSADLKGPNAVGLSNAAVYSASERSGRYIHFGIREFAMAAISNGISLHGGFRPFCSTFMVFSDYLRPALRLSALMKQPVIYVLTHDSIYVGEDGPTHQPVEHLAALRAMPNVRVLRPADAEETAEAWDMAMERKDGPIVLALTRQNTVVFAKKDSEWKNKLRTGAYIVKKPAGPVDVVLIATGSEVNTALAAAELSGKNVQVVSMISRELFESQSEAVRNSVVPPGVRTVVCEAAVRQGWERWAKPEDIFTIDRFGESGPYEKAAESLGFTAKALAELVGR

SEQ ID NO: 90457 - protein, 170 aa, Unknown
  Obtained from environmental sample
  misc_feature (1)..(170): Xaa is any amino acid
MKLLFPFTRSYAEIRRLAREDAAQAKPLSPTIDIVFKNLFSGKDEDSREALRLLLSSCIHRPVIDLRLQNTEILPTFLLGKLYRLDVHVTFNDGEQADVEMQVNRSNDDLKARSLLYASRLLESQLERGEDFKDAKRVYVIFFLDFVLFPQSAKVPRRYILMEETGTMTF

SEQ ID NO: 90458 - protein, 260 aa, Unknown
  Obtained from environmental sample
  misc_feature (1)..(260): Xaa is any amino acid
MPDRGQTQTIVFTGNQPGKLHGFPVSGSRDVFEVVFQTGGRDVSLKFRRNGQNYFELFSAVIDTRPYTLRSDTEIIQLAINSNITGGANEIQAYAQAGRSGFVEGKGSLSKNQIIAYIKKQNSSINAALLNKLIDTYFEEAASENINHDIAIAQMLYATNFLKNQRVSSHNYGGLIELPGWNGKFANMTEGVRAHIQHIKGYASTTMNNRQIVDPRYYLLINLKYLGTVKTFDQLYTRWAANPAGYKQNIEKILDGLSNR

SEQ ID NO: 90459 - protein, 370 aa, Unknown
  Obtained from environmental sample
  DOMAIN (2)...(264): tRNA synthetases class I (R)
  misc_feature (1)..(370): Xaa is any amino acid
WYVSFSKTLKQETDELIKSGADKEKAEAQTQSMKKAQELLRNWEAGDGETVDLWKKMNSWAIEGMKKTYNRTGVSFDKYYFESETYMLGKDEVLKGLEKGIFFRQEDGSVAVDLSEEKLDKKILLRSDGTSIYITQDFGTAINRHKDWQFDKMIYVVGSEQNYHFKVLFILLEKLGYSWAKNLHHLSYGMVNLPEGKMKSREGTVVDADDLLDSLRDMALTEIREKGREEVVGDPNEVAEKIALGALHYFLLQPTPVKDMLFDPKESLSFTGNTGPYLQYMGARISSMLRKAEKTDNSGAINSRADFSLLVSDPEWTLIKSLASYPAKVSESAENLDPSNLTGFLYDVSKAFSFFYHECPILNCEDSALS

SEQ ID NO: 90460 - protein, 99 aa, Unknown
  Obtained from environmental sample
  misc_feature (1)..(99): Xaa is any amino acid
CYLSQQSIEKILKAYLIAKENKLTKTHDLKILITKCEQYSPDFRNFNAICASLLQYESLTRYPPILELEEYDMKQALKNALQIMEFTKSKLTEMGFCAT

SEQ ID NO: 90461 - protein, 53 aa, Unknown
  Obtained from environmental sample
  misc_feature (1)..(53): Xaa is any amino acid
MNFKIEFEQETDGRWIAEIPEIPGVIVYGATPSQAGAKAKALALRVLADRMDG

SEQ ID NO: 90462 - protein, 383 aa, Unknown
  Obtained from environmental sample
  DOMAIN (12)...(383): Transposase, Mutator family
  misc_feature (1)..(383): Xaa is any amino acid
MPRYKLSPEERAAEKARKEQLLTLLSTLNVNKVEDFQGLYKDMVGAFLESGLEAELEDELGYSKYDYRTKETDNRRNGHSKKSLTTTDGELEIKVPRDRNGEFEPRLVKKHQTSLTGEIEEKIISLYAKGMTVSDIDRQIREIYGVECSDSTVSRATDKIVPIAKEWQQRPLDSVYPVVFLDAIHYHVRSEGVVVKKAVYIAIGVKDDGRKEVLGMWVGENESAKFWASILNNLKNRGVTDILIACVDGLTGFPAAIEAVYPKTEIQQCIIHQIRNSTKYVASKDIKALMADLKRVYAAVDEQAAQSELDRFAAAWDKKYPKISVSWRTNWGNLSTYFKYPQEVRTLIYTTNAIEGFNRQLRKVTKNKGVFPTDDSLLKMLYL

SEQ ID NO: 90463 - protein, 482 aa, Unknown
  Obtained from environmental sample
  misc_feature (1)..(482): Xaa is any amino acid
VAYATGRKTLNGAPAINPDTLKARGFTPEAIAAAEEAVKTALGLEGVFNPWILGRDFVEKILHIPESTWSLQGFSLLRHLDFSSEDIAEAELYACGTMGLEGAPGLNTEHYAVFDTATPSGKNGRRSISWTAHISMMAAVQPFISGAISKTINMPNGANYEDVKGAYMLSWKNALKAVALYRDGSKLSQPLSSLAPGTDPLADTILKVEKGIDLQSLTADPRKPAVRGIRKPLPNRRMGYTQKAKIGGHSIFIRTGEYEDGNLGEIFLDMHKEGAAFRSLLNSFAITVSLGLQYGVPLEEYVDAFTFSRFEPNGMVQGHDYVKMATSVIDYVFRDLAISYLKRSDLGQVKPEDLVATAMKSETETPDQKGRGEKNSAGFRPNSVTVPAVKPVKQQPQGTGGGSSPQGNAPKGLAYSSAVAQPQTQVAVMESSYPQENEVIRIVQARIKGYEGDPCSSCGSFTLVRNGTCMKCDTCGSTTGCS

SEQ ID NO: 90464 - protein, 916 aa, Unknown
  Obtained from environmental sample
  DOMAIN (20)...(497): Ribonucleotide reductase, barrel domain
  misc_feature (1)..(916): Xaa is any amino acid
ALDVDHPDVEKYINWKAAEEHKVASMVTGSLILKKHIDAIKRALTGFRGPEDDKFNTEKNHELAMVLRAALGDKIPPSYLYQQLRRLEQGDEEVDVSQYSTAWDDEAYNTVSGQSSNNSLRLSDDFMKAVLNDEDWQLKSRTVGDTIKIVKARKLWSDIAKTSWQCADPGLQYHTTINDWHTCPAGGEIRASNPCSEYMFLDDTACNLASINLAALYDKRKKEFNVEGYLHAIDIWTTILEISVVMAQFPSSRIAELSYQYRTLGLGYANLGTLLMIMGLAYDSDQGRSVSAALSALLSGEAYAQSARMAQEHGSFARYGENAENMLRVIRNHRRAVNNAVDSEYEGLHTIPRGIDTAHCPAYLLNSAKSAWDRALDLGKAHGYRNAQVTAIAPTGTIGLLMDCDTTGIEPDFALVKFKKLAGGGYFKIINQSVPPALESLGYSPQAIEEIVAYATGRKTLKGAPAISHETLKTKGFTNEALAAVEESLKTAINLEGVFNPYVLGKSFVEETLNIPESTWSLQGFSLLKHLGFSTQDIEDAELFACGTMGLEGAPGLKKDHYAVFDTAAPSGKKGKRSISWTAHIGMMAAVQPFISGAISKTINMPNSANYDDVKGAYMLSWKNALKAVALYRDGSKLSQPLNTFAPGTDPLADTILKVEKGLELPASAPDKRKSASLRGLRKSLPNRRMGYTQKAKIGGHSIFIRTGEYEDGSLGEIFLDMHKEGAAFRSLLNSFAITVSLGLQYGVPLEEYVDAFTFSRFEPNGMVQGHDYVKMATSVIDYVFRDLAISYLKRSDLGQVKPEDLVATAMKNEAEASDPKGRGEKNSAGFRPNSVTVPAVKPVKQQPSGNSGNAPKGLAFSSAVAQPQTQVAVMESSYPQENEVIKIVQARIKGYEGDPCSSCGSFTLVRNGNPV

SEQ ID NO: 90465 - protein, 821 aa, Unknown
  Obtained from environmental sample
  DOMAIN (1)...(64): Putative carbohydrate binding domain
  misc_feature (1)..(821): Xaa is any amino acid
MQYGHFDDEAREYVITRPDTPYPWINYLGSEDFYGLFSNTSGGYCFYRDARMLRLTRYRYNNVPADSGGRYFYLRDGGADVWTPSWMPMKSELSRYECRHGMGYSRISSARNGLAFSQVSFVPLHDTCEIHKITLTNESNVDKRVDMFSFIEFCLWNANDDMTNFQRNFSIGEVEIEGSRIYHKTEYRERRNHYAVWAVNVPIEGFDTDRQTFLGLYNGFDHPQAVFDGEAKNSVASGWAPVGSHHIKARLAPNESKTFVFVLGYCENPEDQKWEKQGVINKKPANALLEKYGTSEAADKALAALNEYWKNLLGRFTVEAEDKKMARMAGIWNQYQCMVTFNMSRSASYFESGIGRGMGFRDSNQDLLGFVHLVPERARARILDIAATQFPDGSAYHQYQPLTKRGNNEIGSGFNDDPLWLICGVAAYIKETGDYGILDEKVPFDNNDALADTLFIHLKRSFDYTVTHTGPHGLPLIGRADWNDCLNLNCFSKTPGESFQTTANYESGVAESVLIAAIFAFTGPDYVEICRRTNRAEEAEYAEKAIAKMIEAIDQHGWDGDWFLRAYDAYGKKIGSRECDDGKIFIESNGFAVMADIGIKDGRARKALDSVKEHLETPYGIVLLQPAYKDYHLELGEVSSYPPGYKENAGIFCHNNPWVTIAETRLGRGNRAFETYAKICPAYREDDSDLRRLEPYVYAQMVAGKDAIRHGEAKNSWLTGTAAWTFVSISQYILGVRPVFDGLMIDPCIPSSMKEFTVTRHFRGADYHITVDNSAGVEKGIKSIMVDGDLLDGEALKKAVLPVFGDSKAHKIIVTMGNNNA

SEQ ID NO: 90466 - protein, 116 aa, Unknown
  Obtained from environmental sample
  misc_feature (1)..(116): Xaa is any amino acid
IYHNCGGATIKMIDSLLAVNADAYHFGNAIDMAEMMPHIPENTIALGNIEPAGQFRNGTPESVRKATLDLMSKCCKYPNFVVSSGCDIPPLSSWDNIDAFFAAVEEFYSGVDSLRK

SEQ ID NO: 90467 - protein, 544 aa, Unknown
  Obtained from environmental sample
  DOMAIN (307)...(544): FAD linked oxidases, C-terminal domain
  misc_feature (1)..(544): Xaa is any amino acid
MAHKYQNYEPNWFHGKIPANSYRSIFKWGESEKIKAPRESLYKLILEELGLTNENFSSYSEDLGLNEVKFDLPVKLTEHQIARLREIVGKDYVRTDDYARLSVAYGKTMYDLMRLRHKIVQNVPDAVLYPDTKEQIERLVAYCAAEKIPLYVYGGGSSVTRGVECVKGGVSLDMRLRFNKVVSFNEVDQAITVEAGISGPKLEEILNNAQTYFGARRAYTCGHFPQSFEHSSVGGWVVTHGAGQNSTYYGCIQDIVLGQDYATPVGVISTDRYPRKATGPDMGQIMMGSEGAFGVLTHVTLKVFRHMPQTIKRFSYMFKNWETGQAAAREIMQSEAGYPSVFRLSDPEETGIMMHAYDVVDSPLRHIFSARGFKVGEMCLYLGFTNGEAGFSRNCVKNVARVARKYGGIWLSGMVTRSWEKGRFSDPYLRDTLQDFGVVMDTMECSVNWSNMGKVHREVRAYVKSRPKTVCMTHMSHVYPQGANLYWIFIAHMHDPEEFRLFHAGILDAIQKSGASISHHHGIGKMFGPWLEGSIGRNEHAVYR

SEQ ID NO: 90468 - protein, 378 aa, Unknown
  Obtained from environmental sample
  DOMAIN (124)...(272): FAD binding domain
  misc_feature (1)..(378): Xaa is any amino acid
MAHKYKGFEPDWFNGKIPSNSYRTIFKWGESEKIKAPRESLYKLILEELGLTNENFSNYSEDLGLDEVKFDLPIGLTEPQIAHFRKIVGKDYVRTDDYARLSVAYGKTMYDIMRLRHKIVQNVPDAVLYPDTKEQIERIVAYCAVEKIPLYVYGGGSSVTRGVECVKGGVSLDMRLRFNKVVKFNEVDQAITVEAGMSGPKLEEVLNNAQTNFGAKRAYTCGHFPQSFEHSSVGGWVVTHGAGQNSTYYGCIQDIVLGQDYATPVGSISTDRYPRKATGPDLGQIMMGSEGTFGVLTYVTLKVYRHMPQTIKRFSYMFRDWETGQAAAREIMQSEAGYPSVFRLSDPEETGIMMHAYGVVDSPLRYIFSAQGFQGWRD

SEQ ID NO: 90469 - protein, 423 aa, Unknown
  Obtained from environmental sample
  DOMAIN (6)...(353): FAD dependent oxidoreductase
  misc_feature (1)..(423): Xaa is any amino acid
MVSEVDVAVIGGGPAGLAAAIAAEQSGAKTALIEREDHLGGILKQCIHDGFGLIRFGEKLSGPEYSHRYIAELKKTGVSVHLQKFVIRINNLGAGFELTLSGSGGIENFSAKTLVLSTGCRERTARQAGIYGTRPAGGITAGAAQYYTNILGQLPCRRCVVLGSGDIGLIMARRLTLEGAEVLGVYEAKPTPSGLSRNIAQCLDDFNIPFYTSRTVSRVFGRERLTGVEIAATDEAMRPIPGTEEPVACDGLILSVGLIPENELAESLEIPIDPRTKGPVCDQHCMTEIPGVFSCGNALLVNDLVDYVSESGEEAGESAARFAYSDIEQSTRNTTSLEFDSAFLCMSPQRLDLDSLEEETTIFFRSREERDDTLVTFTVNGRELFTKQYSKLRPPEMERISLRLKDAGMQSGNTISAVMESCQ

SEQ ID NO: 90470 - protein, 457 aa, Unknown
  Obtained from environmental sample
  misc_feature (1)..(457): Xaa is any amino acid
MKQQVVCEVCQGELFKQENMFICQHCGIKYSIEAVKRMLTEMQLKEKKLKEGDRLSEEQKLKEEAERLKEEEKQRLMEEQRLKEEERQRLKKEEEEKIMAEEKRLMDEEKRLKEEEQKLIAEKERLKEEKRLREEQRLKEEERLREEERLREVQRLKEEELKLIAEEQKLKEEKERLKEEQRLKEEERQREEQRLKEEQQKIIAEEQKLKAEKERLTGKLRVITEVPQEEAPQEAPKKEVAEEAPQEAPKEEVAEEAPQEAPKEEVAEEAPQEAPKEEVAEEAPQEAPKEEVAEEAPQEAPKEEVAEEAPQEAPKEEVAEEAPQEASQEKVAEISKGDEKSIFDEPVKEKKKKGCFIYFIIIIFLLAIAAYFAKPYYIDIYYDYIGEKPEKENENAVVEADTLKQNPEQNLGASDSTENPSDTTAAKEEQDDKNAKKTEAAKKTEAPKNELKLKSNG

SEQ ID NO: 90471 - protein, 57 aa, Unknown
  Obtained from environmental sample
  misc_feature (1)..(57): Xaa is any amino acid
MSINAVTPVKEFADILTPEYKALAADGPYGKQTSVDDLGTFKEITEPHPHCAGCGVA

SEQ ID NO: 90472 - protein, 289 aa, Unknown
  Obtained from environmental sample
  DOMAIN (9)...(57): Sigma-54 factor, Activator interacting domain (AID)
  misc_feature (1)..(289): Xaa is any amino acid
MILLIMQYQRQSFAREQHLKMNPQLLQSIKLMELPAAELRERITQELERNPALEIVEDKSTVTLNDEDDKRQKEIVYEYFETSSDPGRRGAQAAEEHNRFIEGALTRPETLQEHLLRQLQLEPVDEELREIAETLIQNLNDDGFHKEKPETLFASPQQRLGEAMELVRGLEPAGCCTSGYRESLLAQIALLGDAPCEISVMEKVLDNLDLVDREKYATLAKKTGLDDEEETRIICEYIKKLYPFPGRAFASTEVRFVVPDIKVVRNNDGFTINLNDEAFPVLGINKNLK

SEQ ID NO: 90473 - protein, 543 aa, Unknown
  Obtained from environmental sample
  DOMAIN (266)...(455): Adenylate and Guanylate cyclase catalytic domain
  misc_feature (1)..(543): Xaa is any amino acid
MFTNLGETRDKFWGEQAGADVYIEKSPENFGELSAQIQRLLNENRAIDFEAVKKEGEKVTDNSLIETVNNILDNKLFQATLIGMLAELSSKVSSLEETVKGVFALLRNACKADMCSIMIKDADDALVVYNANNLGYTEAIAEDFKAITIADFNTRFSDYKVDSKEVYDFFPAGEINERIESYILIPLVNADDEFATVHIGTSVKEYFSPLILENLNVFLSAASPIVANALRLKQMEALQKKTKAAFARYVPIDVMDEIIKKSSSPSSQSESRVISILFSDIRNFTKISENTQARELVDFLNAYFSIMGNEIIAEGGNIDKFIGDAIMAIFGAPKTLENSAASAIRAALRMAKALAKVDTSSITLPEAGFGAGIGINCGECVVGNIGFQNKMDYTVIGDSVNLASRLEGVTKYYHQYIIVSEYAYNAAKDDFIFRKTDSVRVKGKDQPVGLYTVYAAYRGEEDEQTPASIVIGREALDQYNKGLKLYAMREFETAKQYFNSTLSLEKKAGMDDYLASMYLSRIEEFQINPPPPDWDATITMTEK

SEQ ID NO: 90474 - protein, 624 aa, Unknown
  Obtained from environmental sample
  DOMAIN (4)...(119): Response regulator receiver domain
  misc_feature (1)..(624): Xaa is any amino acid
MDKRRVLIFEDSDIFADLLLELLNGEGCETQRAKNGLEGIKLVYSFLPELVITAVEMPLLRGYQAARFLKSRPAAGNIPIIMFTNLGETSDKFWGEQAGADVYIEKSPENFGELSAQIQRLLNENRSIDFEAVKKEGEKVTDNSLIETVNNILDNKLFQATLIGMLAELSSKVSSLEETVKGVFALLCNACRAEMCSIMIKDADDALVVYNANNAGYTEAIAEDFKAITIADFNTRFSDYKVVSKEVHDFFPAGEKNERIESYILIPLTSSGEEFATVHIGTSVKEYFSPLILENINVFLSAASPIIANALHLKQMETLQKKTRAAFARYVPIDVMDEIIKKSSSPASQSESRVVTILFSDIRSFTKISENTPARELVDFLNMYFSAMGDQIIAEGGNIDKFIGDAIMAIFGAPKTLENSAVSGVRAAIRMVKALPQVDTSNITLPDIGFGAGIGLNCGECVVGNLGFQNKMDYTVIGDTVNLASRLEGITKYYHQTIVVSEYIYTAAKDDFIFRKADSVRVKGKDQPVGLYTVYACFRGEGDEGVPPVLVIDREALDQYNKGLKLFAMREFETAKQYFNTTLSIEEKAGKSDYLASLYLSRIDEFLVNPPPPDWDGTITMTEK

SEQ ID NO: 90475 - protein, 273 aa, Unknown
  Obtained from environmental sample
  DOMAIN (4)...(119): Response regulator receiver domain
  misc_feature (1)..(273): Xaa is any amino acid
MDKKRVLIFEDSDVFANVLLEFLNAEGCETQRAKNGLEGIKLVYSFLPELIITDVEMPMFKGCGAVRFLKSRPAARNIPIIMLTNPGETKDRFWGEQAGADIYIEKTPENLDELSGQARRLLGENRQVDYERIKKEGEKINDNSLVEMVNNLLDNKLFQATLTSLLAELSGKVISLEETVKGVFALLENACRAEMCSIMIKDADDALVVYNANNAGYTEAIAEDFKAITIADFNTRFSDYKVVSKEVHDFFPAGERNERIESYILIPLTSANE

SEQ ID NO: 90476 - protein, 220 aa, Unknown
  Obtained from environmental sample
  DOMAIN (3)...(119): Oxidoreductase family, C-terminal alpha/beta domain
  misc_feature (1)..(220): Xaa is any amino acid
GRFGKILHGAVQIRWNRNEAYYAEAPWRGTWEQDGGTLMNQCTHGIDLLQWIMGEDAVRVQAQTRRFLRPIEAEDFGAAIIEFRNGSVGIIEGSADIFPKNINETLSVFGEKGSVVIGGLAVNKLEIWRFADAETTGDTEEKVLNPNEKDPPTVYGFGHSALFKDFIEAIEENREPLISGESGKKALEIILAIYKSQKTGKPVSVPLNFSTLNMKGYFKK

SEQ ID NO: 90477 - protein, 55 aa, Unknown
  Obtained from environmental sample
  misc_feature (1)..(55): Xaa is any amino acid
MKVPFYDAVREYNLYKKEFDNAVTDVFNSGAFILGKQVQDFEEAICRYTGAQYSV

SEQ ID NO: 90478 - protein, 68 aa, Unknown
  Obtained from environmental sample
  misc_feature (1)..(68): Xaa is any amino acid
MKYKKTTVKKGASIGANATIVCGVTIGEYALIGAGSVVTKDIPDYSLAYGNPARIHGKVDKNGGICQK

SEQ ID NO: 90479 - protein, 450 aa, Unknown
  Obtained from environmental sample
  DOMAIN (59)...(92): Tetratricopeptide repeat
  misc_feature (1)..(450): Xaa is any amino acid
IVVALKELAPHIPAVQCLPLNFLASSYLDMGEYAKAEICYLEAAAIEEKALGKEHPSYATSLHSLGVVYHRMGDYAKSKRYYLEAIAIEEKAQGKENPSYAVSLDTLGFLYYSMGDYAKAERCFLEARTIFEKKLGKEHSDYAVSLNNLGILYDSMGDYAKAERYYLEATAIREKTLGKKHPDYATSLGSMGSLYNNMGDYAKAERYMLEATAIREKSLGKEHPDYAASLNSLGLLYYNMGDYDKAEQYCLEAIAIREKALGKEHPSYASSLSSLYSIYLSKKEYTKALAYNQEKIKLRTSLVNKNFSFQTEQQRDAFWNINSSFFEGSYSLSFFYPVPESNIINYDNALFTKGLLLRTTNAVRDAIYSSGKKNLITQFEELGSLRQQISALQLSGVNKTQIKSLEDKADALEKSLIKSSAAFKDFQSDLAVNWQNVKKSLQAKEAAIEF

SEQ ID NO: 90480 - protein, 210 aa, Unknown
  Obtained from environmental sample
  misc_feature (1)..(210): Xaa is any amino acid
MKTNYIKIPFFWLIFTAGLGFAVDIESIESYKVTEYLLSLKEPGAPAFIEDMVVFTASSSLRRVGIAFADEGFNKVHWFRQMLVSKDPLEMLSEETKKPNPYKDSGILFYVHKPPEKVAAIEYRLIINGLWTTDPANPDMRRDGNSGLTWSTLALPPREPELNPLKGPPGSLSFFFKGPPGETVSVGGSFNGWDPFMYELKEGLPGNYTI

SEQ ID NO: 90481 - protein, 285 aa, Unknown
  Obtained from environmental sample
  misc_feature (1)..(285): Xaa is any amino acid
MPLLSELREFQASFANIGDQKANLAAKKIPINDLKLPETEAEPASPEEPASPEEPASPADLMPETTEADTSGGVSGGGIDDLNFADLLNAVPGDLSVPDDIEVQSAAADEAGDSSEQPVDSADSAEKTEDLYFPDELLSNLSEEIEPVPAAADSLDSDSGSNLDNLDNLEKFSFPDLPAEPAPADASAQTDTPVPADEPVPTDIEGALDLSVFDDLGDFGDLGASSSEGETSDVSDSGLPEPQPSPQGEGSPLEEPAAVSEVETPELGDLGLPEPQPSPQGEGSP

SEQ ID NO: 90482 - protein, 409 aa, Unknown
  Obtained from environmental sample
  DOMAIN (12)...(182): Archaeal ATPase
  misc_feature (1)..(409): Xaa is any amino acid
MAEKHVIRHGYLKTLENLRDKNLIKVVTGARRIGKSTLLTQYRDALNAKLPDAPTLSINFDEPEYRFLAEKGWKDVYDFVSLTLHGEKVNYIFLDEIQNVPQFEKLLEGLFVHPKVDLYITGSNAYLLSSELATLLTGRTFEINVLPFSFSEFLEFNGNTENTDRAFVNYLNYGGFPEAVKLANVGENYSFRYLQSIFRNIYENDIKPRYSIHSDISYREIVDFLADSVGSPMSPRNIAKVLTNSGKKIDHKSVSKYISTLIDSYIFYRASRYDIKGKQHLTTQEKYYAVDTGLRNALLGKELSSDRGHLLENIVYLELLRRENQVWIGKIGNGEVDFVARDNAGVTKYIQVSQSVKNPETLTRELTALDKIPDHNEKILISADYETGQRNAIKQVNIVNWLLDRAETV

SEQ ID NO: 90483 - protein, 565 aa, Unknown
  Obtained from environmental sample
  misc_feature (1)..(565): Xaa is any amino acid
MQSGKILSAVTLLLFSLVSVYAQYDSESDFETELSEDRRSVRIIEYLGNKQNVSIPAKIQGLPVSEIGWGVFRGRDFTSITIPNSVTGIGEDAFYRCERLTSVTIPDSVVSIGRGAFNECISLISVTIGKNATQIHYGAFLDCDSLTAINIDVNNKTYSSQDGVLYNKNKTVLFMYPAGKKGSFLIPNSVLSIDDCAFMRRNGLTSVIMPDSVISVGEHAFSNCNGLTSVTIGNSVTEIGEFVFWGCEGLTSVNIPNSVKSIRYAAFSGCTGLTSVNIGNNVTEIENAFNRCTSLTAINVGADNKTYSSQDGVLYNKNKTVLIMYPRGKKGSFNIPNNVQNIGDNAFFVCEGLTSVTIPNSVIGIGEFAFFECISFTNVTIPDSVISIGANAFGNCVNLTGVIIGKNTTKMDYAFLGCASLTAINVDVNNKTYLSQDGVLYNKNKTVLVTYPAGKKGFFLIPNNVQRIGGSAFSGCVNLTAVIIGNNVTEIGGGAFYECIGLKKIIIPNKVKTIEAFAFYRCNNLTDVIIGNSVTEIRESAFYDCKSLTKITIPESVTEIREEAF

SEQ ID NO: 90484 - protein, 234 aa, Unknown
  Obtained from environmental sample
  misc_feature (1)..(234): Xaa is any amino acid
TGIVYSAETVKRFANLKPAAADFRIYWDNAYAFHDLGDKQKPLSNIIRLCEEAGNPNMPFVFSSFSKVSFAGASVTCMASSKSNCEYIRRRLATQTIGPDKLNQLRHARFFKDAAGVMAHMEKHAAILKPKFRLVNDTLNRELSGLDIAEWTNPEGGYFVSFDSLDGCAKRIVSLCAEAGVSLTAAGATFPGGNDPRDRNIRIAPTCPPIEDLGKALEIFCAAVKLAAAEKLSD

SEQ ID NO: 90485 - protein, 276 aa, Unknown
  Obtained from environmental sample
  misc_feature (1)..(276): Xaa is any amino acid
VRIKNTRDNTDVVPIWLTLSPQRTVLECDGDGNVLAGLLPLYVQANLYMWNMRIPLASFIEYYPSSTADLFDPMLGDFYPCGEKDIKFSLLDAPNGITVNNNGVITIDAGAELDDENSITVQARYNGETYSAVLFIGKDVRSSPARYLGTINTLPETPAVFIIKGPVQGNVRARQGDYVLAVADGYAWQKGYVYQWTGTAWEKRAPDQYTDLYIRCFKDGLDVPELTQDMGWFGALFARILIAQQAFIEELQTQVITLKNYGLIQSENYVEGVSGF

SEQ ID NO: 90486 - protein, 148 aa, Unknown
  Obtained from environmental sample
  misc_feature (1)..(148): Xaa is any amino acid
MRVLATSRLNGILERFNYIATSKLPVYSGAGTGRLYWLNTAETRNPAAALLYALQGRAAQQAVAPEDIDWPSFEAFYTWCEEHNYACNAYLSDPVTIADILRMIGNTSRADVLRIDSKVSIVQDVERYSPVQLFTPKNTISYSVTMFN

SEQ ID NO: 90487 - protein, 222 aa, Unknown
  Obtained from environmental sample
  DOMAIN (40)...(211): DNA methylase
  misc_feature (1)..(222): Xaa is any amino acid
MLFEQNRIKKIAEEFSAESDIVISRGNAFDVLQQCPSDFASLIITSPPYNVGKEYETQINLEKYLNGLEPVLEQIVRVLASNGSLCWQVGNYVEDKEVFPLDVYFYPLFKKLGLKLRNRIVWTFEHGLHCSIRFSGRYETLLWFTKGDRYIFNLDSVRVPSKYPGKTHFKPGPKYGLPSGNPLGKNPGDVWKLLLHEWEIGLWNIPNVKANHPEKTLHPCQF

SEQ ID NO: 90488 - protein, 304 aa, Unknown
  Obtained from environmental sample
  misc_feature (1)..(304): Xaa is any amino acid
MNQTSILIVPCCEEGRGGGHLNRCISLTNDLRSSGREAYLYLQENNEKINNLLQLKNFDTSHILNKNQITRPFGLIVLDRFQTPHDELLRWKKMAPVIGIDEGGKCRDYFDFLIDILIPEGFEKPSANITSCGLLELPEKRKTGHYVKKSKLKILVTFGQEDAAGLGISAIEKIVQMNLKEVEITLLKGGLNNSNTPIPDYVKVLDSIPNLADHLYEYDIVITHYGITAYEALCAGAKVFLDHPTPYHKKIAKAAGFQDISKLGTLSSWLKIKEESLSDLINSFSPHVNKTCPVCGKEANKRSM

SEQ ID NO: 90489 - protein, 275 aa, Unknown
  Obtained from environmental sample
  misc_feature (1)..(275): Xaa is any amino acid
MFTDTAGRKDFMDSEKFKSLLDKITAFSGDAVIDLSLWGELSLHPEKMRLIEEVLRRPELALIIETSGIGWKNEEIEKCAELCGSLEKNAVVRKNALPPLSWIVSLDTSDTQHYAELHGNGFAEAEALVKKLFSLFPNDCYVQAVRVKGAEDDTEKFYRYWKTASPKNEKNIIIQKYDDFCGVLEKKQASDISPVIRQPCWHIMRDMPILINGDVPLCRENLSVLKGEKKDILGNVFADSLETIWQNGDKYYKEQCMKKYNGLCAGCDEYYTYNF

SEQ ID NO: 90490 - protein, 319 aa, Unknown
  Obtained from environmental sample
  misc_feature (1)..(319): Xaa is any amino acid
GIADICSAFTNYRERPGEVMWIERRGSGGNGHGRGRSADVWPVFTQSPVDLAESLKESLFLPNKTVVCVSATLAVSENFNYWAVRCGAAFVADRPFFTGCFPSPFPYSSAVLLAAPDDAPLPDEPDYQAFVDRAVGQLVSVAGGSALVLFTSYQSLQSAWLSAQPELTALGIRCLKQGDDDRTRLLQTFLNDTQSVLFATDSFWEGVDAPGDTLRLVIICRLPFRTPNDPVFEARREAVEKNGGNPFMDLSLPEAVMKFKQGFGRLMRRSSDRGVVAVLDGRILKKRYGIFFRESLPETLTSFGSFEGILRDTENFLYP

SEQ ID NO: 90491 - protein, 274 aa, Unknown
  Obtained from environmental sample
  misc_feature (1)..(274): Xaa is any amino acid
FGSTAVWAKRLELGYIFPLLDNFFYQNFIGDFDNMAVFLNIKGQYPGLGKLWFSFFMDEMEISSMTSAFKLDRHMFAYQAGLQGVVPFLPFTSVTLGYTKIEPYNYTHTRDFLPWYSGSEPMESAYVNSGVCLGYYLPPNSDEVKVRFDIRPLLKTASHVQYQLIRHGADYGIHQVDGSSLVSELDPSGRSEKASLKKNFLKDGAYQWMHIVKVGAEHTLKNSPLTFFGETGIAYSYFTDISDEEYAEYTPTPKGQEPRKPALGDYLTSTAFIL

SEQ ID NO: 90492 - protein, 286 aa, Unknown
  Obtained from environmental sample
  DOMAIN (1)...(208): Elongation factor Tu GTP binding domain
  misc_feature (1)..(286): Xaa is any amino acid
NGTKLNFFDTPGSSDFAGNVILSFRASEFALLMVDGRSGVQIETIKLWRSLDAQKKPRGAFISKLDNDQTDFNKALADIKEKFKMDPVPVSIPMGSGGAFKGVIDVLHNKAYMAGDDGAEKECPIPDEFKDAVAAAREKLIEAAAEGDDTLMEQYIEKGSLSPEEMKKGLIEALVESKYIPAFAGSALKNSGLIPFMDFIADVGPSPRSAKDAILGSDGKTQEVSIDPDKPLSALVIKTTYDQFSGKLSWVKVISGKLAADTEAFNVSENKKERIGKLYTCQGKKL

SEQ ID NO: 90493 - protein, 408 aa, Unknown
  Obtained from environmental sample
  DOMAIN (65)...(308): Domain of unknown function (DUF1745)
  misc_feature (1)..(408): Xaa is any amino acid
MLKIVNAYTQELDDPEKAVREILEFLDIKNSLLKNSVALLFCHVKFVEMGVAEAVYKNLPFDVVGCTSLYFGLPMKIGAPVVDGGVILTVTILTSDDIGFAAGVSGPLNKENIEECVHDLYRRTASYPGESPSEPPTGSPTLAFAFPPTMTSVPADVMAAVLDSACGGIPIFGSVALDVHSYARQPKTIFKACGQACGESGVFDDRMPLLLFRGRVKPRFFHSSFPEKSMMPWDAVITEAEGNRIISINNRPALSFIKDLGFFSDGIHDNVLVYPLVVEYPNHDTHVVVLQSIGPEGQLICSRKVQAGGALNIGAISAESVLESARAMAQYLKNNNSGTGFIMFSCFLRNVVLGGSSQAEFELVCKELDGYAGSWLFLNSGGELCPGYTEKGELVNQFHQYALIACQF

SEQ ID NO: 90494 - protein, 311 aa, Unknown
  Obtained from environmental sample
  DOMAIN (5)...(118): Response regulator receiver domain
  misc_feature (1)..(311): Xaa is any amino acid
MEEKKKIIVVDDNVENLTVLKDILKEKYEVYTIPSAGKMFDLLEHITPDLILLDVEMPEMNGYDAAKKLKSTEKYKSIPFMFLTIRDDIKSEMDGLDLGAVDYIHKPFVSPLLLQRINTNFSLMDYQKLEVISKATVTAMQHIKEGFILVDTENKYISSNTAAEIMFPGITRLEKGETIISAEDWPADMVIRESSLEFSTEGENIRHFKADISPVFDKDNKRIGMIILVSDVTEHVNFVKELEKAAYTDSLTGLYNRKHFTELAVAEIQRANRLGQLLYMTMLDFDFFKSINDNYGHTAGDLVLKQPRKLS

SEQ ID NO: 90495 - protein, 955 aa, Unknown
  Obtained from environmental sample
  DOMAIN (356)...(530): ATP-grasp domain
  misc_feature (1)..(955): Xaa is any amino acid
ARGNVQLALHPNSFEYAVIEVNPRVSRSSALASKATGYPIAKVSTKIALGYTLDEITNAVTGTTYAAFEPALDYVAVKFPKWPFDKFVYAKKELGTQMKATGEVMAIADTFEEALLKAVRGAEIGLSNLNLPRLAAKSDGEIRDMLKTVTDERLFALYEAIKRGVSVDELFDITKVDRWFLHGLVNIHKGLFDDNSQSIDGGKLIYKMVDTCGGEFEAKTPYFYSIRNGSENEALPFIEKSSKPRIVVLGSGPIRIGQGIEFDYACVHCVWTLKKLGYEVIVINNNPETVSTDFDTADRLYFEPLCIDDVMSIIEIEKPLGVIVAFGGGTAIKLTKKLHERGVNIIGTSADSIDICEDRQRFDVLLEKLQIKRPKGFGVLTEAQALDAAEKLGFPVLMRPSYVLGGQNMIIAFSPDDIREYMEIILRSKQENPVLIDKYLEGMEIEVDALCDGKDVFIPGIMEHIERTGIHSGDSIAVYPALNIDDTLADKIFDVTQKLCMALKVKGLVNIQYVYYENDIYVIEVNPRASRTVPYLSKVTEIPMCEIATKISAGQTLSALGYTSGFGTIPPYIAVKVPVFSFEKLAGVDTHLGPEMKSTGEVLGIGKNFEESLFKGLVAAGYKMKKQGGVLITVRDGDKAEITDVAKKFAQCGFSLHATRGTARYLNEKGLDVQPIDKITDNKEVNTETLLASGLISYIISTSEKGRDPALDDVKLRRKACSLGVPCLTSIDTADALADGLLSGYSEINTELVDINCLRSERMKLAFTKMQSCGNDYIYFNCFDTEINSPESLSVFLSDRHKGIGGDGVVLILPSAVADARMRMFNLDGSEGGMSGNAIRCVAKYLYDNRIVNKRDMRIETMSGIKELRLSTRNGAVSLVKVDMGRAELHPERIPVKLTGESIIARKVKIGGVEYEITCVSMGNPHAVVFCNNLDDLDLKEIGPLFETIRCFPTA

SEQ ID NO: 90496 - protein, 453 aa, Unknown
  Obtained from environmental sample
  misc_feature (1)..(453): Xaa is any amino acid
MDESDIAGPLRIRVRSFIETVMIRRKRKAHNTKPLGDPYAVKYTKKEPRKVLLVPNVSRAFCMVMSGALANEGVIVEPLPMGGIEAIAMGKKYVHNDMCLPVQIVVGEALLALKSGKYDPDKTLVGMAKALCDCRLSNYMPLARKALDEAGYPQVPIITTDISDSKNAHPGLRFTEMTFTKIMWGIIQTDALEFLRRRIRPYELQKGETDKVVENAFNEIFEGFAKGGIPGANAAFKKAINELCAVRYDRSKPRELVYLQGEYYLTFHPGANQQIERYLEKNGMEVIFSRMSSIYRHLFLQHTLAEMNEFKVRHSLYNNLYARLGNKFMDIAVRYADKIAAKHPLYEPDITLEQAAKYSDDIMHHSILSGESFLIAAHTLHNAAKGIRSFVILQPFGCLPNHVCGRGVIKRIKELHPDIQILPLDYDPDVSFANIENRIQMLLMNMKNLKAAG

SEQ ID NO: 90497 - protein, 454 aa, Unknown
  Obtained from environmental sample
  DOMAIN (157)...(414): BadF/BadG/BcrA/BcrD ATPase family
  misc_feature (1)..(454): Xaa is any amino acid
MLENIALSTFHAIAKQTIGGLAQGLEIRPPVVFEGGPLTFNPTLIRVFAQRLALKDSDIILPQKAELFIAYGTALAINEMFQEHDGGYDHNFSPEAALTSLSMYREIVLGNTAMQNINFFLNEAEKEDFYARHRTQAINHDVSSKGIQAGETLRVYLGVDAGSTTTKFVLIDEDENVIDSFYNPNKGEPLKVIKQALLDMYDKYQAAGVKLEIIALGTTGYGELLFDKALGADYHTVETVAHAAAAQKYIPGASFILDIGGQDMKAIGISNGIVTNIIVNEACSSGCGSFLETFAETLHIPVNKIAETAFNAKSPAKLGSRCTVFMNSTIITEQKNGKQADDIMAGLCRAIVENVFTKVVRIANPARLGDKIVVQGGTLRNDAVLRAFEQYLGKFVVRAPFPGEMGAIGIALLTKREIAENGYSSPHGPGDRTRFMGFDALKTFDYKQEANLLC

SEQ ID NO: 90498 - protein, 267 aa, Unknown
  Obtained from environmental sample
  DOMAIN (1)...(267): DctM-like transporters
  misc_feature (1)..(267): Xaa is any amino acid
MSHRGFSVARIVNHMYLGTEGVFGTALEVSSTFVFMFILFGCVLEKTGIGRFIIDLSLALAGWASGGPAKVAVVASGIMGTVSGSSVANVCTTGMFTIPLMKSVGYRPHFAAAVEATASTGGQIMPPVMGAAAFIMAQFLGWPYIKVAIAAIIPALLYYTAVLIQVHFEAKRLGLSGIARENLPSVWHLLRTKGFLLLPLAAIIYFLVAGYTPLMAAFWGILVSIPLSYLSRETRLTPKKLLQALESGARSSLSVACACACVGFIVG

SEQ ID NO: 90499 - protein, 281 aa, Unknown
  Obtained from environmental sample
  misc_feature (1)..(281): Xaa is any amino acid
MVSRRGIAYMSRRVDSEGMTFTFRAEETGIFALRFYRRDYIRDYILYDYVQVIVEEQPDKGSAGAFIDRGKVTAEPRWPSALEEAEMLRGGARPALAAESSPSNKNGSSASSASSANRGSAAAATQGTTAPPQTASSNRETPTQGTGVAPQAVVPSAAVTQQPVTPSVTQSATPEDAAPPAVKKEKLPPEEILKKAQDAFNGGNAAEAIALLDQYTEFYPGGNDELYWLYGQFYEANTPSRNILLSLDYYRRLVNEYPQSRHYSDARRRISYLERFYINIQ

SEQ ID NO: 90500 - protein, 78 aa, Unknown
  Obtained from environmental sample
  misc_feature (1)..(78): Xaa is any amino acid
MRTYTISEVTADFKKILPFVQKGEKIGISYRKANKPVAMLMPYKESKAPSRKIGILEGKAHFKEFDNGKITEKEFLGL

SEQ ID NO: 90501 - protein, 82 aa, Unknown
  Obtained from environmental sample
  DOMAIN (12)...(69): Protein of unknown function (DUF433)
  misc_feature (1)..(82): Xaa is any amino acid
LYIIAMEQFNRITHNPDVMGGKACIRGMRVTVGNILEQLSTGRSIETLLTDFPYLEKEDVLEAMKYAAWRMQEKEVPFSIAI

SEQ ID NO: 90502 - protein, 143 aa, Unknown
  Obtained from environmental sample
  misc_feature (1)..(143): Xaa is any amino acid
MLLGECKRKKFRLALLYENFMDMNMSPQWVKVLTDKGISATHWSSVGLSNASDMEIMTFAKENDFIVLTHDLDFGAILFVTNGQKPSVVQLRINDIYPEIDSDYLISALSSVKTELEQGALLIIDTKKTRIRILPLGNDYGIT

SEQ ID NO: 90503 - protein, 119 aa, Unknown
  Obtained from environmental sample
  misc_feature (1)..(119): Xaa is any amino acid
MRLFPFASMNAPESQHTEISQEKLAVLIDADNTQPAIIEGLLNEVAKYGIASVKRIYGDWTSPNLRSWKEKLLTNAIQPIQQFSYTSGKNSTDSAMIIDAMDLLYSEKLDGFCIVSSDS

SEQ ID NO: 90504 - protein, 529 aa, Unknown
  Obtained from environmental sample
  misc_feature (1)..(529): Xaa is any amino acid
VPRRNIFKTEGVIRKRVMEAGKGCFGKMDIQLTLGSLQILGLFYADGDKLVPDKKRFEDFGLLSARERSEYCAAALIVYEETKPASPILPPLFKSRIREVTNFIHGFLDSPDAGQKYHEKTLIRLAEILKGKTGIVISGDLVDALEKTGLLVSSQPGIKQLGVIVQNTPVKNSGPVIAVDSGFSVIVYPEIVYTDAINLAAFMNVLEAGAVVRFELTKDSAVRAFNNNIGADEIIELLKRLSGGRLDESQIWNLKDWEKRHGEVSLKSGVILSLSPDRRYLAETIPLAGLIEETLAPGIYLLPPNAADEAAAALTAAGIDIISRKNDKSASSSAAGSSLTAVSPIAAPLNRYFPPPSVDPDNKMKIKEITSVSAAKKNAALSAASSAQTPASLITSSVLTENFHAILKETPMGDLERAELSARIDRRIVLCETQLKEASLRYEKLEARNMDYAGKQNIAKQAIAQQSPVEIVRGAGSGEQRIFGIPKALEKKEGDYVLVVIPAGGKDELSIPLGKISLLRRIKKSIFEI

SEQ ID NO: 90505 - protein, 227 aa, Unknown
  Obtained from environmental sample
  DOMAIN (5)...(227): impB/mucB/samB family
  misc_feature (1)..(227): Xaa is any amino acid
MIMHIDGNSFYAACERVYRPDLAHSPIAVLSNNDGIIIALNAECKALGFKRGDVFFENKHKLEKSGVVIFSSNYTLYADLSNRMNLIYNRYAPDVELYSIDESFLFFPGWINTDYSELGRAIKETVTRETGIPVSVGIAPTKTLAKLCNKLAKKRGGVCDWTKLNQDEELANYPAGDIWGIGFSKTAFLKRQGINTALELKNYPLHLAKKNLTITGYRTVREIGGVP

SEQ ID NO: 90506 - protein, 474 aa, Unknown
  Obtained from environmental sample
  DOMAIN (106)...(321): DEAD/DEAH box helicase
  misc_feature (1)..(474): Xaa is any amino acid
DWAVQCKCYQEDAAIDKPKVDTFLSTSGKAFYDTQEAGKKVNFAYRLWIDTTKKGFNREAETTIQGQTPPVGRLGYYDLLNASVDWQKLDEGLSGKKATVKKYEAKPHQQAAISDVHNYLKTNDRGKLIMACGTGKTFTSLRIAEKETGSSAAEENGLVLFLVPSIALLGQTLREWSDQCAKPIHAICICSDVAVSKKTETDDASQIATTDLALPASTNEKIIRHQYERARAFQKVEGGNIVVFSTYQSIDVISKVQKSINQQRKNSFVFDLIICDEAHRTTGVTLSDMDESAFVKVHDNGFLNSKKRIYMTATPRIYTEAAQKKAKEASAEICSMDDPALYGEEMYRIGFGEAVDKNLLSDYKVIVLTIEENQLNEKIKKSIEEKDKEYDVEDTLKIIGCINALSKKSLTDKELFEGVDPAPMKSAVAFCQNIAVSKATAEAFNICHEAYLSTLTERQRSEIVSVKADHVDGT

SEQ ID NO: 90507 - protein, 192 aa, Unknown
  Obtained from environmental sample
  DOMAIN (2)...(191): Amino acid kinase family
  misc_feature (1)..(192): Xaa is any amino acid
MKILVQKFGGTSVADLECQKKVRDKVLAALGRGYKMVVVLSARAGETNRLLALADEWSRTPDLSERDNLVSVGEQISVTLFAILLKDAGVKARSVLAFQIPLTTSDDHGDARILSINSDWLRAELARYDVLVVAGFQGVTDAGKITTLGRGGSDTSAVALAAALQAEECEIYTDVDGVYTTDPRVCSQARKM

SEQ ID NO: 90508 - protein, 181 aa, Unknown
  Obtained from environmental sample
  DOMAIN (17)...(181): YjeF-related protein N-terminus
  misc_feature (1)..(181): Xaa is any amino acid
LPTPTEMARWDEAAVALGLPEMLLMENAAREALHTLEKQVGTLCGKRVLLYMGAGKNGGDAACLARLLLDQGAHPLVLHARPWGFYRGVTAKHARLARVCGVPFLPAFAPEKRLPVPWRRPDIVVDGLLGTGFAGQLKERTRALVDAINVLGEHCTVFALDIPSGLDPMSGRPCPVAVRAH

SEQ ID NO: 90509 - protein, 488 aa, Unknown
  Obtained from environmental sample
  DOMAIN (22)...(464): Amidase
  misc_feature (1)..(488): Xaa is any amino acid
MFGKTALELAALIKEKKLSAVEALEACLEKIEKNDSSYNAFLSVSKENALARAKEVQSRIDKGEIFSPLAGVPIAIKDNISTQGIETTCASKMLGGYTPVFNAAVIDKLEKAGMVVIGKVNMDEYAMGGSSETGVKGPVHNPWDVTRVAGGSSGGSAAAVIAGETPIALGSDTGGSIRQPCSFCGVTGIKPTYGSVSRYGLLAYASSLDQIGPIGQNIEDCAALLSIISGPDSRDSTCVIEKPFDFGEPKTKLDGVKIGLPRNYYGSGIDDEVKNAVLAVAKELEASGATIEEFEMPLMDYMIPTYYIIACAEASSNLSSYDGLKYGYRSPNAKTLSEVYRLSRSEGFGMEAKRRIMLGSFVLSSGYYDAYYKKALQARALLKDAYNKLFGRFDIILSPTAPTTAYKLGDNIGDPVKMYMGDIYTVSINLAGLPAAALPCGFDKQGLPIGFQLIGDAFSENKIINAARVFQNRTDHHKKKPSINGGVK

SEQ ID NO: 90510 - protein, 423 aa, Unknown
  Obtained from environmental sample
  DOMAIN (187)...(275): PPIC-type PPIASE domain
  misc_feature (1)..(423): Xaa is any amino acid
RRGNIDLTFGYYDKVPITYVPGNFFAQYYDMVARYRQNTESDNYGYLGYQIWRESYEAAAVHTAVLKEMKDAGYTAPVKKVDREVAGLPQFQENGRFSPALYKRMDNNSRLSLWRQVQEEIAERHFRSDLTGLLKPGAEAEFIGRMEAVQRSFRMTVFEVDAYPEEEYEAYAREHSELFRNIRLSMITLSSSEREARRVLDSIKKGETTFEDAARAHSKDMYADRGGDMGMRMYHELSVDIPEEETRGIIISLANGDYSNVIKTAAGWFFFRCEEAAREADLTDPAVMEKIKSYLRNFEFGRMENWAIEKANVFIALVNEHGFDEALSLQSLESRSFGPVPINFGNVELFTTLPIQSVPGLSGSAENENFWKAAFSTPVGKPSQWIVQGSNVLVLFPVEEIEAEASRQETVASIIPRTGWIYD

SEQ ID NO: 90511 - protein, 74 aa, Unknown
  Obtained from environmental sample
  DOMAIN (6)...(74): NifU-like domain
  misc_feature (1)..(74): Xaa is any amino acid
MFEEQVKAALENVRPSLQADGGDVEFVSVSGDGTVSVKLTGACGHCPMSQMTLKRGIETYLKKEVPQVTAVVGV

SEQ ID NO: 90512 - protein, 274 aa, Unknown
  Obtained from environmental sample
  DOMAIN (3)...(64): Cna protein B-type domain
  misc_feature (1)..(274): Xaa is any amino acid
VSVSGALVRLKNGSGYVGNSRWTNGDGEYTIEKVASGTYTIEVSKTGYITGTIESFTVGSENITDKDLVLVAEQVNPKDEVTSVTVTPAVWWPVIPTSATANPNTVTQVFTAVVNGKGNIDRKVRWNESDFSSGLGTNGSITVDPNDPNKITLVLGVGADFTKNLTATSVSTAGGRAQSTNVELKTRTSAQLAGSLSITGGHTPKVGYVLTAVASVTAPSGGTIAYKWCDDESVILGTSSTYTPKWTDWDKTLTVKVYKSGAIDTLVSATAVKV

SEQ ID NO: 90513 - protein, 536 aa, Unknown
  Obtained from environmental sample
  DOMAIN (235)...(449): Methyl-accepting chemotaxis protein (MCP) signaling domain
  misc_feature (1)..(536): Xaa is any amino acid
TVTAHFDPSRIGKDLRETEADMTGKYINDFVDAIKTGKFFTFSNHIAALKTDLKIFLIPITVGSTKTSWSYAVGIMRNTIMAPVYQMLTIAIAISVAVLGLLVLASMFLSRSISKPIVKVAVTLKDISEGEGDLTKRIAIKSSDEIGDLGRCYNLTMEKIRNLVGTIKYKINGLNHTSFELSANMGKTSTAVQQISSHLDNMKNLMVKQESGATEAGKAVGEIKVNIDSLKKMIEEQTDSVNKSSSAIEEMTANINSVTRTLAENSKNVTVLTEASEIGKTGLQTVAQEIQEIAHDSEGLLEINSVMENIASQTNLLSMNAAIEAAHAGEAGRGFAVVAEEIRKLAESSGDQSKTTTTMLKKIKTSIDNITKSSNEVLNRFGLIDESVKTVSVHEQNILHAMEEQEVGGKQILDSISRLRDITFSVKKGSDDMEESGETLVQETNEFIKTSKETVDNMNEILVGINQINLSVGHVNEMSTENNRNFDSLKQETENFNTTSGKEKQKILVVDDDTMHLEMVEMVLQNGYEVSCSKSG

SEQ ID NO: 90514 - protein, 468 aa, Unknown
  Obtained from environmental sample
  DOMAIN (99)...(321): ATP synthase alpha/beta family, nucleotide-binding domain
  misc_feature (1)..(468): Xaa is any amino acid
SWQFTPKVKEGDKVERADTLGTVPEGSFTHRIMVPFYLYGSYTVSWVKPEGTYKIHDTIAELKDEKGNAIQVKLSFRWPVKRAVDCYEERLKPVDPMVTRVRLIDTFFPVARGGTYCIPGPFGAGKTVLQQITSRFADVDIVIVAACGERAGEVVETLKEFPELKDERTGRSLMERTIIICNTSSMPVAAREASVYTAVTLAEYYRQMGLHVLLLADSTSRWAQAMREMSGRLEEIPGEEAFPAYLESTIANFYERAGLVRLKDGSLGSVTIGGTVSPAGGNFEEPVTQATLKVVGAFHGLSRERSDARKFPAIHPLDSWSKYNGIISNEKVGYARKLLMRGTEVEQMMKVVGEEGTSLEDFIVYLKGDFLDSVYFQQNSFDAVDQAANPERQKYVFAQILRILGSHLNFRDKDEARTWFNGLRQKFIDYNFSPWQGDGFKKIEAELLALIKDKAGKMDPVAEKLITG

SEQ ID NO: 90515 - protein, 486 aa, Unknown
  Obtained from environmental sample
  DOMAIN (194)...(472): tRNA synthetases class II core domain (F)
  misc_feature (1)..(486): Xaa is any amino acid
ITSLGQEWTTKGSPEERILALIRQRLAAQERLSLSDIAGALKMENKDIGSAFGSLSKLGVLGMDGDKKLTITLSLESLDDPAKNPVLAHFAVLRSLFKKIVTTEDGLLAEASLNDEEKKFISGIAKKRGASDAAFRQIDREIVVYGFTVSQDGSVPAETAAAALKAAGISGEEIGTLSQQMLETGSWKGKAFRSYNVKTPPTRLTPGRSNPYAKFLENVKDKLASLGFEEFDGPLVETEFWNSDALFMPQFHSARDIHDSYSLSDPAKPGEIAKAKSIEEPWLSNVASAHENGGKTGSRGWNYAFDREFTRRLILRSQGTVLSAKTLPKAKIPGKYFGIVRCFRYDRVDATHLPDFYQTEGIVLGETVNLRTLLGMLDMFAREVAGAKEVKYVPGYFPFTEPSVEVHIKHPVLGWFELGGSGIFRPEVTQSLGVDVPVAAWGIGIDRMALMALGLNDLRDLFSGNIEDVRLRRLTETNKLKEKANA

SEQ ID NO: 90516 - protein, 55 aa, Unknown
  Obtained from environmental sample
  misc_feature (1)..(55): Xaa is any amino acid
MYEQRKFMEALTLFASLMENNPNDNVAKVYALRCEAFIKIPPPPDWDAVKNLTEK

SEQ ID NO: 90517 - protein, 346 aa, Unknown
  Obtained from environmental sample
  misc_feature (1)..(346): Xaa is any amino acid
MPFSEKLPVDFFETPRNFWEIRDALIQRQKTIGETPATNINSTIEELWKNVWQGKLSSDSWEPVRRAIESGFGAAEYSELQADGRNSGESPNVISGTGRRAFRVPRAIRERWKSGTPVRGLWFSLASDSPPDENQFNKMGLLEEEELNRERVRLLLDRFGVLTKPLLEREVPVLSWAHLLPTIRRMELAGELVTGRFFSGIASLQFASPRIAAELEEAEAERGIYWMNAADPASPAGLAVEGVIRNAEQSAPAIRRMASSRLCFRGAELLAVSNRSCRELEIFIPPDDSDIVEALEFVKVSRTRKVHRENKIIIEKINGASAASSAYSEALASNGFVKDRGRLVLW

SEQ ID NO: 90518 - protein, 297 aa, Unknown
  Obtained from environmental sample
  misc_feature (1)..(297): Xaa is any amino acid
VYTEFGWAGELKGPMGLNVDFNGNIFIADTNNGRLIKTDPEFNVLAVFGKPDSELFPDDYVYRPQKMAVDPAGRIYVAAIGENKGLIELSADGAFMNFIGAPNVRFNMLDYIWKFFSTDEQRRRMTLFVPTEYSNVISDDEGFLYGTVSTLDTRQQAQEYYNNILTRQYPVKRLNAEGKDILRRMGPFPPFGDLMYMYTSTTVISGASSAVDIVVYDNGVYSMLDMTRGRVFTYDADGNLLYLFGGLGTQVGTFRNPSAIERRGTDILVLDKISGSITVFVETAYGALLREAITLYN

SEQ ID NO: 90519 - protein, 171 aa, Unknown
  Obtained from environmental sample
  misc_feature (1)..(171): Xaa is any amino acid
MKQAKNIKSSAAAARVRAVLAAFMLLSAASCSPDADKAADAGAQTNRTPETETAANENGSGWALAAEDGALALYVDMSTADFYVLDKATGLEYRSSPAAAESDPIASDVVRGRMRSAFNIVFYDNKSAIYNMNTFNDSLPYGQVTVSRIPGGVKALYQIGQAEERHVVLKR

SEQ ID NO: 90520 - protein, 158 aa, Unknown
  Obtained from environmental sample
  misc_feature (1)..(158): Xaa is any amino acid
MKILQLRFKNINSLAGNQELDFTKPEFTENGIFAITGKTGSGKSSILDAISLALYGKTPRVDVTGSSNDVMTHGERDCFSEIIFESNGKKWKTTWKQELSKNGNLKQIERSIADENDKIIADKVNEVSKKIVEILGFNFEQFTKVILLAQGSFTAFLQ

SEQ ID NO: 90521 - protein, 193 aa, Unknown
  Obtained from environmental sample
  DOMAIN (68)...(173): HD domain
  misc_feature (1)..(193): Xaa is any amino acid
HLAPVLSLKDDVIKQTASDALSPWTVEVQTDTIFGLAGFVAKIIDYKSLFTRLHSTQIANKAWFMGQYYKHDSQELAELYLAASLHDLGKLAIPSEILEKPGKLSDEEFDIIKGHVRMTWELLGDIEGLGTICQWASNHHEKLDGSGYPFGKKAPELDFNSRLLTCLDLYQAISEERPYHPTRNHGEYHVDTL

SEQ ID NO: 90522 - protein, 488 aa, Unknown
  Obtained from environmental sample
  DOMAIN (22)...(156): Histidine kinase-, DNA gyrase B-, and HSP90-like ATPase
  misc_feature (1)..(488): Xaa is any amino acid
MGNNVQIAILPPEEAMRIAAGEVIDRPAALVREFLDNAIDAGSLNIEVSIEEGGCKKVEVSDDGSGMTREDLAICSLTHATSKIRGLDDLNTSHTLGFRGEALAAACAVARLEIICSVDGREAWRLDTGPGESRPAAIEQTRRTKGTTVRALNLYETIPARKRFLKREGSEASLCRQIFIEKALAFNGINFRYVQDGKLKDFLPAVKTKKERFASAVLQTGEENFLHEINVTGAGFSATVVISGPELYRNDRRQLFVFANGRRVQDYSLIQAVEYGSQGWFPNGTHPVSAVYVEIDPSLADFNIHPAKREVRFRNSGSIHQAISGGVKNFFHSLYLKNSRKDNESAAGDEQTEKDNFLFLNNNFVSKHSPEEHDNISNNNFASHTEGTARLCESSFSYSSQNEKSSSSVSTPAYGDMRYAGRIFDLFILMEWGDKLYIIDQHAAHERILYNKFLREPIPKQELLAPITFTTESDEEDAFLSANSGELS

SEQ ID NO: 90523 - protein, 472 aa, Unknown
  Obtained from environmental sample
  misc_feature (1)..(472): Xaa is any amino acid
LVCQDAGTTGAVINGNLLYANADGTVVVTARIPNGKAEGRDYTQDFIIVIGLSIADIYKEHTIEIIMLDNESGDTVTVSPNKGIAGTAVTLSYTVANTAANNQLDFGGVTANIALVESAGSGTRTYTINAADSSNGVISITAIFTHTNLQIDHIAFNEHDGGHITKTYGDSPFTNAVTTAHHGTGAITYHSSDEDVAAVNGSGQVTILRAGSTVISAEKAADAIYAHARTTYTLTINPKFVTITGLSASDKMYDGTTAATVTGTAVINGLIPGDDVTVIAGTASFADSAVGNDKTVTFSGWSLGGADADNYTLPAQPASVTANITPNGSADAPFLVANEADLRKVGTGTDGWVLSAHYRQIADIAMTGGGFTTIGDNTNRFTGAYDGDGYAITGLTVTATTYNQGLFGVIGADGTVKNVNLSGTITQTGDNNGVGTGGIAGLNYGTVDNCVFSGTVSGLTSNQVGGIVGSNQ

SEQ ID NO: 90524 - protein, 229 aa, Unknown
  Obtained from environmental sample
  misc_feature (1)..(229): Xaa is any amino acid
SENNILHSNDPNYFGIKQFLLKGSAFNFNYLFYSPIKELYPYDEKAFMTSKQKFLIVATDCETGKAVYFEKHNYTELVQALQASSSIPLLSKLVFIDDKICLDGSISEPIGIHKAFSEGFDKQVVILTRKLEYTNKAEWSRFAIFLSKIKYKKYPEIINLINNYSTLYNSLIEEINTMEDENKIFVIRPSREANIKTIERDARKLIDFYFLGREDALKSLPKMYEYLNR

SEQ ID NO: 90525 - protein, 60 aa, Unknown
  Obtained from environmental sample
  misc_feature (1)..(60): Xaa is any amino acid
MTQFRGAFTALITPMKETGEVDYEGFRKLIDFQITEGIDGIVPLGTTRGNPPPLDEDEED

SEQ ID NO: 90526 - protein, 289 aa, Unknown
  Obtained from environmental sample
  misc_feature (1)..(289): Xaa is any amino acid
MQAKKKAAKKTYKSSAKKKTVPSLNTVTMDELKAIIAETSKTMAENHAKTEASLKTAFKTWEAAHAKTEASIDRLSAENRLLAAENRKTSESVRELHAVVSETSDEVRKTSESVRELHAVVSETSDEVRKTSESVRQLNDTLGGMGGHLGEVIEFIVIPKIRPAINALGNHSFKEITARKIVEIVINDRKRKLTEVDVLLYGDAEAMAVEIKTCLQTSDVDKHLGRLQKLRDHEADAEVKGKTLFGAVVGAIVHDPVRAYALKNGLYVIEIREEEDKLDIEKPDACRTW

SEQ ID NO: 90527 - protein, 723 aa, Unknown
  Obtained from environmental sample
  DOMAIN (388)...(681): Alpha-2-macroglobulin family N-terminal region
  misc_feature (1)..(723): Xaa is any amino acid
DIEDFSLDIIDKEFYIDPEDNMIKRALYTIRTNYPLDTSSLEKNIELEPTIISDSGTLKRRPYLYSLTYNEDHTLAYIVSEPLGMPAKTVEMRLTISSGVRDANKEGKAAGGKSAYVEIPGMTSFVRIYNMEYITVKNDRQLYDRVLVMETRGGVDPAELAKNVTAYLLPKDLPKLPGLEAQKDYYWDSLHQIVPEVLALSKKVNLEALPNEIKYSEINSWKFEADSGQFLYFKLNGGTRFYGGYVLDEPYETIFRIGSFPRELSILSEGSILSFSGDKRLSMMSRGIKDVEYRIGRIRPDDVNHFISQTYGDINNIRFNNYNFNQYNITEQYTESAVVPVASERDIGYFSFDFSRYLNNIPDKNLRHGLFIFTVRSKDSSYSDRRLIMVTDLGIFVKTGADSSKDVFVQSIASGNPVVGAAVNVLGLNGNPILSTYTDSSGRARIPAFGDTYKNEREPTVYTVLSGEDMSFMAYESRGRNLDYSSFDVGGIHGASDPKTLRAFLFSDRGLYRPGDETRLGLIIKSGDWGVNLGGTPLEYRVTDPRGAEIVNKRIKLSPEGVEDIRFSTHDWSPTGTYTASVYVIQEYKQGDEIIERHVFLGSQTVKVEEFLPDTLNVSAVFDPAPQDGWIAPGELKAKVSARNLFGTAASGNEVKAQINLSPGHQYFRQYRDYQFRDPYLGKNSFQEFLGTKTTDTEGTAEFNLNLAKLKRRLTVFLFIPKR

SEQ ID NO: 90528 - protein, 1108 aa, Unknown
  Obtained from environmental sample
  DOMAIN (701)...(847): Alpha-2-macroglobulin family N-terminal region
  misc_feature (1)..(1108): Xaa is any amino acid
AKDLPDLPGLKGQKNYNWGDLKSIVPEVLALSKKVNLDALPNELKYSPVNSWKFKADPGQYLYFKLNEGTRFYGGYVLAEPYEKIFRIRDFPRELSILSEGSILSFSGDKRLSMVSRGIGEVEFNIGRIRPDDVNHLVSQTYGDVSNINFNNYDFNQYNITEQYTESAIVPVASERDIGYFSFNFSRYLENIPNRNLRYGLFIFTVRAKQGSYSDRRLIMVTDLGFFVKTGTDTSRDIFVQSIASGAPVAGAAINVLGLNGNPIFSTSTDAGGRARIPVFGDTYKNDRAPTVYTVLAGEDMSFMAYNANGRNLDYSAFDVGGIYGASDPKILRAFLFSDRGLYRPGDETRIGLVIKSGDWAVNLGGTPLEYRVTDPRGAEIVNKRIKLSPEGVEELRFRTHDWSPTGIYTTSVYVIQEYKQGDELKERHIFLGSQTVKVEEFLPDTLNVSAVFDPAPQDGWIAPGELKAKVAVRNLFGTAASGNEVKAQINLSPGHQYFRQYRDYQFRDPYLGKNSFQEFLGTKTTDTEGTAEFNLNTAKFEKATYRLSFYTEAFEKGSGRNVSAEASVYVSPLPYLVGYKADGDLRYISRNAERNLSIIAINPKTQKTSVNDLTFTITELRYVSALVRQPNGVYKYQSIQKEYPLSSKQITIPAAGLEYSLPTNTPGDYKLLITGPGDLEYNSLNFSVAGSENVNRSLNRTAELEITLNKTDFKNGEEIELMIKAPYAGAGLITIERDKVYAHHWFRSSGETSMQTITVPADLEGNGYVNVHYLRSQDSPEIFMSPLSYGAVPFSISKENRTNRIKLDIPGEAKPGEDFVIKYSTSRKGKIIVFAVDEGILQLAGYRTPDPLAFFFRKRALEVRTAQILDMVLPPYSVVQNLAAMGGGGGYDELARNLNPFKRKQNVPVAYWSGIIDSGPEVKELRYRVPDYFNGTLRVMAVAVSDSTVGAGEDRSLVRGTFIISPNAPMMAAPGDEFELSLTVTNNQKGAGENGKVRVRAIPSEHLSIVGKSEFDLQISEGKDQTLNIPVKAVGPLGSAQIRFVASNNGETSELSAYMSVRPASPYRVSLYSGAIRNKSAEVGIDRTLYEEFHTREVSLSYLRVGM

SEQ ID NO: 90529 - protein, 708 aa, Unknown
  Obtained from environmental sample
  DOMAIN (539)...(621): Hpt domain
  misc_feature (1)..(708): Xaa is any amino acid
DLFGREIHEILGHNDMHAFGFSKEAMEIANNADRTAMNECRQVSFEEWMVCPDGTKRLFETVKVPLILDEEIVGILGIGRDITQRKAMEEEVRAASVAKSDFLANMSHEIRTPLNVVIGLTDLVLEDGSLSKEVTENLIKINNAGSTLLSIVNDILDFSKIEAGKLQISPVEYYMSSLLNDVITLVVTRIGEKPITFNLNIPDNLPNKLYGDDLRVKQILTNLLSNSAKYTHRGSIELKVNCERDGGNVWMIISVSDTGIGVREEDLKKLFLDYYMVDAKANRNIEGTGLGLPITKKLVEMMGGEISAVSEYGKGTTFSLRIKQGYYDDTLLGKDVAEKLRSFRYTDDKRLATKRLVRLNLSYVKVLVVDDMQTNLDVAAGLLRKYKMQVDCSDNGREAIEKIRAGNPVYNAIFMDHMMPGMDGIETADKIRALGTEYAKKIPIIALTANAIHGTEQMFLEHDFQAFISKPIDIMELDSVIRKWLRDEEKEKELGTNAYITPDNSSEDEKTANITIEIPGVDTEKGLLLYGGDKKIYLSLLRSYVFNTPVNLSKLKTASKDTLNSYVIAVHGLKGTSAGIGAESIREEALNLENLARSGDINKVLELNNKLISDTEAVVESVKTWLEGYDSLNAKPIQKAPNPEVLARLRQCCEKFDMSGIDKAMAELESTDYEEGNDLIKWLKDKIVISEITEAAAKIAQYEKELKK

SEQ ID NO: 90530 - protein, 615 aa, Unknown
  Obtained from environmental sample
  DOMAIN (256)...(449): FtsK/SpoIIIE family
  misc_feature (1)..(615): Xaa is any amino acid
VIVMATVMEVLCLRLMKNALFPREEEAADSLHARSGRKGSGRVILLPPPKSEHVEVFPEPTAEPSAAPEIPPDEQGAEEQGLEETGIDEPGVIEETAPKSVEDNFADASIATDSIERAIEEAEAAAAAHHSEQARKKPATGRTGSRKYKVPLDILNEYPDGEYWIIDQATRDAAMALKETLEEFKIQAEVTGIRKGPVITMFEILPAPGVKLSKIVGLQDNIALRLAASSVRIVAPIPGKHAVGIEVPNAKRNIVSFREIIEGQLHDDQKMEIPVVMGKDISGEAQTIDLVQMPHLLIAGATGSGKSVCVNSMILSILYQRTPAECRLMLIDPKIVELKLYNDIPHLLTPVITEPKKAFQALQYCIYEMERRYACLDSVGVRDIRSYNKRIKEKNIAQEHMPYIVVVIDEFADLMATTGKELESTVARLAAMSRAVGIHLVLATQRPSIDVITGLIKANIPSRIAFMVASKTDSRIIIDMIGAEKLLGKGDMLYSGVVDPFPIRMQGAFISEEEVEAVVEYVKSFGEPEYIDDEIFYEEEEDQGASLFSDGDDPLYEKALEIVCQQGKASASYIQRRLKIGFNRAARIVDEMEHNGVVGPAHGSKPRELVRAMGA

SEQ ID NO: 90531 - protein, 69 aa, Unknown
  Obtained from environmental sample
  misc_feature (1)..(69): Xaa is any amino acid
FSGSIVIEQVFAIPGLGRLLIAGISSRDYPLIQALVVYIAFVVIIANTLVDIAIQAVDPRIRLEGDARK

SEQ ID NO: 90532 - protein, 406 aa, Unknown
  Obtained from environmental sample
  DOMAIN (105)...(311): 7TM diverse intracellular signalling
  misc_feature (1)..(406): Xaa is any amino acid
MDMPLISDTDEPIIPCLYLATIGINWEIYLNGTLIKREMHLVDGYIMEEHYERNVIIPINNNLLQKGENVLVFRIVGDPTDYTTGFTYQSPYYIADYDYITSKHNEIAQIILISILALLGIYHFLFFAIFRENRYSLLCGFYFLCIGLYYLWRTHWIHPIIPDTAVAMKLEYFMLYFLTISFMAYTDKLCNARYSIITKIYGVFCLILAVTQLFSFQASSLIWEYSNVIVIVWICTYNIILPFIRELKKGRKFADALANTYPGNLLIATLIIGITSIFDLIDSFTLHLSLHLTNYSIVVFALSVTFMLFRMSVIKDRELKEKSALLEKATSPEAVREKAFKSYGLTEREKEVARFMAEGLDNKNIGERLFLSTRTVAFHVTNIFRKFGIIDGKNKGRAMFLAKLFN

SEQ ID NO: 90533 - protein, 343 aa, Unknown
  Obtained from environmental sample
  DOMAIN (12)...(65): HTH domain
  misc_feature (1)..(343): Xaa is any amino acid
MKEKTISGLSSKARLLALLREKNGGRASGSLLAKEMGISRVAVWKTVQALVQAGYLIETGDNGYLLSPKNEKDFLYPWEFGEKENLFFHYLNTGSTMDRAREQALRGAADGSVFTAEKQTSGRGRTGRTWISRQGGLFFTMLERPRLAIADYSLLSLVTQIAVVRIVSSVCGKKAYLRWPNDIYLNRQKIAGVTTEISGEGDLISWLSCGVGVNVNNPVPSGKAVSCTEITGHHLSRRVVLNKILDEIENVRKKFTSVAAYSQGNRPLAAEWNSLADCIGAKAVVFEPEDKTVNYSIDKPGKILARGIFSGIDPAGRCILKTEKGSLYFNQGTVSLAFLNVNR

SEQ ID NO: 90534 - protein, 593 aa, Unknown
  Obtained from environmental sample
  DOMAIN (238)...(318): Helicase conserved C-terminal domain
  misc_feature (1)..(593): Xaa is any amino acid
DERARLNQKTDGGNIVVFSTYQSIDVISKVQETINKEKKNSFVFDLIICDEAHRTTGVALSEDDKSSFVKVHDNNFIKSKKRIYMTATPRIYSADAKKKAQEATAEICSMDDIALYGEEMHRIGFGQAVGEGLLSDYKVIVLTVEENQLSDKIKKSIDNKKDKNKEIDTENTLKIIGCINALSKKSLTDKELFEGIDPAPMHSAVAFCQNIAISKATAEAFNVCRDAYFDTLTEEKRREMVLVEAKHVDGTMGAQIREQKLHWLKSANAANRECKILHNVRCLSEGVDVPSLDAVMFLSARNSQIDVVQSVGRVMRKAEGKKYGYIIIPVVVLPDADPDKTLSSDNFKVVWTVLNALRAHDDRFNATINKIELNKKKPASISATGTDIGGSDGYTDTGAPMPSGGEKSPFQKQLELQFAQLQGQIYAKIVLKCGTKPYWEQWAADVAKIAEQHIENITAIVKKKGTAKDEFEKYLNGLRKNINPAVTEQEAIEMLAQHIITQPVFEALFEDYSFVKNNTVSQSLQGIIAALNEKSKKEDAQKLDKFYVSVQTRASGIDNSEGKQKIIVELYDKFFRTAFPKVTEKLGIVYTPC

SEQ ID NO: 90535 - protein, 274 aa, Unknown
  Obtained from environmental sample
  misc_feature (1)..(274): Xaa is any amino acid
DRNLLALSAHNPALCSQLSLAETTQGRYKFLESASGELIPALVDRSGAAHALHSTVDPVREAERLISTLSKDKNGLLAEGFVVFLGLGGGFAPLAALNSGVSHVLIIDYDINGIAELLCSRDYIALLGDPRCTLLADPPPDLIENVILELYRPALYGGIRALPLRARIEPDKQTFNLAADAIQRTIEKVSADYSVQAHFGMRWFANIIRNLEAAQRQNRSAPPIRHAAICAAGPSLDDQIPLLVRQKDKQELFVIAADTALPALLRRGIKPDAV

SEQ ID NO: 90536 - protein, 262 aa, Unknown
  Obtained from environmental sample
  misc_feature (1)..(262): Xaa is any amino acid
DGDGDLVFLYCDNLTAINVASGNTMYSSVNGVLYNKDKTILVEYPNGKKGAFTIPHSVTSIGAKAFHGCSNLTGITIPNSVTSIEWSAFSWCTGLTGVTIPNSVTSIEEGAFFWCTGLTGVTISNSVTSIEKGTFESCTSLTSVTIPDNVTSIEASAFEFCTSLTSIDIPNDVTFIDKWAFSNSGLTGITIPANVTFIGPNAFRNCSSLTRVTFLGSKIAFNSDNYNAFSGDLCVKYIAGGGGQGTYKTTAPVEDYNAVWTK

SEQ ID NO: 90537 - protein, 114 aa, Unknown
  Obtained from environmental sample
  misc_feature (1)..(114): Xaa is any amino acid
ARFTTAFMFAYSPREGTAAAEMPETIDKTEKMARLSELIDLQTEITREIYDKAVGTELEILITERQQKRDRAWMGQDAGCKRVLINCDRLEPGMIFKAKAISSSGMTLLAEKIK

SEQ ID NO: 90538 - protein, 71 aa, Unknown
  Obtained from environmental sample
  misc_feature (1)..(71): Xaa is any amino acid
MKLKPHYIGVIGSRKKIETVTKKLLEQGFSQDEINSVHTPIGIDIKGDTPAEIAVSITAELILVRANRYSV

SEQ ID NO: 90539 - protein, 198 aa, Unknown
  Obtained from environmental sample
  misc_feature (1)..(198): Xaa is any amino acid
VPYILSLISAFLLLSCASNVHREAGGYFAAADNAVAYEQAEADYYAAAPAPRAARKMLLASAAGSLADDGSYGGDMQIAGWASTSSQERMVNYTGSITMQSAEPEVVIDTVVAWAKAKGGSISNRRNSFISLQIPVAEFKNFFNQILKLGRVTSKNISASDITEAYADNAARLSIAESTLARLQHLLAAAKSEQEKIA

SEQ ID NO: 90540 - protein, 687 aa, Unknown
  Obtained from environmental sample
  DOMAIN (1)...(125): Alpha-2-macroglobulin family N-terminal region
  misc_feature (1)..(687): Xaa is any amino acid
MIKAPYAGAGLITIERDKIYAHRWFRSSGETSMQTITVPAELEGNAYVNVHYLRSQDSPEIFMSPLCYGVVPFSISRENRTNRIKLDIPGEAKPGEDFVIKYSTARRGKIIVYAVDEGILQLAGYQTPNPLAFFFRKKALEVKTAQILDMVLPRYSVVQSLAAMGGGGGFDDEYLSRNLNPFKRKQNVPVAYWSGIVDSGPEAKELRYRVPGYFNGTLRVMAIAVSDSAIGAGEDRSLIRSTFIISPNAPMMAAPGDEFNISLTVTNNQKGAGEKGKVSLKAIPSEHLAISGNSEFNLDIPEGKDQTLNIPVKAAGPLGAAQIRFAASNNGETSELSAYMSVRPAVPYRVSLYSGTIKNKSAETSIDRNLYEEFHTREVSLSYLPMGMAKGLSFFLNNFPYGCSEQITSAVFPFLYPNLFKELGYTRAQANEGVNRAIGILQARMKEDGTIGIWTSRSYDDPLITTYAAHFLTEARNANYYVSPAMMEKLLNACRNIASNPGISGYDFNTRAYAIYILTRNEIVTTQLVESLKRDMNRFDESQTGIAGLYLAGTYALLQKTNDAALLLGKIKRAMAKDSSFRYIDELMYHSIYLNILSRHFPQRLRDVSESLLVDMAGQMERQSYTSISANHALMAIDAYLKAVPSAETGRYTIQEVSKDNQRKELKAVGTTLFSANFSANAAKIAL

SEQ ID NO: 90541 - protein, 161 aa, Unknown
  Obtained from environmental sample
  DOMAIN (54)...(161): Transglycosylase
  misc_feature (1)..(161): Xaa is any amino acid
MPRIFPTFRFPRLPRLIRPHRGFFFLCGICLALVLFFVINAVFLDILNGVSFSQAYFDRSGKLLNIFLTTDDKYRLRANLADFPPALIEAALLQEDRYFYGHIGLNPMAVFKAGWETYIKKNRRIGASTVTMQLARLRHNLYTRNLSGKIAQIFTAVFFEI

SEQ ID NO: 90542 - protein, 309 aa, Unknown
  Obtained from environmental sample
  DOMAIN (118)...(309): Glycosyl hydrolase family 3 N terminal domain
  misc_feature (1)..(309): Xaa is any amino acid
MVNMRLSIVLIICLLILPACAKREVVNHENKAVNEQEKEDTIDEIYEKWLRATEIANALDDRLLAAQVLISGIEGKGSLNPNIVTLLSEFPPGGIMLFKYNLDTDNDSIRALINQTAALVNSESGIQPFIAVDHEGGTVNRFRRGTADLPDASSYWDLSLKQDRQTSFKKIENDSLRAGKELKDLGINVNFAPVAECLNDGNRVFLNRRSYGPDPLFTANAAQAFIMGMKQAGVFCVIKHFPGIAGSDPHYSASVINGDKAELEKLVFPFKTVIDNIYGGGAVMVSHTLVSALDGRIASLSKVVMEDWL

SEQ ID NO: 90543 - protein, 402 aa, Unknown
  Obtained from environmental sample
  DOMAIN (216)...(350): HD domain
  misc_feature (1)..(402): Xaa is any amino acid
ISLVSLVCLLFTINSHWIELIPYIGMLAFLFICNHYANQYNSFSFNISNLAAYVYTAVKLPVLILNDTGDIMLCNTASESFFKKQAGLLTKVKLFDLFEFSDASLSDASFSLHRHKKDASVFNCDAVCRIEGQKCQISLNYIYDKFDEMICTVVIVTDITEKEDLIRQLNESHAKIEQFNKELQSEVDRQTESIRNLQKAIVYSMSDLIEKKDGYTGVHTRRVSEYVSILLRELVRRGYQLTESEIERIAESSLLHDMGKIAIPDSILLKKGKLDEDELGVMKSHSAKGAESLEKSMQFAKDNDFLKNAFIMAKHHHEKWNGSGYPDGKKENDIPLLARVIAIADVYDALRSERTYKEPFSREKAKAIILEENGRQFDPELVDVFLAVEPLFDEFCKSTQDS

SEQ ID NO: 90544 - protein, 140 aa, Unknown
  Obtained from environmental sample
  DOMAIN (26)...(140): NeuB family
  misc_feature (1)..(140): Xaa is any amino acid
MRKNKVYIIAEAGVNHNGSLSIAKSLIDGAADAGADAVKFQTFKTENLLGKNAPKAHYQTQTTDAAESQFDMIKKLELDEAAHRVLADCCARQGIDFLSTPFDLESLQFLITLKISRLKIPSGEITNAPLLLAAAKTGLP

SEQ ID NO: 90545 - protein, 247 aa, Unknown
  Obtained from environmental sample
  DOMAIN (67)...(231): GGDEF domain
  misc_feature (1)..(247): Xaa is any amino acid
LDLFEIEQKIFDDVTKRVEEIRKGDSLDFKEYESLVKEYGKLLKQLRQSIHFADRVSNGLYKINLNLDEKVHFDALTGIYNRRFMDDNLKRVIKSLSRTNGVLSVLMLDIDFFKKYNDTYGHSMGDECLKNVAKALCETARMDDCVIRYGGEEFVVLLPNTDEAGAGITAARLLNSVSSLCIPHINSDIADYVTISIGATTVKVQHNHQYRKYIERADEALYISKDSGRGRYTHLKYHDKEGGGNEV

SEQ ID NO: 90546 - protein, 307 aa, Unknown
  Obtained from environmental sample
  DOMAIN (5)...(278): Prephenate dehydrogenase
  misc_feature (1)..(307): Xaa is any amino acid
LRIVLVGFGLLAGSVASAIRQANLKTTIRAVSSRETIEKAKKLSLADDFFEYSEVEKWLPGSDLILLCSPIKHILSTIEILKNNANLLNEEVIVSDIGSTKEQICSAGFALGSPFVFVGGHPMAGSEKRGVEHSDPSIFENAYWLYCLPKNLIELPKPLYELLNFLGSRPVQISPQEHDFAMAWLSHAPQLLSTSMAAGISQDIAKNHLHLAGRGFRDMTRIAGSSWGMWKDILETNKKNVECALETYAKKALEIKSELTSEQFSELENNFLQGNQIRHNLETGKNYAYPLHEIVVRIPDESGSILK

SEQ ID NO: 90547 - protein, 86 aa, Unknown
  Obtained from environmental sample
  DOMAIN (9)...(85): Chorismate mutase type II
  misc_feature (1)..(86): Xaa is any amino acid
MTPEIENLRQKIDSIEDSLISLLNERAKYVLEIGRIKKMQGLPIADSKREGLILKRVAEKNPGPMSNEFMVDVFKKIIDESIKLES

SEQ ID NO: 90548 - protein, 77 aa, Unknown
  Obtained from environmental sample
  DOMAIN (3)...(77): Stress responsive A/B Barrel Domain
  misc_feature (1)..(77): Xaa is any amino acid
ILVQRLKALKSVIPCVVSLEVGLNYRDLPSAYDVGLCTTFNTKEDLETYQKHPAHVPVAEWSRSGIAESIAMADYEV

SEQ ID NO: 90549 - protein, 271 aa, Unknown
  Obtained from environmental sample
  DOMAIN (2)...(271): PHP domain
  misc_feature (1)..(271): Xaa is any amino acid
VIDLHTHSNISDGDFCPDILIKEAVKQGLRAIALTDHDTINGLETARKAASSENIQFIPGIEININWNGGKGVPGVGPGGEFHLLGLGINSPTQNFINTIEGLERRREERSRKILDKMHELSIEATWEELLTLAGHETGENSGNSVGHSLGRPHFAALLVKKKIVKSANQAFARYLGVGKPLYVPKEGLVFEEAVSLIRESGGIPVLAHPISLFVAWGRLPDMIKTLQERGLMGIEAWHPTAKPGSCRRLETLGKTLGLYVTEGSDSHGHS

SEQ ID NO: 90550 - protein, 210 aa, Unknown
  Obtained from environmental sample
  misc_feature (1)..(210): Xaa is any amino acid
VFEYTLENGVIVSPGKKPYSGNLGIKEEKISSPGGAVKLDLKENSFVYPSLINTHDHLQGNYRPPVGPAPGNFYLTWLPWDNDLKASDTFKERSQLTREDLYALSGYKCLFSGVTTVNDHFPHKLNSKILPTLPVRAIQEYCIEHECSSYDLKWGDGIETEHKRAVKNKWPFITHLSEGFDKEAMYSIEKLESQKALDDHCLFIHCIGLA

SEQ ID NO: 90551 - protein, 519 aa, Unknown
  Obtained from environmental sample
  misc_feature (1)..(519): Xaa is any amino acid
YINPKTAGAKWIEISAGLEKLETTDNPDEISDIAVALDASGNVAIYASQSFRPRLYKLDWTSKSWNFLWSGGSATAFGPIDSLQSRGNSLIFVRESGVFELDMSFGYNALRNRQDLMEAINSISGRVNCAAFSQGDRFCLSELWLLTERSSAEGRGLSTAFPQAVGKEGLYLPVNHAGDPGSLRPYLQTIEKSKLNMVVIDMKDDYGRLRFTPSNPSMLNLGRVFRPIDIDVFLKTMKERGIYTVASIVVFKDPEAARKEGERYAVWDGAKNKAWEGYYDTRRKKTNEPAENDSAYVTAILPADDPSYEILRTWYDEKWVDPYSEVIWDYNVSVARELCRRGFDEIQFDYIRFPTDGVNLGDARYRWRDSGMDMDSAIESFLKYARSRITAPISIDIYGANGWYRTGARTGQEVELLYPYVDVICPMYYPSHFEQTFLAQNPPEERPYRIYYLGTRRTLIIARGRVIVRPWAQAFYLNVSYDRKYYNNDYVRLQLDGVRAAGKGGLTYWNNSGRYDDIP

SEQ ID NO: 90552 - protein, 437 aa, Unknown
  Obtained from environmental sample
  misc_feature (1)..(437): Xaa is any amino acid
DLGEPLQRAVQSYTVGSGAPIDFSKLKLNEVSGVGTGTSTEQDAQKFYELINTGTKNIRLEGCKIYYNANGSTGGTLPTGDGNLTWTGSADQIAQAGQLFSLIGRNTAGSFTTGLTAERILIITLKDPAGNILDQCVRAADTGDYAINNKSFSRIPDGTGDFYFTDPTPNATNGTSTTGLTKVPAVAPPAPPVISNLNRSLSSVTPTDTVTVSATVTTAAPSTISTVVLQWTLNGTAQSNINMTVAGNVYSATISAQAVDSVVTYKVSATNNLNKTKSTATQNYTVAEVPVGPPVISNLSREPTSVTPSDTVTVSATVTSNTASAISTVVLQWTLDNVAQTPDINMTKNGNVYSAVIPKQVLGAVVTYKVSATNTHGTNSTVAQTYTVGSVSGSTDYTKLKLNEVSGVGEDSEKFYELKNIGTQDIPLEGCKIYYNA

SEQ ID NO: 90553 - protein, 380 aa, Unknown
  Obtained from environmental sample
  DOMAIN (1)...(214): Methyl-accepting chemotaxis protein (MCP) signaling domain
  misc_feature (1)..(380): Xaa is any amino acid
IVFAIEEMTANINSVTKTLADNSKNVSALTEASENGKTGVQTVAQEIQEIAKDSEGLLEINSVMNTIASQTNLLSMNAAIEAAHAGEAGKGFAVVADEIRKLAESSSKQSKTTATMLKKIKTSIDSITRSSNEVLERFGAIDTSVKTVSEHERNILNAMEEQATGGKQILESISRLRDITSSVKTGSDQMAESGNTLVKETDDLIKTSKETVNGMNEVLAGINQISASMVHVKEMSEENNKNFEALKDETNKFVDSMGNEKKKILVVDDEPTVHVMVKGVLGDIYDVITASSGKDALGLFYQGLLPNLVLLDLVMPGMDGWNAYTRIRSLSGFHNTPIAFFTSSTDPENIQMAKEVGSADYIQKPCNHDELLSKVAKLVN

SEQ ID NO: 90554 - protein, 264 aa, Unknown
  Obtained from environmental sample
  DOMAIN (19)...(262): Domain of unknown function (DUF323)
  misc_feature (1)..(264): Xaa is any amino acid
MKRAIFAVIVLAFAAACTAPSDMALIQGGTFTMGSPANEVDRDDDEVQHSVTVSSFYMGKYEVTQKEYKEVMGTNPSSFNENNLPVEGVSWFNAVEFCNRLSQREGLTPAYTVKGTNVTWDRSANGYRLPTEAEWEYACRAGKETPFSTGDNITTKQANYDGFPYNNNAKGTFRNKTVEVRSFSQNAWGLYNMHGNVWEWCWDLYGDYASLAQINPAGASSGSDRIIRGGSWLVHAQFLRSANRYNISPSLVTNAIGFRLVLPL

SEQ ID NO: 90555 - protein, 264 aa, Unknown
  Obtained from environmental sample
  DOMAIN (1)...(68): Bacterial flagellin N-terminus
  misc_feature (1)..(264): Xaa is any amino acid
MRELSVQSANDTNTDKDREELQAEVTQLKAEIDRIGNTTEFNTKKLLEGSATGVRDEIVGTVRINNNSSVVIDATKEKAMAANVSNDKSWAFDGAYMLVKVDQSTDKNGDKIFKAENYNLIGPDGNVFKFKTYTPNTKALPNGLDVNTIIAEGGETRHLLKSGSGSLIDADPTLAKLYQTSTTTPLFTSVPDYGETVRIGAELTERELDTVVEGSILVAGSSFTLTGLDGGVDIDDTSAYGSPAPGIDNISLDSDGRLSLSLTA

SEQ ID NO: 90556 - protein, 112 aa, Unknown
  Obtained from environmental sample
  misc_feature (1)..(112): Xaa is any amino acid
MTIREALAGGSAALAAADIETPGLDASLLLAEVLKTSRSSLIAAASEPLTEASRAIFDGFIKRRLAGECTAYILGRKEFYGLDFQVNPAVLVPRPDTETLVEAALETDTTNN

SEQ ID NO: 90557 - protein, 360 aa, Unknown
  Obtained from environmental sample
  DOMAIN (62)...(177): PCRF domain
  misc_feature (1)..(360): Xaa is any amino acid
MNERLNSLLKRYGELSLLIQDPDLTKDQNRYRSTMKEYSQLSEIAAIHDETENLSKQLEEAKLIAQEEKDPQMRDLAREEFKELETRLRDCEDRLKFLLIPKDPLDEKNIIMEIRAGTGGEEAALFAADLYRLYSRFAETKGWKFEIMSSNETELGGLKEIVFSISGSNVYENLRYESGVHRVQRVPATEASGRIHTSAVTVAVLPEADETEIDIRQEDLRIDVMRAGGPGGQCVNTTDSAVRITHLPTGITVHCQDEKSQIKNKAKAMRILRARIYEMEEAKAAAERAEARKTQVGSGDRSERIRTYNFPDNRVTDHRIGLTLYKLDRIMEGDIGEVFDALKLSAREELLKMTSSEAAS

SEQ ID NO: 90558 - protein, 182 aa, Unknown
  Obtained from environmental sample
  DOMAIN (7)...(182): Ham1 family
  misc_feature (1)..(182): Xaa is any amino acid
LSSDKSIVIATGNAGKVKEFKEMFAGLGVSVTSLADYINPIPDIAETGATFYENAKIKADWAYQYMQQVRAADGGVWSLADDSGLEVDALGGAPGVLSARYSGEGAGSVKNNEKLLNALRDIPESKRTARFKCVLVLKTGINTYLSAEGVCEGRIINEAIGSNGFGYDPLFVPNGFDRTMAQ

SEQ ID NO: 90559 - protein, 258 aa, Unknown
  Obtained from environmental sample
  DOMAIN (24)...(162): TraX protein
  misc_feature (1)..(258): Xaa is any amino acid
MIKNISLSSRDKMNEMVLYKENIKTGLTSNALKIIAIIAMTIDHSATILFPRYSLYMPALFMHVIGRLTAPIMMFLIVEGYHHTKNIKKYIFRLFILAIISHFAYAFCFDKHFDTVFDQTSVIWAYMLGLLALVIRKNDKLKTWQKHLILFPVMWLAFPADWSTPAAFAILYMGLNYGNFKKQMISLVICVAFYTIIYSIFLNFVHGLIQMLIVLAIPLLYQYNGQRGTWKGMKWFFYIYYPAHLAFLGLIRIYVLHK

SEQ ID NO: 90560 - protein, 418 aa, Unknown
  Obtained from environmental sample
  DOMAIN (64)...(284): Binding-protein-dependent transport system inner membrane component
  misc_feature (1)..(418): Xaa is any amino acid
MGGVNDKRAKQMTKKTAACLLAFPPVLAAAFSFILPYAASFAPAIRGLGSGLTIFQNTALLGITLFTFKQAFFSVLVSLALGLPGAWFIGNSRSRFTPFLKTLTAVPFAMPSILVVLGFVLFFGNSGWINRLYGVLPFSGGQPLRILYKPAAVILAHGFFNFPIVIRLAGDGIARARRAYAPAAASLGASPLKTILTVILPLTVPSILAASFLVFMYCFTSFAVVLVLGGGPNTTTLAVEIYRYARIFLNYSNAGFLALIETMIAVSVFLIYVFAGKKSGEIKTNLHEYAETGRKSAVSRFVMIAYFIVMAFFVLGPLLSIPLESFLYRPSRAAAQVLSVRWWSGLGGTCLPALGRSLTIAFFSATTACILAFCAAGAVKLLETNNGQTFLPVNFIRFLAASPVISSGIVLGVGWLIL

SEQ ID NO: 90561 - protein, 282 aa, Unknown
  Obtained from environmental sample
  DOMAIN (33)...(282): Quinolinate synthetase A protein
  misc_feature (1)..(282): Xaa is any amino acid
MQAAELYNKLRSVQNGTVLCQYSMENCEKLADLINQINELKKEKKVAILAHSYVAPEITFGVADYSGDSYQLSKNAMETNAQTIIFAAVEFMGETAKILNPDKRVLIPGTNTGCSLADSITGEQVKKLKEQYKDHTFVCYINTTADVKAACDVCVTSSNVIKIVSNIPNDKIVFLPDKLMGENLKNELEKMGVKKELVLHTGTCYVHEQYDPDLVEYFRIQNKGLRVVCHPECHPGVAMLSDYVGSTGQMLDYIRNLPEESPVLLLTECGLNARLQSELPNR

SEQ ID NO: 90562 - protein, 334 aa, Unknown
  Obtained from environmental sample
  DOMAIN (41)...(132): S1 RNA binding domain
  misc_feature (1)..(334): Xaa is any amino acid
MQKNNVAKRGILVSSTPYDTRIAVLDGGILTDLLVENSTSNRTLGNIYKGVVQRVVPALQAAFVKIGMEKAGFLHINDAIDRDALLRKEYGEDDSSHTIAPSIEKVLKAGDEVMVQVIKEPINTKGARLTTHISFAERFLVCMPNSNFIGISKKERDFNKRKIFKQLIRAHKAPDVGYIVRTQALFESEHEIVRQMRKLEEKWEITKHNFKEFAPESCVYQESNSVEQSIREYFNEQMEYVYVDNENEYQNIREYLGGANPENLQKIKLWKGHESLFEAFGIEDDYEKSLSTKVYLPRGAYLIIEQTEALMSIDVNTGSRVHGSDQSKIFLETN

SEQ ID NO: 90563 - protein, 164 aa, Unknown
  Obtained from environmental sample
  misc_feature (1)..(164): Xaa is any amino acid
VTYLYETHLHTAGVSKCAVSRGADYIAGYKDKGYSGIIVTDHFYNANCALSRSLEWKEWVNRFYDGYEEARNEGERLGLDVFFGWEETFDGCDDYLVYGLDKEWLLAHPEVRKWTRGEQYSAVKAAGGCVVQAHPFRQRYYIKRVVLSTGCVDGVEIANGGNDA

SEQ ID NO: 90564 - protein, 404 aa, Unknown
  Obtained from environmental sample
  DOMAIN (1)...(398): UvrD/REP helicase
  misc_feature (1)..(404): Xaa is any amino acid
LRKGIIIAGPGTGKTAVLAAKIVRVISEGTNPASVLALSFTVKAAAELRDRILRMTQKPEAEKPFVTTFHSLCASILRDQYTAAGLPSGFKILSETERDEFLAKVCAATNSKALSSRRLGEYIEERKRYLLLPGEKTKDLIRILPDSLVSFIHEKNVGDNDSAADGAAAGAYAEYRKQLLSLGAVDYDGLIAGTVRLFAVREDILKNYCQKFCYIFIDEYQDINFSQYALIRLLVHNGKVAPSLWVIGDPNQAIYGFRGSDKEFIDRFLQDYPDAGRFELKKSFRCAEPIIKAAGRLAKADLKGADLNSSVQINLFRRTYPTEKSEAEGIARIIASLVGGTSFFALDSKTTKNMDSNAADFSPSDCAVLVRAAALAEPIAKALNDHGIPFEITRGPNMVGRRTC

SEQ ID NO: 90565 - protein, 477 aa, Unknown
  Obtained from environmental sample
  DOMAIN (144)...(314): Protein of unknown function DUF115
  misc_feature (1)..(477): Xaa is any amino acid
MYEVLERLHSRYNPQLEAQRYIDALKIDKDINCFILIEPGMGYMIPVLREKRPDGKIIVLHADAGFRTLSGVFPGDAVWYPDSEFNVQGFLEAEVPPAARIRIVEWRPGLNVYGDKVLGLFRESAEFIKRLEAGRRTDAFFGKRWVRNFFRNLALFQNTLMYRKMDVPIVITGSGPSLEAVLPRLLALRDNIFIIAASSSLPALAATPGGGITPDMVISTDGGGWALTHLYSFFRPIVSQPVILALSLCAAVPSQCSGVPLLPMNDGSLWQSMALHAIGIPSVLIPQRGTVTASALELALELSNGHIFLAGMDLSVCDIRSHARPNGFDHLLFGTATRLRPVYTQYFLRSGTIKSGGSLDVYAAWFKSRIASFPKRVFSLGSNHEVFNELTRDCPLEGNGNNRIHMEDHFELVKPVDIPGGRARRALETISAALGDPRYASTLRHELSPLLFPSRMEVPADEIAHALHDIAKRYYNG

SEQ ID NO: 90566 - protein, 387 aa, Unknown
  Obtained from environmental sample
  DOMAIN (169)...(380): Methyl-accepting chemotaxis protein (MCP) signaling domain
  misc_feature (1)..(387): Xaa is any amino acid
MSHIEDTISQNSIMAVKRILLIAAGLIFISILLSSLGSKFIIVNPIVKVARVVKIVAQGDLTHNTDVNTNDEIGDLADDFNFMITKMRELIGTMKHKIDALTNTGHELSSNMAKTSESVDQISFNFEGMKAKMSKQEESASEADKAVNKIKVNIDNMNRLIDDQSASINTSSSAVEQMTANIHSVTHTLIENSKNVSELTEASENGKVGVQTVSEKIKEIARQSEGLLEINAVMENIAAQTNLLSMNAAIEAAHAGEVGKGFAVVAGEIRKLAESSSAQSKSTADMLKKIKASIDGITASSNDVLSRFGIIDEKVKTVSTHEVNIRNAMEEQEVGGKQILDSIERLKEISVTVKQGAGEMHESRDNLNRQTSEFIKISNESMSGMND

SEQ ID NO: 90567 - protein, 233 aa, Unknown
  Obtained from environmental sample
  DOMAIN (118)...(194): Domain of Unknown Function (DUF349)
  misc_feature (1)..(233): Xaa is any amino acid
LIKEIEELANMPVVLENRTKAFAMLEQWKAAGYMPATKIQELWPRFKTGLDKVMDSVLPLLKEQEKGQEENLKTKEDICAQIEELAGAAGEWAEQLKKIQELQAKWKNTGFVPKVQNHAIWERYQAAINSFFKKQEAYKKRIDEQIGERIAAREKLCEEAEALAKSTDWRNTPKAFTKLSADWKNAGSVPSEQYEKLLQRFKAASDFFFEKRNAHFDSARKAREEICAKIEAL

SEQ ID NO: 90568 - protein, 427 aa, Unknown
  Obtained from environmental sample
  DOMAIN (144)...(247): Protein of unknown function DUF58
  misc_feature (1)..(427): Xaa is any amino acid
MEKRKVNRAAVFYPCTMGVFILLIIILSFTAGAIRRELVLTLTGAVVLAIWAYCLVMTLLLALMHRQRAKNIFIRLEPEKIVRGGSVNAVYTENNPAYAGKNIFQFPGILVRLRIILKTKDGRRVIYDFKPENKNNAQENFQVKKRGAYFSAYDELAVFDIFGFFRFAYLLSAGANARLLASPNAAEEPLSVQARAGESNQQPEFSFQRTDNLIDHRPYIPGDDPRRINWKLYGHGGGLFVREGEREPPPHSNIVIMTDCEYDPSLYDREEARLGVDVLCENALAAAQACLESGMDVLITYTSDAAVRSDIPLLLSAKQASSLAWPAALPLSASMELPATPEDYSILILALPRSASDTALDRFLKNTAASRAGKNSVVELIFFCDDDNERFVAAETCCALYRQRPGITARIVREQGVGSRERHERKK

SEQ ID NO: 90569 - protein, 719 aa, Unknown
  Obtained from environmental sample
  DOMAIN (483)...(550): Transglutaminase-like superfamily
  misc_feature (1)..(719): Xaa is any amino acid
MKEKNELLRHMNQQFASHNPSILSNNNPTPHSPLPTPLFFRFIALYAILYQLRFIADDLVDTAVFAAALFVAAGAGLFLNEIKIKEKKINTFGGLVVIALVPWAARAFIAAPRLFAPGEAVGLDSLLLNFDRNNFVSLLPFYWTAASTLLSLRSRLFLRAAVIVDALLLITIAGLAHLSDLAIYRLPIVMIITLAGIVFFQALALLFSLPPELKTQKGERAVAVTMLLLLISAGGLLFLKPSQQRAAQKGGGLLEPKLFSFDFSQVLRLDSEISMNDDLVLIVKKDPDDNHILMRRSVMSGYGKKQGFYRMEEIDEKIHPQRLPSRSVLFPREDFRMSRQLRQEYFIVNFDAAAFIGMKEPLEIIPYETWDSSSFKSAYLVESLASDAAYEQYSDSTYTEDGGLFWPEPADLGLGEKEYVLYTAYGDDDRIRTLAEEITAGYERYGDKVEVIYEWLKYGDFRYSLKPGIAPDGDQLAWFLFRSKKGYCSYYAFAMTLLLRSLGIPARIAAGFFLDPGTGTFDYYQVRSDMAHAWVEVPFPGYGWIEFDPTSENLAEGEEFRFSTGVDSQLFERLMREILENRSRLRVKTGNELRDTLGNAQSLASLSAMLLRKILLPLLIVSLIIIFILIRCGFWLLYVMRHNKRGRAVCLWKHARRRLRLAALGYPGVKSGLSESEWALRSDTAVKGAYVLYLAAAAARFAPEYHDDDFAAMPNDYRL

SEQ ID NO: 90570 - protein, 375 aa, Unknown
  Obtained from environmental sample
  DOMAIN (157)...(371): metallopeptidase family M24
  misc_feature (1)..(375): Xaa is any amino acid
MEKNSSVFEARFEKIYNWMAQEGISLLLLEDTESRRDQNIRWLTGQPGDALLFLSAEKKAILTAWDINLAKLYAAHSPVTIASYNDFDRKPDKAIALIAKKLGIPPGAKIEIPPVTPYPAFLDYVGELADYDILCRENGAASEIRKLRAVKDEEEIAIIRKAAEITNELIDQLEKNVISGKIKTEADAALFIEVEARRRGCEGTSFGTLAAGPDRSFAIHAFPNWTCAPFGGKGLSILDFGVKFGGYCTDVTLTFTRDLDPKQEKLVSLTEKAAKLAISMAHNGCMAKNIAEAVDAHFSKSRKKMPHGLGHGIGLQEHEYPLIKNANDNEWVLEPGMIFTIEPGLYDPLLGGCRLENDVLITESGHEVLTTAHII

SEQ ID NO: 90571 - protein, 96 aa, Unknown
  Obtained from environmental sample
  DOMAIN (2)...(95): Sigma 54 modulation protein / S30EA ribosomal protein
  misc_feature (1)..(96): Xaa is any amino acid
MNLDIKAVHFTMHDDAKEYLNKKIDRLRNAENMIVDLLITIKKEKNFDAEATVNFRWGVSIHVAEEDFDLVKAVDKMIDKLETKITKEKEKVKEKR

SEQ ID NO: 90572 - protein, 442 aa, Unknown
  Obtained from environmental sample
  DOMAIN (74)...(263): Sigma-54 factor, core binding domain
  misc_feature (1)..(442): Xaa is any amino acid
MNPQLYQSIKLMELPVFDLRERIEQELEQNPALEIIEDKSVITLDETDANSKEEDEYFESTSDPGRQGSEQAADEHRKFIEGALTRPETLQEHLLWQLQLEPVDDELRDIAETLIQNLDDDGFHKEKPEALFKTVPPRLEEALTLVRGFEPAGTCTADYRESLKVQAALLPGAPEGIEKALDNLDLIEKEKFSEMAKKTGIDEEQARLICECIKKLFPFPGRAFAPSDVRYVIPDIKVIMDNDELTINLNDEAFPVLGVNSFFEELSESKSGNEAAGSQTDARDFARNNVREARLFIHQLNRRNKTLIRVAAAILRFQHSFFIKGPKYLAPLTLGDIAKELNVHETTVSRTANGKYMQTEWGIFEIRYFFTNSISGTGENRSKFSKKSVKEIIKEIISKENRILSDQEISALLSQKGIALARRTVAKYRKELDMGSSYSRKL

SEQ ID NO: 90573 - protein, 343 aa, Unknown
  Obtained from environmental sample
  misc_feature (1)..(343): Xaa is any amino acid
MSNDRVISSADDIDLTRHGVIEAHAGTGKTYTIVNLVLRMLEQTESRGKGGGRYVHLSDVLLVTYTEKAAGELKKRIREGVAAQINKYRDDREKLVLTAHLEDCLNNMHEALIGTIHSVCLRLLQTWPFETGVHFNTAMIEDDNEGADAALRTSMRTDWEDAGSGLPQGLKAMEEKGVKLEKDKHIKLITKTALKIMGGDGAELDDAQAGGLTLDEAINKINNAADAELEDLTQKLLYAFINRAAKKLAARYDAYKRENGLVSYDDMLRLMRNAVYSRDGEILKRLRKKLRYGIIDEFQDTSPVQWDIFQKIFLEDADETNIYIVGDPKQSIYSFQGADINSY

SEQ ID NO: 90574 - protein, 406 aa, Unknown
  Obtained from environmental sample
  misc_feature (1)..(406): Xaa is any amino acid
MADDSKTLELQIRIAAQEAVRAVASLKGEIQTLASEAKKFAGSDGAALEKSFKDAEAAAKDSASSIGDIKKAIGSLAEVAAATKALSVIKDMGDFALRTADNFQTMKNQFGVLLGDMEAGAGLFNEIKAFNDVTPFDLDTLTQATNVLIGAKVPLQDLQAQLTKFGDLSQGNSQKMTSYVNAFSHAAAKGKADMQVLNTYLNQGVPILDALARNFGVTTEEVVKMSSEGKISFQDFSKALDDLTAAGGQYFGGMELASQSLAAMQEGLKEAVNSLAASFGDLLLPAATSVTGTLTDLTNAINESPIAKGVLAAALTAVTAVMGVMAVKAAALAVKTWLAQAAQMGLNASLAVTNPLLWAGIAAAAAATAGYVYYASSQQKAARATEDNALAQRKLKDAVEDSYNAV

SEQ ID NO: 90575 - protein, 404 aa, Unknown
  Obtained from environmental sample
  misc_feature (1)..(404): Xaa is any amino acid
MTSTFMGIEIGKRGVQAHQQALYVTGHNLDNAGNDGYSRQRVEMSAFEPIYLPGLNRAETPGQIGQGVVIERIERMRDQLLDKRIIQQSSKEGYWTARDPYVRMMEHLYLEPGENSVRSKMDSFWASWDELSMFPADTAPRTAVIERGKTLIDGIHNRYQGLKGLQEQVDSDIQLTVGRVNEITRQIAALNGEIVRIKAMGDNPNDLMDRRDLLVDRLSSIIDVTIDARDPDEFMVHTAGLVIVQGKIGRQLDLRKGVDDEGYAHIFWQDTRQEIRFSKGALGALLEMRDETINAEIRTLDNMTMNFVDLVNEIHSKGYGINGATGLNFFSEYPFVTNVNGNYDRSGDGNFDSSYIYRINGSNALEPQAQPGFEGTITLAGPNGNVLVPYNSTRHVADIISRIN

SEQ ID NO: 90576 - protein, 214 aa, Unknown
  Obtained from environmental sample
  DOMAIN (28)...(162): Bacterial flagellin N-terminus
  misc_feature (1)..(214): Xaa is any amino acid
MRRISTDMPNVDSQFYLRRHEEKLAKVQSQIGSQSRILELRDDPLAASHAVRYESYLARLERFEKNTQYAKDHYNVAYSYMNEALSIMQRVRELAVQGSNGTYSPEDLKLMGVEVNELIKELASLANSVGPDGKQMFAGDKAFTEPFRIVEGTIDGGSESVVVRVEYRGAGASRKTEVSDHAYVDLDLGGGEVFWAEKMQIFSNVNAANYRVAP

SEQ ID NO: 90577 - protein, 61 aa, Unknown
  Obtained from environmental sample
  misc_feature (1)..(61): Xaa is any amino acid
MVMQQGVAFPIRGYSLPSSVVTVTFLGKTWQSRAEVDGKWQLSLDPVQAGGPFTMEIESEE

SEQ ID NO: 90578 - protein, 432 aa, Unknown
  Obtained from environmental sample
  DOMAIN (1)...(403): Alpha-L-fucosidase
  misc_feature (1)..(432): Xaa is any amino acid
MTDNVIDGMHGCLEEEQYVRPEDPQILKRLEWFRDQKLALMMHWGIYSQIGLIESWAMSDSDSDWSRRGVDWDVDARSLKRQYRDLYRSFNPIRFEPEKWAEAAANGGFKYLIFTTKHHDGFCMWDTKLTDYKVTSADCPFSKNKRADIVSNVFEAFRREGLGIAAYFSKADWNVPFYWAEGQFKSEFTSCGPSYVPAEQPELWEKFVNFTHDQVMELVTGYGRLDILWFDAGWVCRKNGQDIRIEELVEKARRVQPWLLSADRTCGGVCENYVTPEQSVPEKPLTVPWESCVSMGDGFAYSYDDNYKSTKRLLRLLIDVVAKGGNLALNVAPQPDGRLPRPALRRMAEMGAWLKKYGEAIYGTRVCSPYTSGEFAFTQKAAEGKVFAFYLSDRGFTPELSIPYGEKRVVAVKNMTTGEKIPFKMKDGCIAV

SEQ ID NO: 90579 - protein, 788 aa, Unknown
  Obtained from environmental sample
  DOMAIN (50)...(632): Carbohydrate phosphorylase
  misc_feature (1)..(788): Xaa is any amino acid
MVSQERLAQAAKDDSYLAALKEVYDRFQRYKKGDTWYRGSHKDVVAYFSMEYGMDASLPIYSGGLGILSGDHMKTSSDLGLPLVGIGLLYRQGYFQQKLNADGFQQESYPENDWYNMPVERKNGKDGQPLKISVELSGRQAVAQIWEVKVGRSSLYLLDTNIDENAQDIRNITAALYGGDKETRMQQEILLGIGGIRALRALGINPAATHMNEGHAAFMGLEKIREIMTEMNFTFAEALEAVWPTNIFTTHTPVPAGNERFDISMMEKYFRSWPQVLGISWKDFLGLGRINVNDEHETFCLTVLALKMVAYANGVAKLHGVVSRDMWKGLWPGLPLNEVPIGHVTNGVHTRTWVSSGMLDLLDRYFGPKFEDRPTELSIWERMDRISDEELWRTHERRRERLVAFVRERIREQYKRTGAVERRIRQAEDVLSPYSLTLCFARRFATYKRGNLLLRDPERLLRLVRDNDRPVQLIFAGKAHPHDMPGKDLIRDIIHFAEKYDVTNRIVFVENYDMSVAKYLTSGGDVWLNTPRRPMEASGTSGMKAAMNGVLNCSILDGWWDEAYNAEVGWAIGHGEQYNDERLQDDVESKALYDLLEREIIPVFYDRGRDGLPREWIKMMKDCMKQIGQSMASHRMLMDYSNQFYFPALKNFRRFSKDNYAEAKSLAAYFNKLQQSWGNLKIVKIDSNAKPVMHRGDTLSVTAHIDLGNILPEEVQVELYHGTVSSQNKEFANAAKTEMKWVKTDGNLNLFQVRVECVDTGMQGHTVRILPKHDALIHPYRPGFVKWA

SEQ ID NO: 90580 - protein, 543 aa, Unknown
  Obtained from environmental sample
  DOMAIN (1)...(226): MutS domain III
  misc_feature (1)..(543): Xaa is any amino acid
AFPEVIADLERLVSRVTFERANARDINALRRSFESFPKLQKALAACSIPHIDAICKELSGFEGLASRIAATLLDDPPLSVKEGGIIRKGIDGDLDELRDASVNGKQWIAKLQENERKRTGISSLKVGYNKVFGYYIEVSSANTHRAVPDNYMRKQTLSTGERYVTPELKEMEEKILGAEEKLCALEYEVFAKLRREIASHCERIQRAAQAISALDIFVSLSRIAAENAYCRPTVNDGADIVIKEGRHPVVEKLCEGGEFVPNDTDLISGESQIALITGPNMAGKSTYLRQTALIAIMAQMGSFVPAASAQIGIVDKFFTRVGASDRLARGQSTFLVEMIEVANILNNATDKSLVLLDEVGRGTSTFDGISIAWSVAEYLHENKDRAARTLFATHYHELTEMPLIYPRIKNLHVKVKEWNDKIIFLRKIDTGSCDHSYGIQVARLAGVPTSVILRAREILNNLENMELTPDHKPALARKKDGSFGAMASASSSPTDGNDAVQLNAIDEYAQSIIAKLKSIDLNAVTPMDALTLLYELRKKAVEG

SEQ ID NO: 90581 - protein, 394 aa, Unknown
  Obtained from environmental sample
  DOMAIN (122)...(314): Adenylate and Guanylate cyclase catalytic domain
  misc_feature (1)..(394): Xaa is any amino acid
MGNVTATDLGSYNESWNGLLAGFAPVYDKDGKFYCVADVDISDKVILDQRRYSLVMTILQILALSVSVLFGILNSLLYRRKAQEIEEAHIKLQYFNNNMRQAFSTYLSEDVVEEVISDPTRMQLGGINRHMTALFSDIKGFTGIAEKLTPPHLVDLLNHYLSTMSDVILEEKGTIDKYQGDAIVSFFGAPLELDDHALRACTAGIVMKRMEKEINKYVLENGISPSPLLTRIGINTGSMVAGNMGTENKMNYTIMGNAVNLASRLEGVNKQYRTWILVSEDTLRETDGRYLTRKLDRVRVVGIQEPVRIYELLDTLETADPQKKKLVTIFQEALDCYEKWDWKAAGQGFRESLALETGGQKGHNPSALYLERCMRFLTRPPREDWDGVNNLTEK

SEQ ID NO: 90582 - protein, 233 aa, Unknown
  Obtained from environmental sample
  misc_feature (1)..(233): Xaa is any amino acid
MTCKRIAPAILAALLPLSLAVLMGCGGSNNPVEVSPKPVPSGDSGLAGLSISTGELSPAFNPNINKYSATVGYLGESSMGVTATPKDPKARLTVNGVAYASGTQVNVALHEGINTIHVMVAAEDGLSAHSVKLTLNKLPFNTSVWVVNGIGGVPLENTLLTLTDARGKVLADNVPLPRAKNGQKVFGLDPKEKYNIYARGDDAARACFANFDPSKEDTAEMICLRTYSTYYQY

SEQ ID NO: 90583 - protein, 1305 aa, Unknown
  Obtained from environmental sample
  DOMAIN (679)...(706): The GLUG motif
  misc_feature (1)..(1305): Xaa is any amino acid
MSVWGLRCPLVFNTNWLASIWNIPTGDLTIGDNLPTLKPNTQSPAPTLPAAYNAPGTAANPFFVTNEADLRKVGTGTDGWTLSAHYRQTQNITLTNNLSVIGTNINKFTGSYDGNEKTISGLTMTRTSVSYFGLFGYIGSDGIVKNVTVTNGSITGTASSYFGGIAGQNEGTIENCSFSGTVNGDTTSDNVGGIVGENSSTGTVSNSINNATVKGRDQVGGVVGQNNGTVINSSNNDSVTGNNQTGGIAGTAQGKIENCYNTGTVTGNQQVGGIAGTNVGSGNYIKNSYNTANVTSSAGTSSNLGGIVGFNQANTTVEYCYNTGNLFGPNAVGGIAGNVAAGSTVRYCVSLGERVTGSGTNIGRIAGIYNATLTGNVARELMRIGASGSESVVTGATTQGNGLDVSLGVGQQGSVFSGWNYSTIWNISGNLVVGGDLPTLKDNTQSPAPTLPGSNPALGTAANPFLVTNEADLRKVGTETTAGGWTLSAHYKQTQNITMTGGNFPRIGTGTSTTLFTGTYDGDGKTITGLTITGSANYLGLFSTIGASGVVKNMNVTGTITQTADTSFTGGIAGTNEGTIDNCSFSGTITGSSCDEVGGIVGRHTGTMINSRSSATVSGRNQVGGIAGRNQGSIENSYNTGTISGRNRVGGITGINLNNSANIKNCYNTGDITAAGATTASYAGGIAGTNETGSTVDSCYNTGNVTASTNAVGGIVGSSINSTLQNCVSLGARVTGTNNVSRVGGTSGSSTLGNNYARSDIKIGASGAEAAVSPAGANTPNGGNISITSGASLTVVFSGWDTALWNISGTFAIGGNLATLKTNTQSPAPTLPEAYNPPGTAANPFLVTNEADLRKVGTGTDGWTLSAHYKQTQDIAMTTSNFTPIGNDANRFTGTYDGDGKTISGLNITGTGNNLGLFGFIHSAGTVKNVSASGTVTNTGTGTVMEYVGGIVGQNNGTIENCSFSGTVTASACDMVGGIVGQNNGTVINSRNSATVSGKSQVGGITGRNQGTIDNSYNTGAVSGSRYIAGIAGVNTNLGMYIKNSYNTGNITANEVTESSMAGGIAGLNQSGATVEYCYNTGNVTALTNNVGGIVGSNSGSTVRYCVSLGARVTGGNNTCRVVGIMSGTTTLTNNKARADMKVGASGSEALPTINIGANEREGESVSLGAAQNSVFSSFFTTTIWTLGSTLTVGGNLPILQMNTQSPAPTLPAAYSAPGTAENPFLVTNETDLRKVGKETTAGGWTLTAYYKQTANITLTTGSFTPIGTNSTNSFTGSYDGDGKTITGLSMTGTANNLGLFGYIG

SEQ ID NO: 90584 - protein, 521 aa, Unknown
  Obtained from environmental sample
  DOMAIN (198)...(225): The GLUG motif
  misc_feature (1)..(521): Xaa is any amino acid
TGTDGWTLSAHYKQTQNITMTTSNFTPIGNDANRFTGTYDGDGKTISGLNITGTGNNLGLFGVIHSAGTVKNVSASGTVTQNADTSFTGGIVGQNNGTIENCSFSGTVTGSACDMVGGIVGQNNGTVINSRNNATVSGRSQVGGITGRNQGTIDNSYNTGAINGKRYIAGIAGVNTNTGKYIKNSYNTGNITATEATESSMAGGIAGLNQSGATVEYCYNTGNVTASTSNVGGIVGSNSGSTVRYCVSLGARVTGGNNTCRVVGVMSGTTTLTNNKARADMKVGVSGSEAIPTINIGANEREGADVSLGTAQNSVFSSFFTTTIWTLGSNLIVGGNLPILQMNTQSPAPTLPATYTAPGTAANPFLVTNEADLRKVGTGTDGWTLSAHYKQTANITMTTNNWVVLGAFKGTYNGNGFTVSGFTLNHPTTDYRGMFENIDLSGIVSNLGMVNVNIKGQNYVGGISGGNEGKIENCYVTGIISGNNQVGGITGMNRGAIENSYNTGAVSGNQSVGGIAGVIQE

SEQ ID NO: 90585 - protein, 201 aa, Unknown
  Obtained from environmental sample
  DOMAIN (38)...(201): Initiation factor 2 subunit family
  misc_feature (1)..(201): Xaa is any amino acid
MNINSRHYRTIWLKEPECQVVQIINQQALPFKFEILDLRTVEDVCKAIKDMYIRGAGLIGAAAAFGMYLAALKANDVSFNDDLSSAARLLKNTRPTASNLAWAADRMAAAGYSGTLEEKIETARLKAQAIADEDAEYCKRIGLHGLELIKKIARQKKDGEPVRILTHCNAGWLAFVDYGSALSPVYAAFDEGINVHVWVDE

SEQ ID NO: 90586 - protein, 235 aa, Unknown
  Obtained from environmental sample
  misc_feature (1)..(235): Xaa is any amino acid
MSLETAKKAVDWIFDNIPAYSDGVEIGLIGGEPLLEVELIKDLLAYTRSKPNACNFVIFATTNGTLLTDEDKEWFSSNKDYVVLGLSLDGVRETHNRNRCDSFDKIDFDFFLRNWRDQGVKMTLSEHSIKNLAQNIKFIHSLGFTRIGGVNLYEGNYDWNSDEYIRLLVPQLKELVDFYFENETLALDQMFDKHVGLCEVKDNERKGWCGIGTGTPFFDVDGRRFPCSFVTPMTF

SEQ ID NO: 90587 - protein, 472 aa, Unknown
  Obtained from environmental sample
  DOMAIN (365)...(400): UvrB/uvrC motif
  misc_feature (1)..(472): Xaa is any amino acid
MVDLAAAEARAMGSDYLGTEHLLFAAMKEQDSSVQLFLSKKAIDVDLLRVVVQTTFSHPQATRNEGEYISANGCPSYFIHRDRQSKYQGQHTDRAKVRPASYPVLTPTLDNFSRDLTALAKTGKLDPVIGREKEMNRIVRILARRSKNNPILVGEPGVGKTAIVEGLVQLLVSGNAPEALSGKRILSLDMGSIVAGTKYRGEFEERIKKITREITQAGNVILFIDEIHTIIGAGGAEGTIDASNMLKPGLSRGDIQCIGATTLSEYRKHFEKDPALERRFQAILVEETSVDETLQILHGIRKKYEDHHKVAYTDAAVELTVKLAKRYVTGRFMPDKAIDILDEAGAMRKLEYSDSDEPPEIAGIEAEINGLTEEKSLLVNAQDYEHAAMVRDKVRALRSRLESARIAWEHAYNKEQLKVDEDDIRRVVSQATGIPLMHFAEQNSKRLLHMEAEIHKRVIGQDDAVQRICSAI

SEQ ID NO: 90588 - protein, 91 aa, Unknown
  Obtained from environmental sample
  DOMAIN (2)...(82): Ribosomal L27 protein
  misc_feature (1)..(91): Xaa is any amino acid
MAHKKGQGSVRNGRDSKSKRLGVKKFGGERVIAGNILVRQRGTTFHKGNNVGIGVDHTLFALIDGFVKFEYVNKKRQKISVYPELEKSAKP

SEQ ID NO: 90589 - protein, 90 aa, Unknown
  Obtained from environmental sample
  DOMAIN (4)...(90): Plasmid stabilisation system protein
  misc_feature (1)..(90): Xaa is any amino acid
MLRLETSSKYKKDRKLMIRRGKDMSLLDSIIEKLQNQETLDPKHHDHPLHGDYNGFRECHVTPDWLLIYWVDNEALVLTASRTGSHSDLF

SEQ ID NO: 90590 - protein, 507 aa, Unknown
  Obtained from environmental sample
  misc_feature (1)..(507): Xaa is any amino acid
MPETTQTLSSYIDTLQQALAARKEFMEREDMQKLKDELRSFHASFASLYNIYLKKKLIDEDPYKQEAKINELEVPDASAFNEQKRLEQMSIRLANYDNQLDFLTNFYQLGIDFLNLDRIKRIVGLVRYIDWVALSPDSQSLMTKAVAEISINSKAGVDPITLSIIGESLSRLSKTTASSMAILKNLSIYYRECYKLEIRQKITQSMSAGEATLENIKKKMPSAMPGSPFYRELVEELIKEDYSKDGPDMKDMVLNALKVPATKQKAVKAPVNFKNILLDGIQVIGGASASLTEIMTKLDENQAIMESPKKGLMHMIKELIRQITNAEPEEVIYTVEYLDQTKDMPVKEKVYFHQLRDELEKKIRFLASLMKGPAYQKLAQMTEEQIIGYLEKNISEVQNYHKILGALDDFFKAKVIPENRDKIKGIKPELSALKNSYVKANQLRYEYSAQKEEEEQLRRLGVNPTGDAPPPPTNASPPNAKPSDAKPSNAKPNKPSDTKPSGKAKVS

SEQ ID NO: 90591 - protein, 117 aa, Unknown
  Obtained from environmental sample
  DOMAIN (17)...(112): Peptidase family M23
  misc_feature (1)..(117): Xaa is any amino acid
ASPYGYRKDPFNGNRQQFHSGLDIRGSTGTPVKAAMAGRVSNTGYDPVFGNYVVVNHHSGYRTLYGHLSVIRTRNNAYVGTGEKIGDVGSTGLSTGPHLHFMVYKNGVTVNPRSLMK

SEQ ID NO: 90592 - protein, 275 aa, Unknown
  Obtained from environmental sample
  misc_feature (1)..(275): Xaa is any amino acid
DDISVIRAPRGVVFGSPNTSKSVILDKIASVWNAGAQEYTTLDAVDSGVKYALITIKTGGEMFFGRIVNDSIFTIPESGIFIFKLSMFLTLFLTLYFLISFKPHPITLVQNRIKTLRTNLFEELYIKKTGQDRAKWILELEQRRGEIRSELKSRLGIKRSLENKIDEIIDKAWDELLAVMKSGYDLASLEEIVKTRAVKVEKPKTEGPKTVWDEIKELEEVDEAEPVEEIEQAEPVDEIDEIEEIEEVEEVEEIENADEIEAALTGAKKITAASV

SEQ ID NO: 90593 - protein, 385 aa, Unknown
  Obtained from environmental sample
  DOMAIN (324)...(385): TRCF domain
  misc_feature (1)..(385): Xaa is any amino acid
PLSKGERGQNDVEKLAEGKVDILIGTHRILSEDVKFKNLGLLIVDEEQRFGVKHKESLKQLRYKADALSMTATPIPRTLHMSLVGARDLSIINTPPRNRLPIETVVAEYHDDLVKSAIENELDRGGQVYFVNNRISNIPALQDRLEILAPKAKTISAHGQTEESELEAIMKEFIAGRYDILLSTVIIENGLDIPNVNTIIVNRADTLGLSQLYQLRGRVGRSSEQAYAYFLTPPFNEVKEDSLKRLRALEQYTDLGSGFQIAMRDLEIRGAGNILGTRQHGFIAAVGFELYCKLLQEAVDEIKGGANGEENAHSDAALPDTRLDVPIQAYIPTEYISDGQTRIAVYQEMSSLKTTEELSETERGLSDRFGALPEPVGALILLMRL

SEQ ID NO: 90594 - protein, 745 aa, Unknown
  Obtained from environmental sample
  DOMAIN (507)...(669): Type III restriction enzyme, res subunit
  misc_feature (1)..(745): Xaa is any amino acid
MKSPFGPTVEARLGLLSDLLAGRRRLIVAPAAALLQRTPARRELFNAVIRLETGAEVPMDSVAAWLSNSGFRRESSTDNLGAFSIRGGILDLYPFLSDNPYRVEFWGDTIESIRSFDVFTQKSVGAHKSLEIVPMREFCISEAHIESALERMLASGGSGGAAADEAAVRKLEHQWKTVGDLDGAEWFWHWFGLGSASILDYLPTDAIVVWDDIVPVKRRLGEALDNYAHHLERVPEAFAPLVSPPAELLFDEKTVADELSCYDVVYVDTVDVPKDTVVFPVSFLPQPSLQQEIGLIVGDLRERAAGGCRCVVACHSAGHAERMAELLGDDVGAVTEVVTGALHGGFICTDGNLLVYSESQIFNRPYRAVKVKKQKSGIPLGSFDQLSVQDTVVHVEHGIGRFVGVERVKAGDSVTDCMVLIYADNAKVYVPIEDFHKVQKYVGKEGFAPPLSKLGTQAWERLKERTRESLREMAQELIALYAKRQFLEGICFAPDSVWQREFEDSFVYEETPDQLRAIKEVKADMESAKPMDRLICGDVGFGKTEVAMRAAFKAVMSGYQAAVLAPTTILAAQHFATFSERMSSFPVRIEVLSRFQKGKEVKTTVEKLASGEVDIVIGTHRILSEDIKFKNLGLLIVDEEQRFGVKHKESLKQLRYKADALSMTATPIPRTLHMSLVGARDLSIINTPPRNRLPIETVVAEYHDELVKRAIENELDRGGQVYFVNNRIKNIPALQDKLELLAPKA

SEQ ID NO: 90595 - protein, 202 aa, Unknown
  Obtained from environmental sample
  misc_feature (1)..(202): Xaa is any amino acid
VFSDEIYDKIIYDDLEHTALASLADDLLFITFNGLSKAYRVAGFRVGWMVVSGRKDNAKDYCEGLTMLSSMRLCSNVPGQSIIQTALGGYQSIYDLTRPGGRLREQRDICYKMLSDIPGVSCTKPQAAFYSFPKVDVKKFNITDDEKMVYDLLRNERILMIHGGGFNWPEPDHFRVVYLPCPEDLTEAMNRITRFFSTYRQQ

SEQ ID NO: 90596 - protein, 258 aa, Unknown
  Obtained from environmental sample
  DOMAIN (10)...(258): Aldehyde dehydrogenase family
  misc_feature (1)..(258): Xaa is any amino acid
MKMIIDGKAVDATGGATIPVTNPATGKVIDTVPAASEADVKTAVEKAKQGQKVWAKVPLHEKGDILLKFVALVEENKEKLARTLSDETGKPISEARGEIANIPIAFKGFIEKAKHLYGEVIPNGQEKNQEHHVLLTVREPVGVVACVIPFNFPCDLFDQKVAPALLAGNAAIVKPSTDNPLTLCMLTELLVKAGVTNGAIQVLTGRGSQVGNWLCQNPDVHAITFTGSTEVGLETYKNAASHLAHVALELGGNDAFIV

SEQ ID NO: 90597 - protein, 379 aa, Unknown
  Obtained from environmental sample
  DOMAIN (54)...(281): Domain of unknown function (DUF1745)
  misc_feature (1)..(379): Xaa is any amino acid
IAANPKAAGKEAAEKAKNGLSDIKVAFAYSSVAYDQGELLKGVAEGLPRVPVLGNTSFTGIITPEGFISGDKGFVGLLTLGGKDLTVGVAGKAKNGDARATGRDVAKEAMKNAGKSGAPAYFYMAASPGEEEFYLKGISDVIGRVPYFGGSAADNSIAGEWKLFANNHVFVDGVVTAFFYTDKPVTNLFTGAYRETADAGIITKVKNNRTLVEIDGVPALKKYAQWAGVDPETLKGGNLLVHTITSPLGVKDRLGDLTAIRHPMNGNDDYSMAIGANLAEKTAVIRMEGSADELITSASHTLDALKNKMKAPPAAYHLVHCGGRRAGIGERIDEVVQGVKKAASGVPFIMEFTFGEYGYEEDGNNTTGGLMLSYTGFAQ

SEQ ID NO: 90598 - protein, 279 aa, Unknown
  Obtained from environmental sample
  DOMAIN (1)...(235): DNA topoisomerase
  misc_feature (1)..(279): Xaa is any amino acid
ERPYFNTAIEDVRNWLAKNFPNELPEKPVEYTVGKKAQDAHEAIRPTYTEYTPESIKEYLTKDQIRLYTIIWERFVSSQMNNAKSRTVSVDIKVKEGQDEGLFRVSGTKLIEKGFYRAIKLLSSKEENSGSCPTLKTDDKVKAEKFKKEQHFTQGPARYSDASIVRILEEKGIGRPSTYASIISVLLDRYYVTRSNKQLVPTVLGKLINEVLVEYFPHYIDVDFTASMETKLDEVEENKVSWPDMIREFWFPFKTSVDDVSKTIESYKGTLDEKTEFTC

SEQ ID NO: 90599 - protein, 207 aa, Unknown
  Obtained from environmental sample
  misc_feature (1)..(207): Xaa is any amino acid
LSFWESNRKILIEKYPGLLEEITSQEDTLAPEDIKIETALSGDTSLCVKGIYVHSQRDPEREGQRLVQSVASGKEPVVVLGFGLGYAACNAAELGQPLIIVEKYKNLLLKALELRDITGLLQKKNIVFVIGGSGDGIINALGIVYDLVYPEHTEKRSAPAVIKNKALTELDKTWYGAIEEKIRTWAMKDEVNAATLKRFGKRVGSQS

SEQ ID NO: 90600 - protein, 445 aa, Unknown
  Obtained from environmental sample
  DOMAIN (4)...(445): Protein of unknown function (DUF1703)
  misc_feature (1)..(445): Xaa is any amino acid
MTIMAANTERILPIGIQDFPKIRERGFVYVDKTARVYDLLTGSGKAFFLSRPRRFGKSLLCSTFGAIFEGRRELFGEIAGRPALAIDGLDWEWKAHPVIRIDLSAGNYGKGVETLHSTINAEMRSEAEKYGVTLDREDQPAGQFKYLIEKAHEKTGEKAVVIIDEYDSPLTGTLTKRDVHIELLEELRAFYSVIKSCDAHLRFIFLTGISKFSQVSIFSALNQLSDLTLDPRYADICGLTQEELEANFGPEIDGILESTGSSREMYMGKMRRFYNGYRFSENPLKIYNPFGLLNHFHEGGKFRPYWYRTGTPTLLTDLINDRRIDFTKLNNMQVGYEDFDSFDIENLALEPLLYQTGYLTITDYDENRESCFTLDYPNIEVRSAFAKSLATRCLKTHSPESTALSDKLTAALNGGDVDAALEAVKLFMTKIPYDLFKKGRTSSNR

SEQ ID NO: 90601 - protein, 116 aa, Unknown
  Obtained from environmental sample
  misc_feature (1)..(116): Xaa is any amino acid
MAKANKGEYSIHVSNAGKEDENGSACKKLNLALRWLVREGPVDLGLWKKIKPSSLYIPLDVHVARTARKMGLLERKSNDKKAVVMLTEKLREYCPDDPVKYDFALFGVGLSSSSTL

SEQ ID NO: 90602 - protein, 474 aa, Unknown
  Obtained from environmental sample
  DOMAIN (77)...(473): Na+-transporting methylmalonyl-CoA/oxaloacetate decarboxylase, beta subunit
  misc_feature (1)..(474): Xaa is any amino acid
MLNTKKDPVLIVKICIIILIGAFAFSFIGSFFAQRAQAQAAASNDLPSFRNLEGIIPNSNNLPKVDFKSFIVDLGKTTGIYAFIADSSDKITPAGVSFPVKGYYELIMVLVGFLVIYLGAAKGFEPLLLVPIGFGVVFANIPFANMGAQGVWNDTMKIWEHQGFLNVIYNAGIGNEFFPLIIFIGIGAMTDFGPLIANPKTALLGAAAQFGVFGTLFLISLSNFLPTVAFNLKEACGVAIIGGADGPTTIYIAAKLAPHLLATVAVAAYSYMALVPMIQPPIMKLLTTQKERLIKMKQLRPVSKTEKIAFPIIVFSLAILLIPAAAPLIGCLMFGNFIREIGVVERLSKTAQNELMNIVSMFLSLGVGSQMTPEKFLNSKSLIIVVMGLLAFAIATATGVLVAKFMNLFLKEKINPLIGSAGVSAVPMAARVSNKVGLEYDPGNFLLMHAMGPNVAGVIGTAIAAGVMIAVYAR

SEQ ID NO: 90603 - protein, 396 aa, Unknown
  Obtained from environmental sample
  DOMAIN (96)...(395): Na+-transporting methylmalonyl-CoA/oxaloacetate decarboxylase, beta subunit
  misc_feature (1)..(396): Xaa is any amino acid
MLNQKKDPILIVKVCLLILIGAFAFSFISSLFNARAMAQTKSSEELNAIIPNSSDLPRVNLKEFIIDLGKTTGIYAFITDVLEKTTPSNETFTVKGWYELIMVLVGFLVIYLGAARGFEPLLLVPIGFGIVFANIPFAGMGEQGVWNDSFKLWDHQGFLNVIYNAGIGNEFFPLIIFIGIGAMTDFGPLIANPKTALLGAAAQFGVFGTLFLISVANYLPTVAFNLKEACGVAIIGGADGPTTIYIAAKLAPHLLATVAVAAYSYMALVPMIQPPIMKLLTTKKERLIKMKQLRPVSKIEKIAFPIIVFSLAILLIPAAAPLIGCLMFGNFIREIGVVDRLSKTAQNELMNIVSMFLSLGVGSQMTPEKFLNSKSLIIVVMGLLAFSIATATGVLV

SEQ ID NO: 90604 - protein, 928 aa, Unknown
  Obtained from environmental sample
  DOMAIN (569)...(871): Alpha-2-macroglobulin family N-terminal region
  misc_feature (1)..(928): Xaa is any amino acid
LLAVAAVGIAVVMAYEPYGYIPADRGQAAGVSGGDAKILPTAYLREYDPITVFFDRDAVPGEVGPIDAPGQLLSITPAHPGEFVKIDGRTLEFRPAAPWEPLKRYKVASRKNTRELFTLLPDPEAVFCGQVGGGDDLPIGKAKGRSVAEEEYEESYESYDSDDDEDSYRSYRRYRSNENEGWKPKENLANTRYLGGAEPVKSVGFTFSTKVDLGSLSRLISVETCPLPGVDGKGCRTVRQSEYNVREDILGAKSVAYRVMFNEIIGYGQRVKVTLKFADKAEFKGAQETYIIETKPEFMVERAGVFGQMYTLNANGVVYDARQAVKVDGDRQFALEFSAEPSDPGISVMRSMVSVSPTPPRFLYAINGNKILINLGMEPEKLYKVVLNPSKITDRAGRVLTNKKPSSFYVYLPKVRPNAKWSRGFGIVERLGPQHFPITAAGVSSLDFRVHKIDPLHTAFGDFPSSQIEVSETSMPPGPGEEPSSMDSKYGKGERWDYPSYVEKHIRMLGSPHYSGVVDLGNLGGSKINSVDLKPMFAAVSGKDKPGTYLVGFRLLDGAQKRYYAKVTVTDLCLSAVESKSKGDKVMFAVTNYSSDKPVADATIRIDGLIDDEMTTLTQGKTGSDGFFSFEHTKATMERLNNSTVRRVVVSKGDDVLVINAERDRNGTVNIFSNNHWSKSDDGWLNWPGYNEVFTADKPEIRGFIRTERPIYRPEDSVFIKGYVRELLYGAINLPTGGEYTVKVSNPSSIYATRKVTLNASGAFHLKVAPPPDAPTGMYEVSLYRTAMGEGERQIIETDFAVEAYRIPRFEVRISGADRIPNDGPAAVRATASYYAGGRLVERDIAWKVTSYPYDHRPRGFANYILSSDTRYGASQESGRNSVLEENGKTDGNGSAAVTLNPQAATGGNPAKYVVEAKVTDADMQTVS

SEQ ID NO: 90605 - protein, 287 aa, Unknown
  Obtained from environmental sample
  misc_feature (1)..(287): Xaa is any amino acid
GLSVKNVPDKQIQLDAVKPMQLYADLAVETPPFTRRGTLQWDTVSVKMTVKRGSDNAGDAFEVKIPLLLDRQFVEETQFSKIDKMGNFSWQAVSAPARPNTLVGNLFISENQYLPKIISAVSNLVRFPYGCSEQVVSQSYPSVVYKGLWEKYGVESPDTSVTEGVNRAMTFLKKTQHSDGLFGYWPGTPGYVYLTAYVVNFLTELNAVNKTLEKPFIFDQNMYASAIEALKRSLRSDYSRFVSGYSSYERSCALVALARSGHTDIGYIRELAAAANDLDVMGKTNVF

SEQ ID NO: 90606 - protein, 292 aa, Unknown
  Obtained from environmental sample
  misc_feature (1)..(292): Xaa is any amino acid
MSSPFASLMGTLMTIGRMSSDNEVLIILSSGLSYKMVFIPAAIVGILISVVSFFTNDVLLPAGTIQFAKLYRRILVSTPALELEANSVKRFKDTTIVTGPVEGTTISNILILDRTNDGERRVILARDAELKDSGREGLSLDLTKAFIQSSKEIVRNDYDYAFTDSLRYWVPQSDLIQAISSISPNQMSTTDLRSAIAVKGLELAGRLDKQYAKCLTSAMDLEDSIRKGPSDSAWNRRENNLEAFGKEYQIVGVMKRDRSYALYRFEYYQKYAMPFGAFSFVFLAVSLGLFAK

SEQ ID NO: 90607 - protein, 385 aa, Unknown
  Obtained from environmental sample
  DOMAIN (44)...(187): ATPase family associated with various cellular activities (AAA)
  misc_feature (1)..(385): Xaa is any amino acid
DEAIKDEAITEDAPIEMSKDVAIKSEPVKIDAKTPVPSSVKGPILCFVGPPGTGKTSLGKSVARALGRNFVRISLGGVRDEAEIRGHRKTYVGALPGKIIQSMCKAGTTNPVFLLDEIDKLSSDFRGDPASALLEVLDPEQNSTFVDHYLEVQYDLSKVMFLTTANSLHSIPYPLLDRMEIIEVPGYGENEKLSIAKQFLVPKELRENGLSSAKITFRDDTIKNIIRFWTMESGVRNLERETARCIRRIARDAVNKGYGKDKAVSEFNKIITPANLEKLLGKKKYKRDVVYREARVGVTYGLAWTETGGTILPVETIRYSGSGELLITGNLGDVMKESARIALSYLRSTSNKYNFLAKDLLKSDFHIHVPEGAIPKDGPSAGVLS

SEQ ID NO: 90608 - protein, 276 aa, Unknown
  Obtained from environmental sample
  DOMAIN (7)...(88): Histidine kinase-, DNA gyrase B-, and HSP90-like ATPase
  misc_feature (1)..(276): Xaa is any amino acid
LSVGYSTDSDGVTLRFVVEDTGQGMMPQDKERLFSEYQRFNAEANRATEGTGLGLNITKKLVEMMDGTIDVKSEYGKGSVFTVTVRQKAVDCPAIGAGVAEQLHKFAFTGDRHAANMRINREPMPYGSVLVVDDVATNLYVAEGLLSMYQLKVETADSGFETIEKVKGGGVYDVIFMDHMMPRMDGIETMLKLRELGYKGTIVALTANALVGNDEMFKQKGFDGFISKPIDVVQLDDVLNKFIRDKHLNEEKKRVAATANVKQSKTANFAMNPKLL

SEQ ID NO: 90609 - protein, 333 aa, Unknown
  Obtained from environmental sample
  DOMAIN (3)...(217): NAD dependent epimerase/dehydratase family
  misc_feature (1)..(333): Xaa is any amino acid
MDILIIGGTGNISSEVTELLVSQGHNVALLNTGRHPTPQSCKHIVADRFDPKAFEDAVRDLSVNIVLDFMAFTPDQCRCAYKAFSGRIAQYLFISSATVYAKPHTKLPITEETPRGNPFWPYAQDKTACEEYLESVRGDGFPLTIVRPSHTFGRTWIPSPINGSGFTVSARILAGKGFIIHDKGESLWTLTASSDFARGLAGLVGNKAAIGETFHITSDEALSWNDIYKELGAALGAEKVNAIHIPTTFIVKRYPDARGKLLGDKAENAVFDNSKIKKFVPGFKCEKNFATAIRESVAWFMEKPERQEIDLDEDKLIEAMVGAWSRYCLRSNI

SEQ ID NO: 90610 - protein, 802 aa, Unknown
  Obtained from environmental sample
  misc_feature (1)..(802): Xaa is any amino acid
MTIDSFNGASNLIYKPTEKLQGEWLPVEYLQKTRPILILDESQNYRTPLAREALRTLNPLFAINYSATPVDKYNLVYRLSPGDAFRQNLVKRISVCGVTAQYNLNDETLTLSIEEIKKSPITADINVCCIRGGIKTRETLKNLKPGDDLGQKTKNPDFTGFIIDEINYAKQEIIFTNQSVLNKKDAAGLTLSEREVYRVEIKEAIKQHFQKQKYLLNKGIKVLTLFFIDRVPHYKGEHDAFIRCYFEAAFDELKTSDDYFKRFDVSHVHAGYFAPKKEQKTAAKTGGDEEFFDYVELDDYKGKDKKEIKEAEKEAFSLIMQDKETLLTLPDGKDPKKNVAFIFAHSALREGWDNPNVFNICLLKEPRYDTTNQKNTRRQELGRGLRLCVNQEGERVQDDSINTLTVICPEDFSQYANALQKEYRDSGDIPPPAPTDVSRKPAVRNDDIFNSVNFINFWKNLTRKTEYKINIDSEKLISDCAARLNNPGTVFPESRIVISKGDYFMSEYKITLFGTNMGAAKIRVTITDSTGRNDVLFGAYYKTGYNFGRARKDKNLMRFQIVEIHDDKKEPYVLFGNKQKLTLTDPVIFSGDPVINEYPRTVQEAQTNYPVFNIIERAGRALCLTRPTILSIFKAISADRKKKLLNNPEGFFSVFIGEIKDELAGHVAKKIEYTLSRDFKLFTTGYHAEPLADALYAAESAPSYGEEETPQMFDVDGNPVTLKDYFPKEKPFPQRELIPGSKHSLYDFIQKDSDVEERFVKNRLCEDDKEEKILCYFKFPANFKIHIPKIIGNYNPDWGIVC

SEQ ID NO: 90611 - protein, 332 aa, Unknown
  Obtained from environmental sample
  DOMAIN (4)...(198): DNA methylase
  misc_feature (1)..(332): Xaa is any amino acid
SYTLDEINQEFQTWIAMQNDISAGEAAYKYIDTNGDVYRPVSMAWPNNKKAPDEYFIPLIHPITNKPCPVPQKGWRNPPATMDELLKNNQILFGKDETTQPNRKYLLKENKEENIPSLLYYGGSDIDLLSDMQIPFDTPKVVNIVKEHIRSFTYSDSLILDFFSGSATTAHAVMQLNDEDNSNRKYIMVQLQEEVTEKDKEAYNFLTKENKPLNICEIGKERIRRAGKNIAESKKPAVNKQVLFTEKLIPPPPPPSKKLDIGFKIFPLAPSNFKKWENFPRTHIKEGENLFSPYENPLGDNWKEKKLLSQIFLVERFPPDRTGSLIKDFQKN

SEQ ID NO: 90612 - protein, 498 aa, Unknown
  Obtained from environmental sample
  DOMAIN (101)...(181): Cache domain
  misc_feature (1)..(498): Xaa is any amino acid
SSENNGKLAIWLASAGGEADYPRIKGEAGLLGNVKPAFVSNADDMETLTKSLYLGTESGFIISYDRFSDDKNRVFDPRNKQWYSGAADRCRADRDSCRTFWTDPYNDTSSAGKLLVTCSHPFKGADGAFKGVVGIDVFIEDLNKIVDVDSSRQSKAVVVSADGMVIAFSDMEKGAAGVFEAKSAYVEGNDGYNRVIKKMIGGENGFDRVNIDSNEVYMAYAPIPVTGWSVALMRPISDVMGPVVKNSDAIENMTRHSLRAVNTAIVSVLIVVVAGFALVVAAVVYLARMLSAKISRPIITLEAGLARIADGELDTHISLNTGDEIEQLGESVNVMALELKQYISNLQHVTAEKERISAELSVATKIQASMLPRVFPPFPNRKEFDIYASMQPAKEVGGDFYDFFLVDNNTLAVIVADVSGKGVPAALFMVIAKTLIKNNAQSGARPKEVFEKVNGILCDGNEAGMFVTAFMGYLDVNTGKFIYVNAGHTPPILIKGGK

SEQ ID NO: 90613 - protein, 270 aa, Unknown
  Obtained from environmental sample
  misc_feature (1)..(270): Xaa is any amino acid
MKSEKKIWLIEQFAHKTWTVSLSLAQEAARAGQHGKGYAVVAQEACMLADKLFEYTAEIKFEGADDAMLKGIVDFVVELKFLSVNAAIEIQRVADISMDFNIQKSMTILTEELRGIASGLNELIGKSVWQKPFTMPELASLSGSEVRDCFFIYSISSYPLIENMKNVIEVCNLRKVDIDGNVLFLREHKIPIINCFRHFNLPCKNFNPDRQTVIMISPEEKNYESGKGIYAVPIDDLDINAIFYSRIGNAVPPKKGHAFFDFARECWDVL

SEQ ID NO: 90614 - protein, 172 aa, Unknown
  Obtained from environmental sample
  misc_feature (1)..(172): Xaa is any amino acid
MATALIISNGKVIFDKTGIMERLKEKAYEIIKRPIESISNFEIEMIKYDTNYNYEQLRRAYEYDTNEFLFLYYTYLENIIYSFGKYKGITLPRRTKMYQYIFNDEYYVNKDLNKINDNIFLELLKRCMKNGDNAIMYKNITELKNYLMNLVGGFNKDGWKIRCEISGNSYEK

SEQ ID NO: 90615 - protein, 720 aa, Unknown
  Obtained from environmental sample
  DOMAIN (173)...(585): Alpha amylase, catalytic domain
  misc_feature (1)..(720): Xaa is any amino acid
MCLDNIVAENGKALPLGAELVGDGVNFAVFSRNATAISLILFESANPGSKWVEIPLDKRGNKTGNIWHCFIKGLSAGTCYLYRADGPYFPEKGLRFNRNKTLLDPYAKALTDISEWDYSKSTGYDLEKPGHDLTYSYVDNIDCQPRSIVIDDNFDWQGDTPLNYPLRFSIIYEAHVKGITAHPSSKVKHPGTYRGVIEKIPFFKDLGITSLEFLPVQEFNEKETSRINPETGERLTNFWGYSTASFFAPKGSYASDKTPGGQVNEFKEMVRELHKAGIEVILDIVFNHTAEGNEMGPTLSFRGLDNSIYYILNENRRYYQNYSGCGNTMNCNHPVVRTFIMDCLRYWVMEMHIDGFRFDLGSILGRDQQGRIMENPPMLERIAEDPILNSTKIIAEAWDAGGAYQVGWFPGGRWAEWNDKYRDNVRRYWRSDPMETRYFATRLSGSSDLYLRDGRKPFHSINFVTSHDGFTMSDIVSYNEKHNLDNGENNNDGGNYDNSYNNGVEGNTLDPIILSMRERQMKNYFATLLTSLGTPMLLGGDEIGRTQKGNNNAYCQDNEISWYDWTFLEKNKTLYRFAKEMIAFRKRHPGFMRPEFFTGRGGDYKGIPDISWFNEKGKSPVWEDIGYFLALRLYGSKAEIFGDRDENDFYLMFNASHDTQGFLLAEPPPKKEWLRVVDTGLHSPNDILLPGNEKALPSQHVYPVKARSLTILISKEINHG

SEQ ID NO: 90616 - protein, 179 aa, Unknown
  Obtained from environmental sample
  misc_feature (1)..(179): Xaa is any amino acid
VPGMYWHWLIGGIMRQGRRLLAQFGFFLLQNPFQKNFITGNIYQGNIKVLCSPGLNCYSCPAAAVSCPIGAIQFFLTGVRSGISLYVTGFLMIMGVVFGRFICGYVCPMGLLQDLLYRIKTPKLVMRLRFLKYIKYIVLAVFVVLLPVIASEFFGLGQPWFCKYICPSGTIFGAVPLLL

SEQ ID NO: 90617 - protein, 289 aa, Unknown
  Obtained from environmental sample
  misc_feature (1)..(289): Xaa is any amino acid
MKQVTGRSFIPTYVMTFTVFAVITPYLAIMVRGLGYSPILVGILLGIFEGSAIAGPFLFGYWADKIGNFRIPIIVSCILPAVTAIPLVRFINPIFSALLLAGMAFGFRSTASLLDSITTVRIGKSGDYGKIRACGSIGFIVFLLFLQCAPFLKPDSSKNIAFWIVITSFAAVIYLLVLPRSMFDSIEHEHDKINGGGKGIPLLSFYFIGGFAIIFLCRFAMSSVYTYFPLYLTESLNWNAVGIMFALSAASEVPIMFISIKLLRRFGALSLLAVSAGGIALRLLLWAVF

SEQ ID NO: 90618 - protein, 407 aa, Unknown
  Obtained from environmental sample
  misc_feature (1)..(407): Xaa is any amino acid
MGRGIFNSLLSNLQAAADHLTDKRREGFDLKYTLTDALKCALSVFFFQHPSMLDFQLRMKQKWKRCNLETMMRVQEIPSNVQITTLLDGITPDSLSGVFNENLHTVDEWGNLKDFRCLDGGVLLALDGVWYFSSEQIHCDHCLHTTKEGVTTYYHSALAGALVKPGNTAVLPVVPEMITNTDGTCNETNSKKQDCERNAAKRWLIKHADEYKWLSPTILGDDLYSNYPFCKQVLEYGYSFIFTCKEDSHPWLTETVKNSFLEEASKREWNGRHHLVYTYRWLNGVEIRDNKETLMVNYLSLAIWNQEKNKQTFYNSWITNKNITSDNVSLVAACARSRWKIENEHNNVLKNHGYNLEHNFGHGRTHASEMYCLLNLLAFQMHSLLDINDEDYQKARAYARRRDEFFN

SEQ ID NO: 90619 - protein, 438 aa, Unknown
  Obtained from environmental sample
  DOMAIN (38)...(242): ABC transporter
  misc_feature (1)..(438): Xaa is any amino acid
MAENKAPEKFIFYMHKVCKSYPPDKEVLKDISLSFYYGAKIGIIGTNGSGKSTLLRIMAGIDKEFQGEAWIENGRTAGYLPQEPQLNAELSVKENVMVAVAAKQKILDRYNEVAMLMGDADGSKLEKLSEEMERLQNKIDAENLWDLDRSIEIAMDALRCPPGDWQVTNLSGGEKRRVALCRLLLEEPDLLLLDEPTNHLDAESVAWLERHLKEYKGSVILVTHDRYFLDNVTGWILELDHGRGIPWQGNYAQWLDQKLERMRKDEKGESDRQKRLAREQEWVKASPKARQAKSKARLKAYEELLSQDKKEQYKVAQIAIANGKRLGDVVIEANGISKSFGDKLLYENLNFCLPRSGIVGIIGPNGAGKTTLFKMILGQEKPDAGTFKLGETVEIISMEQGRDSLNDNNTVFQEISGGKEEIIIGERKLNARAYCGLS

SEQ ID NO: 90620 - protein, 607 aa, Unknown
  Obtained from environmental sample
  DOMAIN (190)...(259): HAMP domain
  misc_feature (1)..(607): Xaa is any amino acid
MNNIKMGPKLIASFLFLAALAAFMGIRSISSLKSVAAAAGQMYDTGAVPLGIFVGSAVKVQDLRVGARNWQIARSNDERVNIIKGMKASNAALEQELIAQEKLTDEEGKRLLRQVSKVTDIFIDTLEAFAKRAKNFSPEGIGLDPLPDGLTKVGSQALADLDAVKEYMTKQTRGLADVAASSASSSESQATVILVVVILIAIVLGIYLTMSITAPLSRTVGTLGKIEKGDMTVRVNLERGDEFGQLSKSVDNVASKLQSIMKDLHVESDSLATSAEELSVISKQLVTNSEETAGKSKTVLGVTEDASKGVTSIASTAEEASAQITDVASAVEQMTVNINTMASTAEEASANINDVANAVEQVALNINAMASAAEEASVNANEVAGAAEQMSANMNTVAAAVEEMSASIKEISHTAGDASKVAGEATIKSKDATEAMNKLGIAAKEIGQVTDVIKKIADKTNLLALNATIEAASAGEAGKGFAVVANEIKELANQSAQSADDIARRIEGIQSGTSEAVTVINDVSQIIVKINQAAESISNHVAQQTKASNEIASNVAQANTGAKRVAGAIGEVAKGSKDIAQNAGQASSNAKHVSESIGEVAKGSKDM

SEQ ID NO: 90621 - protein, 238 aa, Unknown
  Obtained from environmental sample
  DOMAIN (1)...(233): Glycine cleavage system P-protein
  misc_feature (1)..(238): Xaa is any amino acid
DFFGIIDDHSDIVDKCKNAGAVTIQSVNPISLALIKPPGEQGFDIAVGEGQSMGIPLSFGGPYLGFIGAKKNLARKMPGRIVARTTDTSGRDGFVLSLQAREQHIRREKATSNICSNEALCALRAHAYLSLIGKRGLVDVATLCHNNAIRLRERIKESIPSIKTYGDAPIFNEFVIDLPINADECVEAMLTKGFAAGIPIGRYYDYDGADKALLVAATEKRTRGEIDAFVDGLREAVG

SEQ ID NO: 90622 - protein, 197 aa, Unknown
  Obtained from environmental sample
  DOMAIN (1)...(196): Ribosomal RNA adenine dimethylase
  misc_feature (1)..(197): Xaa is any amino acid
ALKNKLGSGDYRIHNEDVMDFDFSMVGFPLHVVGNLPYNIGALIIKKALLEAPRVASCTFMVQREVAARIVSGPRSKQNGFLSIFCQFFGEAKLLFHVPPGAFFPRPNVDSSVFQIIIDKDIEKKLRREQWKDFFAFADSGFSMRRKQLAKVLSVRYGRDKSYYRGVLSEMGIDAAARPEDLGVGEWLDLYGRAGAR

SEQ ID NO: 90623 - protein, 516 aa, Unknown
  Obtained from environmental sample
  misc_feature (1)..(516): Xaa is any amino acid
LDTGLFETLTKDDLLFSQEEVEWLGTEKKRELTAEQINDLLETTGGWAMYLSALLSGEQTYKTPQTLVQYLERQVWNIWDDETKKLLVRLAVPVEITPDLCERLTAEADGKSILDRLVKKEGVFLTHIGNGVYRFHDIFRDFLLERTALLETQEIRRLNNVTAEWYYERGDYHSGAQYYIRNNDHEGIIRCLAAASQYHENLGVMSVEAYINFTIRYVKDLPAEFISANPYLIYKLITTAYHNGDMNEYMRYSDMLYEKQAEIAAKYPALLQTFGFVKGVDPRVTFPEYTKGLIQMIPQMAKTTVSVKAHIGTITQNLPFFHRSMRDFSEYHELKTEDLELLKTTIGVMIGKDYEVMDQALIAGLYYERGQLMDAARHALIGKKTCEEVMHPETRFSVNMILAAVLYAMGDFRDAGNVMAQTEVFIGEKARFLYPNFKALQTERVIRLGDIAAAKEWLAVYANSAQRLPFYQICRHFTSLRSYIALEDYKAAVDFGKRIQQLATDYRRPLDLMKAL

SEQ ID NO: 90624 - protein, 86 aa, Unknown
  Obtained from environmental sample
  DOMAIN (1)...(62): Global regulator protein family
  misc_feature (1)..(86): Xaa is any amino acid
MLILSRRINEKIMIGDDVSISIIEIRGDQVRVGVDAPKTVKVFRQEVFDSIKAENRAAAESKPVLPNIDFGAPRQEKAINKLTNNR

SEQ ID NO: 90625 - protein, 200 aa, Unknown
  Obtained from environmental sample
  misc_feature (1)..(200): Xaa is any amino acid
MFKEFLFPLYRHFTPFNVFSYLTFRGAYAALTTLLICFLFGGKIIEALTRLKIGQSIRSDGPATHLVKSGTPTMGGIFIIGSVIISMLLWGDFVNKMVWLAIISFTAFGIIGFMDDYLKVSRHNSAGLPAWGKLAGQFVVALGVVLYLYFSADPASRGDVTSLYIPFFKNPVVNLEIAVDSFWRTAYNGRIKRGQFFRRA

SEQ ID NO: 90626 - protein, 186 aa, Unknown
  Obtained from environmental sample
  DOMAIN (66)...(184): Glycosyl transferase WecB/TagA/CpsF family
  misc_feature (1)..(186): Xaa is any amino acid
VGDEINRDIETYRERISFLKVPIDIVKPEHLDRLTYNMLAEGIDQKIVLLSVWDLLRARRNSEYRDYVNKAALVIPISKSIIRGIQFLQGKQAVRYMPFNFVIKLLTILEKYEYSNYLLGGKKRVLIKIEKNLRETFPGLRIVGRYPGGFRSQEEPDIIEAIRKASPSLLLVGKGVRGGEYGYPEI

SEQ ID NO: 90627 - protein, 162 aa, Unknown
  Obtained from environmental sample
  misc_feature (1)..(162): Xaa is any amino acid
IIYEIRGQKVMLDRDLAVLYEVELKVMNQAVKRNIGRFPSDFMFQLTDTEWTNLRSQIVTFSNDTRKYKPYAFTEHGILMLSSVLNSEKAIKINIQVMRIFVQMRHYALSHNATNEQIAELRKLLMLYIEKNDKRVNEIILVLNNLIEKPPETKRIGFNTEN

SEQ ID NO: 90628 - protein, 310 aa, Unknown
  Obtained from environmental sample
  DOMAIN (35)...(245): Binding-protein-dependent transport system inner membrane component
  misc_feature (1)..(310): Xaa is any amino acid
AQRHLIVSVSASRPVFLMGTDSLGRDLFSRIIHGSRISLTIGFVATFLSLALAILFGGLSGYYGGLTDWSIMRFSEFLMLIPSLYLILFLRSLMASTMDTGQAYMMITVILSLVGWPGSARTIRGMVHAIKREEFVLNAQLEMIPSVLIILNHIIPQIASLLIVSIALSIPGFIMTETVLSYLGLGITDPAVSWGSLIKRDISTLANLQAFPWLLSPVWFLLGVTLAFNFFGDALRDYFDPYHTVFAKGKRVGSRRKGVGSGESGVGNSCSKSTRDSTAQCLQTITPSPQSLIPTPDSRLPAPHSPLPSP

SEQ ID NO: 90629 - protein, 197 aa, Unknown
  Obtained from environmental sample
  misc_feature (1)..(197): Xaa is any amino acid
MILRTFLGKARHKLLRLLLGKELFNRFLTSSLSMDSIITQLIEINSNINIKIINTINWQSEKLFNALVRTTPKASLTSIVVSVVEHCNLNCWGCDHCAPLAEEYFLSIDEFEKDMCRLAELTGGEVGTIKLMGGEPLLHPNIQEFTKISRLFFRENRIEITTNGILLLKQPDSFWKSCRENNITIVATKYPLSIDWD

SEQ ID NO: 90630 - protein, 132 aa, Unknown
  Obtained from environmental sample
  misc_feature (1)..(132): Xaa is any amino acid
MVYNYYAIGLCPYENFELESFNLFEAGVSTLEELESEGASCASFKFYTDSKEERDRIVAEFAHLNFECGEEEAKDWDLWWRERQTPVNVSKSLWVKPPWVNFSAPDADCVVLALEAKTAFGTGEHSSTALAA

SEQ ID NO: 90631 - protein, 348 aa, Unknown
  Obtained from environmental sample
  DOMAIN (22)...(348): Amidase
  misc_feature (1)..(348): Xaa is any amino acid
MFEKSALELVALIKAKKLGVVELTGAYIDAIKKNDSRYNAFITLAKEKALTCAKEIQSRIESGEALSPLAGVPIAVKDNISTEGIETTCASKMLKGYTPVFNATVIEKLEKAGMVVIGKLNMDEYAMGGSSETGVKGPVHNPWDVTRVAGGSSGGSAAAVIAGSTPIALGSDTGGSIRQPCAFCGVTGIKPTYGSVSRYGLLAYASSLDQIGTIGQNIDDCAALLSIISGPDARDSTCVIEKPFEFGEGSNRAKLEGVKIGLPRNYYGSGIDDEVKNAVLAVAKELEAAGAIIEEFEMPLMDYMIPTYYIIACAEASSNLSRYDGLKYGYRSPNAQSLSEVYRLSRNE

SEQ ID NO: 90632 - protein, 95 aa, Unknown
  Obtained from environmental sample
  DOMAIN (19)...(90): Glu-tRNAGln amidotransferase C subunit
  misc_feature (1)..(95): Xaa is any amino acid
MQIDDKLLSYLEDLSCLTFSADEKTKLAKDLQEILDYMARLGELDTNGVVERSHPFDNVNDFREDEVHPSFDRALILQNAPVKNDETIIAPKTVE

SEQ ID NO: 90633 - protein, 282 aa, Unknown
  Obtained from environmental sample
  DOMAIN (179)...(258): Bacterial Ig-like domain (group 2)
  misc_feature (1)..(282): Xaa is any amino acid
VANTVTESSQEAVSVANEHTVEKTTEFKFHEEASAGWKGFGFSAEVKVSADQKILNFTSDTSRTGFQKTTSLTNSVDYATSKTDSLKRERSYTLTRADKQGYYRYTCFSASDVYLWVVRDSKTKNICYYEFREYILPNAFFWDLDYCETVDFNKTDETRFMVDITMLDRLPDPAVDLDYVTGVSMNKPSTAILVGSTERLYPEIAPDYATIKDVTWKSLNPDIATVSDTGVVTGVNKGTATITVTARDTRGESAPYSASCEVTVSDVVVHVTKVTFYKLSIN

SEQ ID NO: 90634 - protein, 390 aa, Unknown
  Obtained from environmental sample
  DOMAIN (59)...(237): Integrase core domain
  misc_feature (1)..(390): Xaa is any amino acid
MPDLEFIHQELAKNGVTLTLLWKEYFENCRMENSRPLMYSAFCYQYQQFAAKHKATLHVEHKPGERMEVDWAGDTAVILNNISGKPIPVYVFVAVLPCSGYAYTEGFLNRSMESWITAHVRAYEFFGGATRLLIPDNLKTGVDKADWYSPVINKTYHEMAEYYGTAVIPTGVRKPKQKASVERAVGMLSTWITAALRNQQFFSLWELNEAMRQKLTEFNRKPRTKVLYQKKPGNRESARTFGSIAEELPFLMPLPSKPFELSAWKIATVPLNYHIAADKMNYSVPYEYITHKVDVRLTTYMVEIFYQGKRIASHTRLYGHSGHYSTNVEHMPEKHRQYTQWNAARFIRWACDIGPHTEQAVKAIIASRKVEQQSYIEPEVRNLHSAPQTG

SEQ ID NO: 90635 - protein, 197 aa, Unknown
  Obtained from environmental sample
  misc_feature (1)..(197): Xaa is any amino acid
MAAKNKYVMRSEISEAKFRQFARLFCVDLNATQIALVTGLNRNTVNRLLHGLRERIAAACGGGQPVKGEVEVDESYFGARRVRGKRGRGASGKTIVFGIFKREGGVYTEIVPDCSKATLQGVIRGRINPDTVIHSDGWPGTTGWWTWATRSTTGSATAGTSSPGGAATSTAWRASGATPRPGWHASGACTNTLSCYT

SEQ ID NO: 90636 - protein, 156 aa, Unknown
  Obtained from environmental sample
  misc_feature (1)..(156): Xaa is any amino acid
MNGSLSVCPNMRKKTNRVQSTMIKTTKIKPATKGKKRRADVLSTYELMEGFRDEKAAIKYLTPILWPNGTVCPHCKGRRIPTRLRRNYYSCNDCQKDFTIRVGTIFHRSHVPLHKWLYAMYLMVTARKGVSSLQLSKEVGVTQKSAWFLMQRIRAA

SEQ ID NO: 90637 - protein, 198 aa, Unknown
  Obtained from environmental sample
  misc_feature (1)..(198): Xaa is any amino acid
METTQTVRHPKNATSPSFETVWAILQEVGKNQEELAESQKETARQMKETDRRLDKQLGKLGNRMGEVIEYMVAPNLREKFRELGLNFPQVHQNSKVADYDNNIFLEIDVKLENGDKVMLVEVKTNLTTQDVKDHVKRLDKMRVYADLHGDKRAFLGSVAGVVMTKNAKEYALKQGFFVIEPSGETFNIISPGNKPKEW

SEQ ID NO: 90638 - protein, 256 aa, Unknown
  Obtained from environmental sample
  misc_feature (1)..(256): Xaa is any amino acid
SKGGTTRSIKDYIFSPYGLVAIHTSENYTTSRIPPLSTLPIQHLNAVATDHLGSIVAEYNTCSNDYEFFGYDAWGRRYRYKYYASPKIPIYFYFDETPPTYFDIDELLTYFTRGYTGHEHLDMFGLINMNGRMYDPALGRMLSPDPYVQAPTFTQSYNRYSYVWNNPLKYTDRSGFNTSSSTTDYLLPTIEQMMRASAISDKLANSFERSMAGSSWRDNLIGTVIFQEDFWSNTGMNFAWFYGTGGGGWTGGGGGE

SEQ ID NO: 90639 - protein, 201 aa, Unknown
  Obtained from environmental sample
  misc_feature (1)..(201): Xaa is any amino acid
MSRIVVKNATTGAELIWRHIAIKKSLDDICHTLELEIAPSERGKVSRHDKIEVRYANPAIKDSQAAGGRRVTTVLVDEVAASADIQKHSIAVTGRSPARDIIDSAWSEDFDDMTVLDLAKTIGGRFGIQCHALPPSIAGKMQPIYAFRIENESPWVKLANAADNEGYMLTSNEAGDLYLWEVSAAVRDEGFKLAEGANIKS

SEQ ID NO: 90640 - protein, 323 aa, Unknown
  Obtained from environmental sample
  DOMAIN (3)...(305): Aminotransferase class IV
  misc_feature (1)..(323): Xaa is any amino acid
MSENDLAKLQDSRNCYADMPLVNYTSQYGLACLEGLKALPQKDGGLSLFRPDRNAARFYRSMEGLCMPPFPEKIFLEACIETVKRNAKLGFYPKYNKDWEKDSFISADSVYVRPFTMAEGGIGVNLSSKPWVCVINTPVSAYFSSGNSDAVISDRIRATPNGTGWIKACSNYVISALAKAEAHKAGFMECVFLDATHRKYMEEGSSCNIFFYLKSGELVTPELGDTILPGITRASIIELARDKGIKVSERQISIDEVFAETKECFVSGTAAGATPITSLTYKGKKAVFNGGKVGEFTADIRDTIKGIQYGTLPDTKGWMTRVI

SEQ ID NO: 90641 - protein, 317 aa, Unknown
  Obtained from environmental sample
  DOMAIN (95)...(313): Binding-protein-dependent transport system inner membrane component
  misc_feature (1)..(317): Xaa is any amino acid
MAFVAKRLVITLITLFLVSVITFAAFRFIPGDAALVSLGIEAGEAQIEALRAEMGLDKSFAEQYFSWLGKFLTGNLGNSSRFRGVSISGVLSERLPVTFALAGLSFLFIILIAIPASLIGVKKESSILNNIITGLTALNISFPGFFLGVLFIFVFGIFFKLFVPGEFISYHQNPVIFLRCLVFPGLAIALPNAALLVKFLRPSIYSELRSDYARTAKSKGADSVRILRSHALKNASLPAITLLGMITGEILSGSVVIEQVFGIPGIGKLLIASITARDYLTIETIVIYIAFVVILANTLSDIILQIIDPRIRLTQRV

SEQ ID NO: 90642 - protein, 370 aa, Unknown
  Obtained from environmental sample
  misc_feature (1)..(370): Xaa is any amino acid
GLWNWRLTYNGAAQRAILASGRFTITEADELELLSPAKNRQFFAESGTPKLYFQWSQIDDVSHYIAEVDITPEFRNPVIKKQITDTSFSDSSLGEGIWYWRVTPVFSQTNEGDSNTYGVTYSRTSSFRIVKNEEPQTPAPVRSSQSKSVTLESPSNNAILPGLTALRQQTVFRWSSDEAVAKSRFVLSRNSNPLSGQAVIEIPDPNRTLRIDRLEEGVWYWTVEAQTPEGVNITAQTPRRLRVPPIPFLPSPSGRQPANGYSVGIEELKRTNINFSWSQVQGANGYILTIYQETGGERRQVMQMGPENRTSWSTAIKTLGRGNFIWRIEAVNVGRNNVIEQHGSPAENRFVIDIPRAGPVKIIGEPEIKP

SEQ ID NO: 90643 - protein, 511 aa, Unknown
  Obtained from environmental sample
  DOMAIN (402)...(479): Bacterial Ig-like domain (group 2)
  misc_feature (1)..(511): Xaa is any amino acid
MRRKSTFKSAAAVIFAALFFAMAGCNLDPFFIRVALIEGVPETGTAGTPLTLTGTVRPVFANNKDIIWSVADAGTTGASISGDILNATAVGIVIVKAVIQNGIAEGKEYTQDFVIVFIDGGEVITPIANVALNITGPAKNSAPDTAAVPADPSAHYTAGPVSWSPDDNPFLGLTVYTATVTLTADEGYTFTGLAGATVNGESASVSGNTGTAVTISHTFAATLDKEITGIKIKTQPIELTYAEGERLDLAGLAVTLSFDSGPPEDAAYDNFNAYNISANPAHGDTLTLAHNGQPVTVSAGGYSAYTAPLTVSAKIVPVTGITLNTNSLILAPGDSATLIATVAPANASNKTVTWSTGDESVVSVKNGTLTAHAAGNALITVTTDDGGITATCEVTVQEIAVSVTGVTLDKSDLTLIPGETVTLTATIAPANATIQTVSWSSGNTNAVTVDNGTLNAHAAGNAVITVTTMDGGKWAQCAVTVTEPEAKIGSTEYATLAEALTKAANGSESVP

SEQ ID NO: 90644 - protein, 119 aa, Unknown
  Obtained from environmental sample
  misc_feature (1)..(119): Xaa is any amino acid
MRFDDNAGTGEASRLAGLLTTGKTVAYCSDAGMPGINDPGFELARLARELGADVCPLPGPSVVTLAVVASGLPTHAFSFIGYLPSRMEARRAFIRRLAGREETTVVFETPHRIGEALKD

SEQ ID NO: 90645 - protein, 263 aa, Unknown
  Obtained from environmental sample
  DOMAIN (10)...(240): Amino acid kinase family
  misc_feature (1)..(263): Xaa is any amino acid
MISNLIADARKIIIKIGSNTLAGSNGKINSQFLTEFAEQTAALMKKGKQIVVVSSGAQVAGLSTMDKWARKKDIHYRQALCAVGQVELMGAWSRAFEQNGLHIGQILLTREDFNDSLRTLNMRNTIFTLADEGIIPIINENDTVSVEEIKIGDNDTLAAQSAILWSADLLILFSDIDGVYDKNPKEHDDAYLVEEVRDIEELQKNISIGTTNDFGTGGIATKLDAAKLALGYGIPAILANGGKPRSLETLAAGGQKGTVFLAS

SEQ ID NO: 90646 - protein, 169 aa, Unknown
  Obtained from environmental sample
  misc_feature (1)..(169): Xaa is any amino acid
VLGVKDTHIKGFILSGGEDNDAPAGRLLLETVGKQESTVPVLMDRAYADFKTRFTAWGLCFKAVVPPKSNATHQWDYDKELYKKRNEIERFFRWLKAFRAVFTRYDKLDTIFASFVLFVAIIVLLRCVNTPKVLPLLLDNVTFIGAYNVKHYSSTPCRALPLLPPLLPL

SEQ ID NO: 90647 - protein, 134 aa, Unknown
  Obtained from environmental sample
  misc_feature (1)..(134): Xaa is any amino acid
MNNMKGNKLPVLLVIVLMSACNIFLGHDPGNSPEEIFESIWNDFNETYALFDVRGIDWDQEYKTYSPRIQANTSAYRLFLICADMLNRLNDTHVKLTTPFGRSDVLGGPVNRDPLNLKFIQDKLINGGVFAGDD

SEQ ID NO: 90648 - protein, 271 aa, Unknown
  Obtained from environmental sample
  misc_feature (1)..(271): Xaa is any amino acid
MDSYFDWEDLLSLLHFKGRYVELDISRVTGMGEFDPGKLPEGKHLIVSLVLPAASTGIVEGTQENPPFRYFKNLKEISGANIETLGSYSLFDLSKLTKAEFLALTAINNHAFAFCSGLTGITIPDSVTAIGDSAFYRCTGLTSITIPDSVTAIGDSAFYDCTGLTSITIGNSVTAIGDSAFYDCTGLTSITIPDSVTAIGDYAFYRCTSLTSITIGNSVTAIGDYAFYDCTGLTSITIPDSVTAIGDSAFYDCYNLTDITIGNSVTAIGNS

SEQ ID NO: 90649 - protein, 213 aa, Unknown
  Obtained from environmental sample
  DOMAIN (112)...(194): Uncharacterized BCR, YitT family COG1284
  misc_feature (1)..(213): Xaa is any amino acid
MEYLIKAILCISGVFIIGIGVSFMRYADFGIDPYMCFMNGLHLAVFSKFGLTFGTTFAISSSLMIIIVLIFDRSKIGLGTVAAIVLTGYVSDLGLFLCKLIMIEGMALYILRIGMIVFGILFISIGSGMYFNTHVGVSPYDGIGLIITRKLGHQNMYRWVRIATDLLCVGMGFLMGNLPGVGTVIMAFFTGPLFSFFRNRILVWGKKLKIITW

SEQ ID NO: 90650 - protein, 452 aa, Unknown
  Obtained from environmental sample
  DOMAIN (12)...(446): Protein of unknown function (DUF1015)
  misc_feature (1)..(452): Xaa is any amino acid
MADIQNRLEKVGIAIPEILLPRAELKQWAVIACDQFTQDRAYWRKAAEITAGSPSSLNLIFPEVFLDDENRAGRIKNIHRTMRNYLDSGIFSTPRRGFVYLERDTPFNRGRKGLVAAVDLEQYSWSPSARPLIRSTEGTVAERLPPRMEIRGNAPIETPHILVLIDDETNSLLPEMGLRAKKAAPVYQGELMLDSGCISGWFLDSEDDIAFLANGLGGLARRALTRYGTEQAASAAQPASVTQPFLFAVGDGNHSLASAKEIWEEYKKANGVNNHPCRYALVEIENIYDPAIKFEPIHRVVFGLGFEESLNVLSALPGFSSRTIGGAEELVRMTREPVKGNRFGLISQNRYALVETSVGGLSTACLQPLLDNAVGASKGALGIDYIHGEDELFRLSHNSDKQATGILLPPVQKAGFFETVARNGPLPRKSFSMGEASEKRFYIECRKLFTNL

SEQ ID NO: 90651 - protein, 294 aa, Unknown
  Obtained from environmental sample
  misc_feature (1)..(294): Xaa is any amino acid
MEPKKLVEKELAEIAKFQLADGSFPYWPGGRYGSLFVSIRVAHIATLAKAKNMKVPESLDTRKLLTYIGTESNDADFKDPFLKGYSLWVRTMYSEKISSEITAFLKRGDELGISGWAFAGLAALEMGQKDLAVSAGDRVRRFIRQNNRSLDLADTYERQGNYWGYDSDRYALALMLFCSLNSQGDDMTTRLATSLIERQRRGVWNNTASSFWAALAFGMLGDSESSEWKGANGAPLTVKTSLAGAPLFNAEFKTYGGVPVSYNGHFTEKPIIDLARDTVLPLRIERSGPGRLYY

SEQ ID NO: 90652 - protein, 433 aa, Unknown
  Obtained from environmental sample
  misc_feature (1)..(433): Xaa is any amino acid
LLIEAGGRQVSYRAIPESQGLTTQDFILPQAETAEAYNEAIKWWRDQNYSLWNRSVSTQDNEDLAIALIGEAFVRGNYASAVSAIPQAFLRGNTITYESSAYLGNLDQALRSLSVSEREKLSRLTRQINEQSLDFLLEPKVFEYFAIRGNTNLFNSALDLVRTINPSTDPSVPALDIMPGIFESYSFYGTYRPGSENPFEDLVEHCCQTISDLLRKTSDGGWVFVYNEEGDNPEFNLRLGKAILVYAETAQNNLWAGIGRSLILSAISTAEKNDESLSTELTSAKLYRILCPLDTYPRALEIDSSSGGIWAWTAAQAVSGSQQGDILDISVTFPVGETHYMIIRGIRTFSRVQLYGMDYRSDTQFERYDSSGWSYISQEQTLIVKMRHRNSEERIRIIYREAPRPVVAPPVVEETPVTESNSVPAVTGETNDY

SEQ ID NO: 90653 - protein, 69 aa, Unknown
  Obtained from environmental sample
  DOMAIN (7)...(69): ATP synthase alpha/beta family, beta-barrel domain
  misc_feature (1)..(69): Xaa is any amino acid
MAKLGSIIQVVGPVVDVSFSASAAEPIPGILNALEVNAGKRKVVLEVLQHIGDNRVRCVAMEATEGLCR

SEQ ID NO: 90654 - protein, 342 aa, Unknown
  Obtained from environmental sample
  misc_feature (1)..(342): Xaa is any amino acid
MNKREWLARWLANETLEKTPLGFWFHFAQDELADVFREDGSVDRKIIENNIEGHKKFFNDFQPDMLKLMTDGFFIYPNREFREAFAPQDLWKVKPIGENHPWIEEQVSYAKTLAELFGKDIMLFYNIFSPATTFKFVRLGSKEFLSRNIDPETLLANLLIKDRDAVLHAMNAAARDLAALASRVVQAGVDGIYLSSQNVSDARIGGDIHRYTLFPGDCQILNAAESARDNVYNILHICGYGGHTNTFENFIDYPADIFNWAAVFEKLPLEKGKKFFKDKPVIGGFDNTVEGILYKGSREEIQAETKRVLAEAGRKGIILGADCTLPRDIDLQHLKWVREAAS

SEQ ID NO: 90655 - protein, 124 aa, Unknown
  Obtained from environmental sample
  misc_feature (1)..(124): Xaa is any amino acid
MNKREWLARWLADETLEKTPLGFWFHFAQDELADAFREDGSVDRKIIENNIEGHKKFFNEFQPDMMKIMTDGFFIYPNREFREAMTPQDLWKVKPIGENHPWIEEQVSYAKTLAGLFGKDILLF

SEQ ID NO: 90656 - protein, 56 aa, Unknown
  Obtained from environmental sample
  misc_feature (1)..(56): Xaa is any amino acid
MQKWQLQEAKAKLSKLVKQTTLAPQSITLRGEPVAVVVSIAKYKQLTKPKKSLFDM

SEQ ID NO: 90657 - protein, 279 aa, Unknown
  Obtained from environmental sample
  misc_feature (1)..(279): Xaa is any amino acid
MSAKSLALFAHSKTQSPTLFPQSKLSPMPLPQKNKVRMQFFQGGVNPAIPLDYYIDIINTLSKKLKFKIRGFSPVELFHIAKNNKMPLPELLQKLKKAGLSSVPGAGAEIMTSRMRKILAPNKLSEKDWMSVMEECHKAGLPGSANIVIGSSETPEEIIEHLNYVREVQNKTGGFQSFIPWVFQPQTKNFPIRHVRSEEYIKLVALCRLFFHNIPNIEVSVLGMGKVLGELALYAGANDISSVVLEERVMRSQGVGSIEEAEEFINNAGFKPVRRGVNY

SEQ ID NO: 90658 - protein, 466 aa, Unknown
  Obtained from environmental sample
  DOMAIN (40)...(276): Glycosyl hydrolase family 3 N terminal domain
  misc_feature (1)..(466): Xaa is any amino acid
VLTWLLVPVSNPALPLSKRIQDLISRLTIEEKAGFIPSRNQAVERLDIAAWSIGAEGAHGFVDREGQNTTFPQTIGLAASWDREILRKVGEISAVEARVFCKTHERKGGLAIWSPTIDLERDPRWGRTEEGYGEDPFLTSELSSSYIRGAQGNDPFYLRVSCGPKHFFANNNEKNRDSCSCSITPRCLHEYYLVPFKAAIQKAKAVSLMTSYNEVNGIPMMLHPMLDEIVKNQWGIEGHIVTDGGDFLQTVSAHHYFDTHFETLAAALKNGADTMTDNPSEIIKAVMEALKRNIIDEDELNKHLERIFAIRFRLGLFDPPGLCPYEAIGEEYFMKDEYRVVSCEAARKSVVLLKNDGSFLPLRPGAVEGTIAVMGPLASELHLDWYAGHPSYMIAPLDGLRELYGKDKVAYTDCRDIVSFTTEDGRPLVLDEKTFSVGKPGGGSRALLYGRLGLGHADLCRHAKRS

SEQ ID NO: 90659 - protein, 147 aa, Unknown
  Obtained from environmental sample
  misc_feature (1)..(147): Xaa is any amino acid
MSINAVTPVKEFADILTPEYKALSANGPYGKKTSVDDLGTFKEITEPHPHCAGCGVALGIRLGLASLPSPEDTIVIGTPGCAYFALSQSNLNYSCTAFGNQNSVASGLKRMLTLRHPGKNKDVMVMVGDGGVADIGLDYTLHSWFRG

SEQ ID NO: 90660 - protein, 65 aa, Unknown
  Obtained from environmental sample
  DOMAIN (3)...(27): 4Fe-4S binding domain
  misc_feature (1)..(65): Xaa is any amino acid
MTVIVNQSKCIACGICIKSCPEPGAITRNNGDSDGKRRVSINPALCKMCLLCVSVCPKKAIVAED

SEQ ID NO: 90661 - protein, 126 aa, Unknown
  Obtained from environmental sample
  misc_feature (1)..(126): Xaa is any amino acid
VSGGRQNLLSGGTFGQINGTKSNPVLQADLFGDFREEVIFSNGTDALRIFTSTMATTKRLVTLMHDPVYRVAVAWQNSSYNQSPHPGYYIASDMDIPPPALNVAVVGGNPGSPTPVRFADAARPAA

SEQ ID NO: 90662 - protein, 199 aa, Unknown
  Obtained from environmental sample
  DOMAIN (7)...(174): short chain dehydrogenase
  misc_feature (1)..(199): Xaa is any amino acid
MLDVKGKWCFITGASRGVGRQIALCMAEHGANLILHSRSVAHTEKVLNEAGKFGIEAFAVEAELSNPDEVKALLQKIDKSGKNVGIVFNDAGVQVAYRQEYFQTPVADFTQSFLINTIAPAIICYHFLPKMIANGFGRVINTTSGIRNEPQQAGYSASKAALDKFTTDLASVLDGTDVIISLADPGWIRTDLGGPNAPG

SEQ ID NO: 90663 - protein, 347 aa, Unknown
  Obtained from environmental sample
  DOMAIN (201)...(319): Response regulator receiver domain
  misc_feature (1)..(347): Xaa is any amino acid
TRNVKIEAGKFELEKIPMNIEKMLMKVSNIIIDNIEKKNQKLNVHMAKDLDLNYIADDLRLSQVVTNLLSNAIKFTPENGNIMLAVEKMESKGNVNTLRFTVTDTGIGMTKDQSARLFNAFEQADGSISRKFGGTGLGLAISKTIVEKMGGRIWVESEEGAGSSFIFEVDLERAPSQEGSERKSFEIETDTTIETPDLSGVNIILAEDMEINREIFTALLEETHITIDSAENGLVAVAKFRENPEKYDLIVMDVQMPEMDGFQATRAIRAMDTPKAKSIPIIAMTANAFKEDVDRCLEAGMNDHLAKPIDEKSVMEKIMRYSGRINPYSIPKQELLPTELIDTAWQG

SEQ ID NO: 90664 - protein, 131 aa, Unknown
  Obtained from environmental sample
  misc_feature (1)..(131): Xaa is any amino acid
MIIVDYGAGNLTSVHNALEYLGIESEISSEPRKIENAEKIIFPGVGAAAAAMENLNKSGIGNALGIALKKGTPILGICIGCQIILEESEEDGGVKCLGFLQGKAAKFRKEPNLKIPHIGWNQVNFTKEHSI

SEQ ID NO: 90665 - protein, 156 aa, Unknown
  Obtained from environmental sample
  misc_feature (1)..(156): Xaa is any amino acid
MEGVTDLPFRRFIRELSKDKQPFFVSEFLSTGSSVFLTPVNTRAVRFDKEEEPFCMQLFGHNAERLATAALQAQELGAAFVELNAGCPAPKIANKGSGSGLLRDLPNLQKILESMKNVLKVPLFLKCRLGWDENSMVINEVLEMAEGCGVEQLTIH

SEQ ID NO: 90666 - protein, 194 aa, Unknown
  Obtained from environmental sample
  misc_feature (1)..(194): Xaa is any amino acid
MEFRYAISLVLEAHLPFVREFQKEDDLSLIGEESRFFEYVNETLLPLLETLYRLETDHIPFRLALAVSPVLIHLLTDEHLQKKYLAYTDKQIEFGRQELERTANNEELNKLAQRYYNVTVDRRIAYTERYEKNLLKAFDFYRRKGKVEILASCATHAFLPFISHNSESLQAQMEIPISGYRRHFAGVPQGFWLP

SEQ ID NO: 90667 - protein, 289 aa, Unknown
  Obtained from environmental sample
  misc_feature (1)..(289): Xaa is any amino acid
MLGRIILSIAIGVSAVSFLSAQAIPDRPEKITFPQLSFQVPKAKDYKTSLNNKIPVYISDNASNAPIINLSIQWRGGGYMEPAGKEGLAGFYGSLLASTGSTKLELEKQEDILDNLAASISSSCGPTGGSISLRCLAKDFDQVFAMMMDTFNHPAFKQDRLDLNKRRSRQALLLRNNDVTSIASYQMSHLLNGDDHFSVRSSTPASIDSITREDLLAFHSRIKHPSNFMVIVSGKFDRKPVMNKLNATLGSMKASKDAHVSPKIPAPEFTRTPSIYVVDRANAPQAVVQ

SEQ ID NO: 90668 - protein, 394 aa, Unknown
  Obtained from environmental sample
  misc_feature (1)..(394): Xaa is any amino acid
MAESGSFNKLASGLPIEERQNLLERLKAQSNFSGKILYEEETGDSSSEDIDTEFSKLPLIYHLWYYFLSFFKSKPPLQIFGESKLAALGNKIEEKAPGLYDHQKGMLLPLFYRQLTKLKEAAHFFYSALDASVNRDKASFFAFLGSLEMPDVHMALQNDANPMTISQVNPELPETELRQAALKAMEDAFAKMSEDKHNAMYSNARSLFCLKELSSFLFDRVLLAFSTDAGGKGETCSAGIVRDLLSTLNNILLSLKTVPSMTLLESLFIFILQEKSGEPGFDMNHETHVLLARAEQSLAVIKEFNKNVPLTLILRCCTRNTALAPHELSGGEDWYVVYRDYWKKRIDSLCADYLKDHRQKDLLDSFSEFLKGRSIKPLENTQTDTNPDGIPIRG

SEQ ID NO: 90669 - protein, 169 aa, Unknown
  Obtained from environmental sample
  misc_feature (1)..(169): Xaa is any amino acid
LSGSLSGLIRRVEDFFIPPLCIVCDGGLADDREGGGGSWLCPSCVNSLIQNHTSREPCPRCAQNLKKRACACEVVWDFPFERVCCVYDYDDTLSVIAKHIKYYGKSGLAERMGVISAPLIPKGFFSGIDLVIPVPLHRKKRRRRGYNQAERFARGVLAGLGVDTAPLRT

SEQ ID NO: 90670 - protein, 194 aa, Unknown
  Obtained from environmental sample
  DOMAIN (91)...(191): SpoU rRNA Methylase family
  misc_feature (1)..(194): Xaa is any amino acid
LGHLDASETEYFEKLVKLLAEDEAFTASAIEALKTAHKNFADYRTDENEIRRALNTVYQILLAETGCYQADWDFFEPAGALDPLKRHIFSGMYVYLEDIRSPFNVGSMFRAADSFGTEKIWLSPLCASPLHKRALRTAMGCVEVIPWEFLSHDPFTIDPFDDHSTLPFFQGPFFALETGGTPLADFRFPTRGII

SEQ ID NO: 90671 - protein, 275 aa, Unknown
  Obtained from environmental sample
  misc_feature (1)..(275): Xaa is any amino acid
SVFICQHCGIKYSIEEVKRMLTEMQLKEKKLKEGDRLSEEQKLKDEAKRLKEEEEKQRLMEEQRLKEEERQRLKKEEEQKIIAEEQRLIAEEKRLKEEEQKLKEEKERLKEEKRLREEQRLKEEERLREEERLREVQRLKEEELKLIAEEQKLKEEKERLKEVLRLKEEERQREEQRLKEEHQKIIAEEQKLKEEKERLTGKLRVITETSQEEVPQEAPQEEVPQEVPQKEVPQEAPQEEVPQEVPQKEVPQEAPQEEVPHEVPQKEVPQEEVAK

SEQ ID NO: 90672 - protein, 438 aa, Unknown
  Obtained from environmental sample
  misc_feature (1)..(438): Xaa is any amino acid
MTLGTIYSDMYRYDEGKYWYEKAIALGVGARSFTAVAHYNLSILESRFYRYDLSMDEANASIDAQNRASGLLARGELLMRRLDIEEAHVDFQTAREIDQSPLAKVNLAQAYQISGRLEEARLYALDCLKAGDQSWMAYYGIDPVRYKRDIHEILYKTYSGLAKAGRFMPQGTLSGVIRSAIKSISYRFYYAVHRKLYQKYSLASGDAYNIREANDHPPLEQYIPYYNAFETYPDRSIVYLRKARDFETGIIPASAGSYYLEESVLLKDTALTARALDALDPVWERDLVSYCYREFALNGSQVSAEELFALNRGALLQAGISLPLEIRFNNANEIGANGGAGKGKEKKILKALAKAGFVKTVSSNPSRFTLDITINAAPISGAPPPSSSSRGFTVFCELTDNAGVVKPLRHAFPLRSLSYADICAFARALGALAFRVEG

SEQ ID NO: 90673 - protein, 103 aa, Unknown
  Obtained from environmental sample
  misc_feature (1)..(103): Xaa is any amino acid
MKPEFIEERWNNRALFSLLWPLIVEQILAVAMGAIDTVMVSSVGEYAVSGVNIVDNINNLLIIAFGALCTGGAVVVSQYIGRKDYSNSSLAAKQLVYTAVPDS

SEQ ID NO: 90674 - protein, 294 aa, Unknown
  Obtained from environmental sample
  misc_feature (1)..(294): Xaa is any amino acid
NVTGIGEQAFKGCTGITGITIGSGVTGIGKQAFKGCKSLIGIVIPDGVTIIDEGTFDSCAGLTNVTIPNSVTTIKGNPLIGGGAFNGCKSLTSIIIPSSVTVIGNAAFSDTGLTSVTIPGSVTKIEMNSFSNCKNLTAINFDADNSAYSSENGVWFNKNKTVLLRYPEGKTGAYTIPNGVTSIGDWAFSGCKGLTEVSIPNTVTNIGSYAFQYCSSLNSITIPNSVNSFGQHAFFSPLNQTLTSVTFQGPIINERYKLGDYGFSPFYGDLREKFLAWGPGTYTRPSNSDVWTRR

SEQ ID NO: 90675 - protein, 184 aa, Unknown
  Obtained from environmental sample
  DOMAIN (10)...(169): Putative transcriptional regulators (Ypuh-like)
  misc_feature (1)..(184): Xaa is any amino acid
VIENIEKETALVEAILFMEGDPLDEGTVARICCLSKDVITNALDNLSERYANTDCALELTRVGGGIKISVKREYWDNLKERYGRKSEGKISRAAMETLAIVAYMQPVTRPEIEKIRGVSADNMIRLLLEKGLVDEAGKKDIPGRPVMYKTTKEFLKIFGLSSIAELPKLGESDIEKFELEGEKY

SEQ ID NO: 90676 - protein, 366 aa, Unknown
  Obtained from environmental sample
  misc_feature (1)..(366): Xaa is any amino acid
DHVTTKKENETWEKKIVKIIRFILCFSVVSTNIFCEDWEFIVLQDSPIYTTSASNEPVGFLHKDKIIISNGNAGYGLEKGYDEPMPYFGFEPDNEYPYIKRYHVTIGDYIVPANTVDLFGSNIIGKKNNILTSYCCDILRSKNRETLFKYEPYYKDNQSYFEYAYMKDIYWYEEYDSNWSRFFVFNSILSFGYRRGLVVNNIEKTKYGYKVKCKESTSNNSPDFKVPTLEWNNIQGKKEFTLLIYIDGDYIDLYVDNTTDKVGSFVFVSNEFINQFNNLIKTNTCDLANVKWPRRANGNMDYPSDQQAIEKTAFFTSDTENQESEMVQNNLETNLFPTWTWITIIGGSIVVVGGCVVFFIIKRKMR

SEQ ID NO: 90677 - protein, 332 aa, Unknown
  Obtained from environmental sample
  DOMAIN (100)...(253): AIR synthase related protein, C-terminal domain
  misc_feature (1)..(332): Xaa is any amino acid
VWAARFAIPFRAAAFVHQAMRVTGGGDPSGGLRDTLVGKLPQIKIAREAAAGYSSYGNQIGLATGQVAEFYHPGFIAKRMELGAVIGAVPEAWVRREEPVAGDLVILVGGRTGRDGIGGATGSSKVHTGTSVESAGAEVQKGNAVEERKLQRLFRKAEVSRLIKRCNDFGAGGVSVAVGELARGIDINLDAVPKKYFGLDGTELAISESQERMAVLCSACDAEAFIKAAAEENLEAVVIAKVKDESRLRMNWRGKTIVDISRDFLDTNGAPRFAKALLVSDTIPAGLPPELPAGVLIDNLERELVSLRSGSRRGLQERFDSTVGALSVLFPW

SEQ ID NO: 90678 - protein, 227 aa, Unknown
  Obtained from environmental sample
  misc_feature (1)..(227): Xaa is any amino acid
MILTVGRGALLIMGHIKDSKLYFRLRREYYRTVVRFIRKIDPNFKQNYIGSGGTVSFRYCYSVFMRHIVSLFKNGMTDIPNRVAEFGPGSSLGTGLCAILAGAREYYAFDLIECADNIHNLEILDGLVRLFKEKAPIPDNKEFPEVKPLLDDYSFPSHIFGDDILKKNLSDERIDLIKRALSGKSGTADDIVIKYIVPWEEYPGTYPEVDFIFSQAVLEHIDNLDRF

SEQ ID NO: 90679 - protein, 273 aa, Unknown
  Obtained from environmental sample
  misc_feature (1)..(273): Xaa is any amino acid
MRRITAADIAITAAFWILTALSSAHCAAPASTFVNASHPAVRYIGRFDRRHPRHVRFDWPGVAVETRFEGSSCDILLRGDGGLYDISVDGVLTTRRFDTLETAHTLASELTDSIHSLRIVKRTEGMRGQVVTLKGFYLNAGKKLLPPLDAMPERRIEFIGGSNLLGFGVEADTVWCDTPGNYSNVSLSFGAVAAKTVNAEYRVLAVSGKGLVRNWRSPYVAATHPFGPLYDRTLKNDPSAAHNFDSWVPQVVVTCFGTNDFSTKPYPTKALSR

SEQ ID NO: 90680 - protein, 65 aa, Unknown
  Obtained from environmental sample
  DOMAIN (1)...(60): Flagellar protein (FlbD)
  misc_feature (1)..(65): Xaa is any amino acid
MIKVSRLNGLEYYINPHQIESIEIHPDTTLLMLSGKHVVVKEKVEEIINRIVEYRRRIGGFKNEE

SEQ ID NO: 90681 - protein, 121 aa, Unknown
  Obtained from environmental sample
  misc_feature (1)..(121): Xaa is any amino acid
MNLAPIIGIVGALAMVIYGMLGSGNALTTFIDIPSVVIVLIGSYFTLFTLTSISDALGIFSTMSLIFKTPNFNEQGIITKLMAMSEKARREGLLALEEELEDLDDEFMKKGMRLVVDGTDA

SEQ ID NO: 90682 - protein, 180 aa, Unknown
  Obtained from environmental sample
  DOMAIN (8)...(108): tRNA pseudouridine synthase
  misc_feature (1)..(180): Xaa is any amino acid
MEGRNIRLLLAYDGTGFCGWQRQSEGNRTVQGVIEQALEKMHGFHVCLTGSGRTDTGVHAIGQAANFFTGINSIPCERFVPALNSLLPNDVRILESREEKKEFHARFSACARTYRYHFICRDLLPHERNYNLCLRRFPRLEILNAYGRLLLGETDCSIFAGAGDASLEKGKSRNRYIYRA

SEQ ID NO: 90683 - protein, 308 aa, Unknown
  Obtained from environmental sample
  DOMAIN (43)...(157): Response regulator receiver domain
  misc_feature (1)..(308): Xaa is any amino acid
MGGSIWVESELGKGSTFYFMVQVTRGTEDKQKHLLDDVNLNNVRILAIDDDPEILSYFREVTQGFGLSCDTALSGEEAFKLMDQKGGYHIYFIDWKMPEIDGIQLAHEIKERTLENSLVIMVSAAEWSAIAEEAKAAGVDKFISKPLFPSAIVEVINECLGVDKQQMEKSQSADIAGIFAGKHILLAEDVEINREIVQTLLEPTQLEIDCAENGAEAVRLFADDPHKYDMIFMDIQMPVMDGYEATRRIRSLDNPHAKIIPIIAMTANVFREDIERCLEAGMDSHVGKPLDFEEVLVKLRAFWNTPVL

SEQ ID NO: 90684 - protein, 336 aa, Unknown
  Obtained from environmental sample
  DOMAIN (272)...(332): Helicase conserved C-terminal domain
  misc_feature (1)..(336): Xaa is any amino acid
MEFKKFNLHPDLQKGIDEAGYINCMPVQEQVLSHAFGEGFASQDCHASQDLYVQSQTGTGKTAAFLIVIFQRMLTEDQLFKKKALIMAPTRELAVQIEEEAKMLGKHLPFKTGSFYGGVGYTQQEKLLRENAQILVGTPGRVLDLNKSGRMNLMDIAFLVLDEADRMFDMGFYPDLRKLIKVVPSVDRRQTMLFSATLNAWVKNLAWEYTKKPFEIEIKPEIITVEEVTQILYHVPSEEKMPLLLGIIQREQPESMIIFCNTKKSTEIVAKRLKINGYNCEFIIGDLPQSKRLKIIDDVKAGKIKTLVATDVAARGLDIESLAMVINYDLPGKRKI

SEQ ID NO: 90685 - protein, 132 aa, Unknown
  Obtained from environmental sample
  misc_feature (1)..(132): Xaa is any amino acid
MLKFRRCLLKLSGEALAGSAGHGIDNSTISWVAQEIANSVKDGAQVALVIGGGNFVRGATASAGGMNRAAGDSIGMLATVMNAIAMQDALEKCGQKAEVMSAIRMEPLCGYFDRRKAIELMENKTVVLFAAG

SEQ ID NO: 90686 - protein, 318 aa, Unknown
  Obtained from environmental sample
  DOMAIN (1)...(169): ATP-dependent protease La (LON) domain
  misc_feature (1)..(318): Xaa is any amino acid
MAALAQSLRRDNRLFAVCQRKQDSGDDPGEYLCPVGTVVRIIQHLRLPDSAFRVVLQGEYRGRINEYEPHGDYSLVKVSPLDTGSFSDTPSSQDIALLRTVQRAFAQYAELSKKIGTDTLLAVERAESPERAANLICNSSHFKTEKKIELLAVSDIRERLEAVLETLERENEIFGIQKNISGKVKSRIDKHQREYYLHEQLKEINKELGNDKDSKEDEFSELEKQIKAKAPSEEVVAKAAKELGRLRKLQPLSPEAGVLRGYLEWISDLPWSETSADSRDLDAAQTILDEDHFNMRKAKDRILEFIAVRQLLASTDGA

SEQ ID NO: 90687 - protein, 87 aa, Unknown
  Obtained from environmental sample
  misc_feature (1)..(87): Xaa is any amino acid
MKIITLKDMIRKDVPIYYRKLYTSVAVIELNNKQNEYRIDFSMEIKPTGQKEFNVNFIDAVDYPLIPLTKELKQYIAELEAADGLPD

SEQ ID NO: 90688 - protein, 240 aa, Unknown
  Obtained from environmental sample
  DOMAIN (144)...(201): Bacterial regulatory proteins, luxR family
  misc_feature (1)..(240): Xaa is any amino acid
MGGVLALSRAVELHTEIKGQLEAAGFENVTVTDKDNDELNTIICNKNPRLVFIDSWFYQDGTSYRIGELVKLFPKLNIAVVSVHDFPVRRAPCFIWDGARSYLSLWEGNEEFQRGLRIVRDGGQYISPKVQRLIDHYDEWPDTKNKMTRRQKVCLVMLCSGCIIDQIGETLHISKKTVYNHLNSLYCAFHAHNRAEMVALAYEMGLITTKDIQLYNRKKELLPLPEWTGDKRQYDKFYFD

SEQ ID NO: 90689 - protein, 160 aa, Unknown
  Obtained from environmental sample
  DOMAIN (1)...(151): metallopeptidase family M24
  misc_feature (1)..(160): Xaa is any amino acid
DYTTGRAIIEKGKCLLCDFWGRYAGYYTDCTRTFHFGKPTAEFEKIYNIVLEAHLAAEAKAMSGNLLEDVDIAARQVIAKHGYGEYFTHRTGHGLGIDVHEGDSANTGVKVPIKPGIVFSIEPGIYLPGRFGVRIENLVAIGENGSEVLHSYPRELKIID

SEQ ID NO: 90690 - protein, 356 aa, Unknown
  Obtained from environmental sample
  misc_feature (1)..(356): Xaa is any amino acid
LAIRDASDYLNDNIPKGSKIVILNIQSDYAALSDYIIDELIANAVKDKIFTVVDRAQLETIRMELNFQLSGEVDDSHALEIGKFLGAQTIVSGVVSELGDRHRMRIRALNVQTSQVQGQYNRNISASPMITALMKGGKSSTLAYSGRTQRTNGNANSGPNGAQSPNRQTPTQTAPTYKIGDTGPAGGLIFYDKGNNRGGWRYMEAAPSDTGIQIWAPNVDRSYEYPNPGETIRWGKLITTELGRGKENTEEIMEVLSRQSGGFGWAIRVVSELNINGFGDWFLPSRDELSFMYGNLYLKELGNFKAGLYWTSSLAGDGQGYVRNVHAIDFSTGKSIEYSFVRHNDQRGSIRACRRF

SEQ ID NO: 90691 - protein, 558 aa, Unknown
  Obtained from environmental sample
  DOMAIN (426)...(483): Bacterial SH3 domain
  misc_feature (1)..(558): Xaa is any amino acid
LEQAFIDILKQLVKEHGSAALSDAKKCKALLADYTRNEYKKQSRLLVLTVEEGIPKAIEGAEDLPACKKGKIKELEEEHGLNSEFAADIVNLLALVLRGDTSVTVSPTLIVEFCDSKTPSHPAQPDGTPPVQQKAAPAAPAQQKAVPATAPPVQQKATPVAPPPAPAEPEKKAITDPQAQLELGNRYANGEGVQKDEVKALEWWTKAAKQGLMEAQYKVGLCNYNGYYNGSNMYEDVPTAVKWWTKAAEQGDVRAQYMLGVCYTSGYIIGKDTQLAREYFSKAAAQGNTQAKKELSKRILLFDLLAERIGNWPYNSPLPYITSIIIGLCFAPGAWALFARALALNTPLAIALSVLTMGAGGFITYKAVNDWYYVSGGYVLITPAIALIGIVFFFIVPQPVKADQIAPRETSADTEAAIKTTETAEMTGNANFRKGPSTNDAVIRQLKKGDLVILTGEVSGGWTQVLRDGETGWVSSEFLKVWGGGQAPSPQPSAQAQPKPQPQTQKQNAEPQSEKQAEAPATAQPAAVQPVAAQPAPVPAEEIVDWARGNYTASIKSA

SEQ ID NO: 90692 - protein, 452 aa, Unknown
  Obtained from environmental sample
  DOMAIN (29)...(320): Protein kinase domain
  misc_feature (1)..(452): Xaa is any amino acid
MAELKAGDTLESTIGFKKVTVKKPKSKKQDEGDHLGDGGQGWVYLVDYGDKPMALKWYKPGVLKNPGKFYANLQNNIKKGAPTKSFLWPLDLVKKGDDFGYVMELRPPDYKDFSHILLGRELDGDQIVKLKWPGISPKVTAALNITAGFRALHAKGYSYQDLNDGNFFINLSDPAKLGDVLICDNDNVSEFGYASGIAGKARYMAPEVVLGNSDPNPKTDTFSLAVVLFMLFVTNHPLEGKAVLAQPCMTDVWEKKFYGENPVFMLDPNDKSNEPVPDKHQGAVKRWPFLPPYLREMFIKAFSKEAMKDPALRVLERDWVQVFVRMRAETWKCPTCGEVYFADPVTPNPCPSCNKPHAFPFYIKTSSGYNVPAHQRTVLYQCHTSTDADKDFDVKTGEMMVKGDEIGLKNISNERWSRIKDGVQAPVEPGRAARLEKGVKLDFGRGASAEII

SEQ ID NO: 90693 - protein, 437 aa, Unknown
  Obtained from environmental sample
  DOMAIN (330)...(352): MORN repeat
  misc_feature (1)..(437): Xaa is any amino acid
MIWQKTFDVRNEGIRNEMTEKEILSELNAGIEHDPDRDKNYYQRGLIYKKQKLWEKAEADFAKAFSLWTDPLYLHEWREAAKEKQATQTLEERMAPYAAIINKIKDIREDAPPFDDTENVPTVELIAALALFEEYEVLKTLFKSEQFTANINETVSPAFAYWQPTPLYFITSKKALAIMKDPCKMIRFLSAHGADPNIPAEDGSTMLWNQCNKGYPIEIMKTLLEIGADPNQTSKDSEAEWTPLAYCLLPGFAEDKDGNPIENQYLPIENESIEKAKLLLDHNADANFTARDGNTAMILALEKGEVYEGHFVDGKLQGKGKYTNKSGDIYEGDFVDGKFHGKGKLTMTDAFTYEGDFENNSPHGKGKWTSLEYGDYYEGDFFNGRRHGKGKIIYADGRVYEGDWAKGRWNGKGKMIYPDGRIEEGGWKDGNFVGKEE

SEQ ID NO: 90694 - protein, 88 aa, Unknown
  Obtained from environmental sample
  misc_feature (1)..(88): Xaa is any amino acid
MNEKIIILGAGVMQGPVIKLAKELGFFTIVLDGSLQAPCISMADQFEQIDLKNKEEIETFARFTQNSRRTFGNNDRRNGFFRQCGLGR

SEQ ID NO: 90695 - protein, 300 aa, Unknown
  Obtained from environmental sample
  DOMAIN (46)...(223): Phosphoribosylglycinamide synthetase, ATP-grasp (A) domain
  misc_feature (1)..(300): Xaa is any amino acid
LRVSRKILAGRLGIMTAGTDFSASVAWVAEKLGLPGILFEAALNASDKSRMRECFKKAGLPSPDFTTITAADLPLTSSKLTNLDFPLVIKPVDNMGSRGCRRVDSIEELNTAAKTAIGFSRSGRAIVECYMEGPEFSVDAIVYHGEITICGLADRHIFFPPYFIEMGHTMPTVIETEKQQAMLDTFRSGIHALGIAGADNIGAAKGDIKLTAKGPMIGEIAARLSGGYMSGWTYPYSSGALPIKGAILAAMGRKPEGLIPTKEWTCAERAFISIPGTLKTISAIEQARVIPNVKDLFLRI

SEQ ID NO: 90696 - protein, 205 aa, Unknown
  Obtained from environmental sample
  DOMAIN (28)...(203): DNA methylase
  misc_feature (1)..(205): Xaa is any amino acid
MRVEQIGSATLYLGDCMKLMATMPDKSIDLAIVDPPYGVGQNWKKDRLSQFYKHRSTYKNNTIPDKDYFDELFRVSINQIIWGGNYYTSFLPPSGAWLFWDKQRSEKTFSAQGELAWTSLHISLKKISLRWNGFCVCEPRSGIHPHEKPVALYEWILSRFADLGMKILDTHLGSGSIAIACQKNGYSLVACEIDKKYFNAACKRI

SEQ ID NO: 90697 - protein, 277 aa, Unknown
  Obtained from environmental sample
  misc_feature (1)..(277): Xaa is any amino acid
TNMTRNTEEEIYTRLVKLATTFGRPEMIGMIDQMFSSGGLPEYSFEFPDTSGIEYFQAGLRFTTTVNSADLGFQYFYGNLFRPNYCLSSDGMNAFCIDLAMKNMSNPGSYTGNMSLLDPKINYTRYHQIGIDYAQVLLGLNVRAEAAINITEDLEGDDGSLQNPFVAWALGFDRDLFWGINVNVQFDETIRLLDDKVGDNPVFDSEAGTDITSSRVTLHLSKSFLRDKLEFGITGVWKVEDSDFYIIPSLAWTDGNLSARIAAGILTGNEHGELGQY

SEQ ID NO: 90698 - protein, 236 aa, Unknown
  Obtained from environmental sample
  misc_feature (1)..(236): Xaa is any amino acid
THTETRPIARLESFTVTFHANGGTPQPPNQTVEKGNSASEPPAPTKANYTLEGWYKESALTTKWIFASGSGVAADTVSADIALYAKWILADTAFREYEDVLMFTDNAYGDKPYYANIADARTGAREKTLEEILDANNKNIVERLQSAVVAAFNSGTGPGATVTKGRFITVFGNAAGLGKVVITIENNTSYDSYKVGETYNDLRFSIEYLTTVSDADLQAAIVAAVREMYTIYGSLG

SEQ ID NO: 90699 - protein, 104 aa, Unknown
  Obtained from environmental sample
  misc_feature (1)..(104): Xaa is any amino acid
ISHKNTKDGKNAVTAIKPLSVSGGYSLITAEIATGRTHQIRAQAASHGHPLLGDRKYGSRKAENFFLHAWKMEFSDIYIKAPLPDEFYKKIEELFGEKLLRDLS

SEQ ID NO: 90700 - protein, 296 aa, Unknown
  Obtained from environmental sample
  misc_feature (1)..(296): Xaa is any amino acid
FGGVRGSIPCPGPDTVIYGGNTSCLEIRADERLIIIDLGTGIRPLGDWLIANDLKKYGKIDADIFITHTHSDHLLGFPMFTPLYIRGTELRITAPVSFENDSLKSIIETQLSHKYWPVRAGELAAHIEYSQIKETALNLGGGLAVTSKFLNHPILCLGYRFDYQGKSIAVVYDHEPFYNLFTVNPDDKNYNEEDAKEGEIAAAEENEKIINFVKGANIIIHDAQYSEKEYLSHNGWGHCSFAHAVRTKTCANAKKLVFFHHDPAHTDSQLEQFEKTYAKDAEKEILMAKEGMILQA

SEQ ID NO: 90701 - protein, 291 aa, Unknown
  Obtained from environmental sample
  misc_feature (1)..(291): Xaa is any amino acid
YINIVNFIRQTDYRLQNADSLLLDATTKQISLIKQYGFPATFLIQYDALINPEYQRLLKNNLPANCELGAWWEITQPQVEAAGLRWRGEHSWVSTANIAFTTGYTQRERERLADVYMAKFKEIYGKYPAAVGSWFIDAYTLTYLYEKYGITVSCNCKDQVGTDGYTLWGGYWNQAYYPSRKNAYMPAQTEKGQIPVPVFRMLGSDPIYQYEEGLGTDGQGVVSLEPGYSHAGGNRQWVEYFLNSMIEQPCLAFAYMQAGQENSFTWDAMRNGLEMQFTMFDSLSRKGKIRL

SEQ ID NO: 90702 - protein, 936 aa, Unknown
  Obtained from environmental sample
  DOMAIN (294)...(513): Bacterial extracellular solute-binding proteins, family 3
  misc_feature (1)..(936): Xaa is any amino acid
MLAVVFALVLFSACHKSITHRLYDRPAFNSYQDIPGVTEGEIKAIEALREKTPFFVYGMSESTETFTGENGEIGGYSVLFCEWLSQLFGIPFKPAIYEWGDLMEGINAQRIDFTGEMTPTDERRKTYFMTDAIVERSIKIFWLEDSKPIAEIIRSHLLRCCFLEGTTTISEVTSRLPGKYTIIEVNDYPSAYRALKSGEADVFFDESSAEAAFDIYDDILIENFFPVIYSPVSLTTKNPALQVVISIVQKALYNGSLGYISGLHKLGENEHRRHKLFMRLTEEEKAYIRNNPAVSVAAEYDNYPVSFYNKYENKWQGIAHDILRELESLTGLTFKIANDKNTEWPELLSSLESGETSMVTELLFSEDRIGLFLWPRSVIMTDNYALISKSDYPNVSINDILRIKVGLIKNTAYASLFNTWFSDHKNNVLYDNTDAAFDALESGEVDIVMANLSQLLMLTNYYERTGYKANFVFDFTSESTFGFNRDAAVLCSIVDKALHLIDTRGISGQWMRKTYDYSVKLARSQRTWLISVTVLFFCILLLLSILFLRNRRLGKWLETLVQKRTNELVIQSATITAAFEATLDLIFCKDLNSHFIRCNKTFENYFNVREADIIGKGDAEALGISAESAELYKERDRDVVREGRTLVFEEYIPSADGTTQLFETSKVPMMQDGRIIGLMSISHNITQHKAMEEQALSASRAKSAFLANMSHEIRTPINAIIGMTTIGKSAAALERKNYCFTKIENASQHLLGVINDILDMSKIEANKFELSPEKFDFEKIIKSVVNVVNFRVDEKRQKLTVNIDDAIPRVLIADDQRLMQVITNILGNAVKFTPEKGSIRLDAKFAGEENGLCTIEVSISDTGIGISREQQELLFSSFQQAEITTSRRFGGTGLGLSISKNIIEMMGGKISVKSSPGKGSVFIFTIQAKNGVPANN

SEQ ID NO: 90703 - protein, 416 aa, Unknown
  Obtained from environmental sample
  DOMAIN (184)...(364): Integrase core domain
  misc_feature (1)..(416): Xaa is any amino acid
MGLDMQTRKKICARIYRRYQKAGKKDKAKILDEYAPMLEHNRDYLAHLLANWGKTVYAPCDGKPVKYVAKPPIKARNKAPKNKKTGRPEKYDKPFAEVLLSLWEFFDFQCGKLLAPLLKGMEGFLVQEFNLSEEVRALLLSVSPATIDRKIRNQKKRYRLKGMHTTKPGTLLKSQIPIRVCFDRDEKWPGFFELDTVSHCGANAKGQFCQTLTVTDVGSGWTEECALLNNAHRWVKERIESTRDGLPFPMLGIDSDNGGEFINRRLLDWCVQNNVKFTRGRPYRKNDNCFVEQKNGDVVRKTVGYGRFEGQNAFDALDEVYRFLNPLLNYWYPTVRLVAKEKLPSGRYKKIYEKDPKTPCQRLLESPCISEECKTELRLRAKLLNPVALKRGLDEARDRLLKLSVIETSIPSSRVS

SEQ ID NO: 90704 - protein, 144 aa, Unknown
  Obtained from environmental sample
  DOMAIN (8)...(143): Glycosyl transferase family 2
  misc_feature (1)..(144): Xaa is any amino acid
LSSGAKISVVMPTLNSGRYIARALESLAAQTLEGAELIVVDSCSTDNTIDELHSHKLDSLPIKILSVPDCPYAPAINLGIDAAEGSFVAFCDSDDYMAPDMLSIMFDAAIKSNSDIVVCDFDMAYPDRTIKSFAQLSDGHFEPA

SEQ ID NO: 90705 - protein, 439 aa, Unknown
  Obtained from environmental sample
  misc_feature (1)..(439): Xaa is any amino acid
DIVGPAATTLAVGASTTFTVRPKVDLKKGVYDREIEVTGVAGGVNTASNTVKATFTVTDTPVLEVVVSPSDTVKFGSRQKPYTQPNPKTVTITNVGTDMVEVSLDAGSAQSFIVNPSPFKATISVGSTATFTVRPNEDLDVGMFKEVITISGTGVGAHASAGMEKVEIPVSFTVTDQPKTYNMVVTPTEISFGTALKGYAQIAAQTVTIENKSPFGTIALTPLKSRKNYFVLTALTPSATIASGAKATFTARPQTGLSATGGDDFDGVYEDWIVLDGGESARDSVLLRFSVASEPMFAITATELSPFGSLLGPSYTPPAAQTVTVTNTGTGTVTLTKPTAVNFDIGNLSATSIASGATATFTVRPKSNLNFGEYRDTITISGANGTSTTGAMVVATFAVVVNEKYELSATELTPFGSVKVEQGSYKQPAAQTVTVTNTG

SEQ ID NO: 90706 - protein, 299 aa, Unknown
  Obtained from environmental sample
  DOMAIN (6)...(299): MreB/Mbl protein
  misc_feature (1)..(299): Xaa is any amino acid
MFGSMSSDLGIDLGTCNTIIYIRNKGIVLNQPSVVAVELGTKKVVAVGADAKRMLSKTPGHIRTIRPLRDGVIADLESTEKMIRYFISRVLPRYRFIKPRMVIGIPSCITEVERRAVEESAYKAGAREVIVIEESLAAAIGADIPIHEPAGHMVCDIGGGTTEISVISLGGMVVTNAIRLGGDEFDEAIIKYVRMVNNLIIGQQMAEHLKIEIGNAVPDKSIMEVEVKGTNAANGLPQRFKIGSDQIREALRDPINQIVDNIKSTLGQTPPELAADIVERGIIMTGGGSLLRGLDKLIA

SEQ ID NO: 90707 - protein, 240 aa, Unknown
  Obtained from environmental sample
  misc_feature (1)..(240): Xaa is any amino acid
MALTDKIEIPRRTMVLFFVIDTSGSMDGSKIGAVNTAIEEVIPAIKELSDENADAQIKIAALEFSSGARWITTSGPVEADKFRWTFLDAAGVTDFGAACKILNDKLSTKAFMQEATGSFAPAIFLLSDGEPTDDDWAKELAKLKQNNWFKAAVKVAIAIGDDANKDVLKEFTGTMEAVLETHNAATLKKMIKFVSVRASQVASKSSNVNDTEADLGDEQKQEELRNCKKINFTTYFLCVA

SEQ ID NO: 90708 - protein, 108 aa, Unknown
  Obtained from environmental sample
  DOMAIN (3)...(107): Phage P2 GpU
  misc_feature (1)..(108): Xaa is any amino acid
THARSSARWVEHNTINTAPLSEFLGPGLDEIELKIIFAVMLGVNPQESYESMRANVRTGKNYPLILQGKPLSMNFWYCPKISAASKVFAPGTGTVMRMEFTANFKEYH

SEQ ID NO: 90709 - protein, 282 aa, Unknown
  Obtained from environmental sample
  DOMAIN (17)...(166): TruB family pseudouridylate synthase (N terminal domain)
  misc_feature (1)..(282): Xaa is any amino acid
MDKPVGPSSFSAARAVCKALGVSKGGHAGTLDPMASGLLVVALGRCTRLLEYLSLEPKEYEFTVTFGAATDTFDAEGEVTARSGVIPTRERLVNAMKGFAGEIEQTPPQYSAVKIGGVPAYKRARSGVSVDIKPRTVSIYSLEMRGYDADGKRADFAVSCSGGTYVRSLAVDIVKAADAEAEGHISRLRRTRAGRFDLSNAVKFEELANAGNYFINVSVAFDQDINITIDDEQKTNISKGREIVINKDGLNDILIAFDEQGMLAAVLKRIDGDRYHPNKVFV

SEQ ID NO: 90710 - protein, 686 aa, Unknown
  Obtained from environmental sample
  DOMAIN (476)...(664): Adenylate and Guanylate cyclase catalytic domain
  misc_feature (1)..(686): Xaa is any amino acid
VARDNDIYLAQALALNGNSWSTINLWAYQLSGEQAERRSLAEQLFSYPVNAAPNAPQGAGMIDILPALPIFAAAAKGAGYTNVELDNDGVRRRIYLTQNMHDHWYLQLAFAPLIDYLGKPEIFLEKRKLTVKQAKFPNGKVEDIVIPLDYKGRMMLDWPKTDYNDSYTHVSFAEFSLLDEIEMEIEKYSRALADADIMLFINQDNSLSFIPVALGNMAQYLDLSRETKNHAMENASHGSFAAFLEYRNSAYYLLQEILQEDTASKIQTISEQLSEKHPDLSGEIEDEADYIVSLLEALEVDLSRHRELTNANKKTFYDKFVIIGRVDTGTTDYGANPFYGKYINVGTHGVVLDTILSKSFIVCLDNIWKIIFMLIFVPVFFKFTDKFAPVLRAALGFGAVLFIFIISVSIFSLSGFFTGPLGVITAMVIAIIIREIISYSHSEKEKQFIRTAFSTYVSGDIVEEIISDPSRLQLGGTKRRMTAIFTDVRSFSTISEQLDPEQLVSLLNKYLGAMSDVILAEKGTIDKYEGDAIIAFFGAPLELKDHALHACLSAISMKKLETELNKTIMENNLSPLPLLTRIGINTGDMVAGNMGTANKMNYTIMGNAVNLAARLEGVNKQYGTWVLASENTIRETGDKLFHRKLDQVRVVGINEPVRLCELVDTAEHATSQQKQLVKVFTKRWRF

SEQ ID NO: 90711 - protein, 338 aa, Unknown
  Obtained from environmental sample
  misc_feature (1)..(338): Xaa is any amino acid
RMQAYGINPVLQGFLAWFPTDFQNKNSGASTIAQGDWCGFVRPDMLRTLENGDKDWFPRMAADFYKAQRDVFGPVTRYYAVDPFHEGGKMGGMDAGDTYRRIQDAMLEADGEAVWVLQQWSSLNAAKLGKLDKGHIIALDLFSEMRPQNEVMEQTGTKWVWDMLHSFGGRMGLFGDLPILAQGPPTDYGQKKHMIGIGTTMEAYSNSGIVYDLISDMTWNAEPISHLDYIRNYVNSRYGALDWDAIAAWDILANTAFAKKTAVVEGPPESIINSRPTMEFKSASTWGHSRYMYDKPEMEKALPHFIKAYDTLGGSPAFVHDFIEATVHVLSTAALEHY

SEQ ID NO: 90712 - protein, 481 aa, Unknown
  Obtained from environmental sample
  misc_feature (1)..(481): Xaa is any amino acid
MLPGTTVILISRSISRLNIAGMTYRGQIFNVNEDDLRFTENELAQYFRQIGISFKTDSLREIMQDTEGWAFALNLIARSYQKAPGYGGYVRSAMKQNIFRLLEMEIWNGLSQPLRIFLVRLSLIGHLSVDLITQLAGEGEGFAEELEKQSAYIRRDSYINAYLIHPLFLEFLKTKQTLLTEEQKKETYAVSGDWCARNGFKLDAISYYEKTGNYQSIVTILDGLAAQIPYNIAQFAAPILDRAPENTFDNVEFLAEMHLRTHLCQGHWQKSLDLLRFYEAKFLKLPENDTVRNRTLAQLYVCQAYIRGLMCTTDDVFDQEICMEKAIKCVSTLDEPGKFGPYYSGAWINYTGSSRKGSPDEFITVITRIGKNMPPAFLRGLLAGEVELMHGELEFYRGDINSALSLLTLSVKEARAGKQPSFMNRALFYTLRIAVSQGNFTLAEQALKDIKAQMDETGIPIPFYRLRYCSFLVFLLSGPAG

SEQ ID NO: 90713 - protein, 356 aa, Unknown
  Obtained from environmental sample
  misc_feature (1)..(356): Xaa is any amino acid
VASRVCLIAAALFAAILCRSAPAEPQQLPADLNGWALASIDFVFKEEYKSAEEEAKKITRAYPDHPAGYFFMAAVAEAWMQRYQSNKREAEFYRFCDQAVEKAEKILAADPNDDWARFFLGGAEGYKGTFEARYERYITAFRYGWKGVSVFLKMASGGSNNPDINFGIGTYDYWRSALMKMLWWMPGVEDKREIGIEKLKGVIKNGVYSKAAAGCVLIDVYMNEKRYEDALNIAADMGKRYPKALSFMWGRAAALQGLKRYDEAAAAYKAIYAKCENDQNTNYYNAVKARVGMAKAFLALGKNSEALEQVNAVNAYQLSKDIKKRLDADLSEANTIKKRANKGAGGGEELAADGGG

SEQ ID NO: 90714 - protein, 250 aa, Unknown
  Obtained from environmental sample
  DOMAIN (157)...(228): Bacterial flagellin C-terminus
  misc_feature (1)..(250): Xaa is any amino acid
LFIEQGSIKTAEDITNLVGLGGKLTNLLIAKDSTLVAGTKIGSSTSAGPQFVNLFAGTVITKGDADKTFSGSVTFADQGKNFQFSANTGDGLAARYYDLKVQDSFTFIFTEYDPPSSQLNDSLMSQIGANSGQTTFLSINDMRCKALGVSDVDISTKWGAATAIETVNNALQKVSHQRASLGALQNRLEHTIKNLDTAAENLQAAESRIRDVDMAKEVMEFTRTNILQQASQAMLAQANQQPQSVLQLLR

SEQ ID NO: 90715 - protein, 317 aa, Unknown
  Obtained from environmental sample
  DOMAIN (5)...(258): ABC transporter
  misc_feature (1)..(317): Xaa is any amino acid
MSDVLYPALANRVYGSNHPEGSYKDIKGVEFIDKVIDIDQSPIGRTPRSNPITYVGGFTAIRDIFANLPESKMRGYRPGRFSFNVRGGRCENCEGGGTIKIEMNFLPDVYITCDVCQGRRFNRETLEIRYKGKNIAEVLDMTIEEAAEFFAPIPQVARKMQTLLSVGLGYIKLGQSALTLSGGEAQRVKLALELSRRSTGSTLYILDEPTTGLHFADVKQLMDVIQRLADQGNTVIMIEHNLDVLLQADFIIDLGPEGGDKGGQVVATGTPEQVAACAASYTGQYISEMLEHQPSSQSEGSLLAREKHSISSRKRGK

SEQ ID NO: 90716 - protein, 316 aa, Unknown
  Obtained from environmental sample
  misc_feature (1)..(316): Xaa is any amino acid
AASQELNALGKAQAYQLADITKTPPQFGSLTPRWLTRFLEFKGLASGIYRVNRVKEGDTPLDALCSSEKKSLEIPQGYVDYEKKPREYVLNSISTIINVDTAVEDVYSSPYDQTKEQLQLAIESLKERQESQIINNDDYGLLKNAVKSQIIKPRKGAPTPDDLDELLTKVWKEPSFFLAHPRAIAAFARECTRRGVPPVTVNNFGGVFITWRGIPIIPTDKLFVDGLKNPKSQSGKTNILLVRTGEAKRGVIGLFQGGLSPDQAMSRGLSVRFRGVDDKGLASYLLSMYCSAAVLADDALAVLEDVEVGEYHEYNR

SEQ ID NO: 90717 - protein, 479 aa, Unknown
  Obtained from environmental sample
  DOMAIN (134)...(370): Beta-eliminating lyase
  misc_feature (1)..(479): Xaa is any amino acid
MNTTANAYGLPDPEELEAWAQPYFSEYGAEEAGRPPNAVSGVSPSAAPSVGYSPVVQPYTGADAGATAGRAVGAGFDVNRIRADFPILNERLSNGKKLIWLDNGATTQKPRQVIDRLSYFYEHENSNVHRGAHELAARSTDAYEAARNTVAKFLGAPSKDNIVFVRGTTEGINLVAHSYVRPLLGPGDEIVLTILEHHANIVPWQLIAQETGAVIKVAPVDSDGQIILPEYTRLFGPRTRFASVTHVSNALGTITPVHEMVQIAHGFGVRILVDGAQSVAHTPINVTALDADFFVFSGHKIFAPTGIGAVYGKTDALNEAAPYQGGGNMIRDVTFERTVYNPPPSKFEAGTGSIADAVGLGAALDYVSQIGLPNISAYEHELLDYATCELCGIKGLRFIGTAKEKASVLSFVLEGATTEQVGKHLADRGIAVRAGHHCAQPILRHYGLESTVRPTLAFYNTAGEVDELVRAVREIAPKF

SEQ ID NO: 90718 - protein, 137 aa, Unknown
  Obtained from environmental sample
  misc_feature (1)..(137): Xaa is any amino acid
MQQIISEVERVVAQMLGDVETKGEMPKQPVKSVIVHTIERLQHILFPGVFESGNIHGASYKSRLSVMLEEVANDLAAQIALALRYDAQYVNNHQEDVEKTALDLTCRFISKIPAVKEVLETDIEAVYNGDPAAYARR

SEQ ID NO: 90719 - protein, 505 aa, Unknown
  Obtained from environmental sample
  DOMAIN (2)...(370): Glycosyl hydrolase family 57
  misc_feature (1)..(505): Xaa is any amino acid
MMEENWLYEAMTETYIPLLAYFDNLLSDAVHFRVTMVLTPTLCAMLSDDLLRNRYAAHIGRLIELADKEVKRTRHDAAMNRAARMYLERFLLCQYIFEDKYDRDLIAGFRKLQDAGVLEIMTCAATHGYLPNMQSNANAVRAQVEVAVRSYHGFFGRRPRGIWLPECGYYRGLESILHGCGLRYLFTETHGLLDADPRPPNGVYAPVRCKDAPVAAFARDAECSRSVWSADEGYPGDPHYRDFHKDIGHDLDMRYIAPYIDPAGIRIHTGIKYHRVTDKRNPNKLLYEREDALRRASVHASDFLKKRAEQIGKIADGMNRPPIAAAPYDAELFGHWWFEGPEWLNFLIRKCAAEQDAFTMTTPSEYLERHPESHTCAPAFSSWGDGGYSQVWLNETNEWIYPHLHRMEDKMVDCAREFRLVGCGLEQRALNQMARELLLAQSSDWAFIMKTGTTVEYATRRVKEHIASFLKLYDQVKGRSIDEAFVALLESHNNIFPWIDFRVYC

SEQ ID NO: 90720 - protein, 493 aa, Unknown
  Obtained from environmental sample
  misc_feature (1)..(493): Xaa is any amino acid
MSVIRMDNIRVKSVLLDHPGISAHISKNGRANWNVMKPKEAKAPPDEVPSEISPGETAPDKDASPLRIALNRFEIRNADISFQDDSRRMTAEANGLNFFLQGDMTLDNVDLDLKLDIADVNFRMNNVNMLAKARLGLVSKVAADIKNMEFTLKENRFNLNEIILRFTGSAGIHEDINVDMIFEAEKTDFKSVLGLVPAVYMKNFETITTTGNFTLSGYIKGAYNDKQMPNSGVNLTIDNAMFKYPALPKSVNNINIKANAYYDGSVFDRTTLDVDRLHFEMAGNPFDAEVHVKTPSSDMQVAAKFLGKIDFNSILDVIPLDDIALKGLLECDFALAGRMSSLENKQYEDFDAKGTLILTGVEFKNPSLPQIVKIAKTQLNLAPRRVEMTNFDALIGNSDISLNGALENFIPFVLKGAVVSGSLNLKSNNIDLNEFMSSENKDEKPKETTEKPEDSSPMSVIEVPNNIDFAVKVDIGRLLFDKLNITGVTGALL

SEQ ID NO: 90721 - protein, 467 aa, Unknown
  Obtained from environmental sample
  misc_feature (1)..(467): Xaa is any amino acid
MLNFTPKRVEMTNFDAFMGNSDISLNGSLENFIPYVLKGAVINGNLNLKSNNIDLNEFMKPKDSAEKPAEKPDEKPEKEHSSRSVIEVPKNIDFSVKVDIGKLLFDKLNIANVAGALLVRDGKLQMQNLSMNMLEGSAALSGEYNTRNIKEPSVNFNANLSQIDAASAIASFDILQKILPYPRNYAGKVSSTLTLSGILDEHLSPVLDTVASQGRLQTHNLKIQNSELFSTMANLLKNESLRAPTLNNINISYEIKDGRMTIEPVKMNIAQASLELTGSQGLDMSLDYKVNTAVPVSTIGSGAADILGKIPGGSRIREIKVTGLISGTVTKPVVSLDVADMAGNVVETVKETVKEIVKEQVQAVKEQAKEEIDKQISAIMADAEKQAQNIRNTAKQAADKVRNEAEASAIKLEDAAKSPLEKVAAKAAANKLRDEGKANAAKLEQEAERQVTAIIDNAKKKADELRK

SEQ ID NO: 90722 - protein, 278 aa, Unknown
  Obtained from environmental sample
  DOMAIN (1)...(256): HMGL-like
  misc_feature (1)..(278): Xaa is any amino acid
KVEMAKMLEKLNVDIIEAGFAISSPGDFAAVEAIARAVKKPAVASLCRAVEKDIDAGWDALKDAKHPRLHIFLATSPIHMKYKLNMQPDEVLKRAVRAVRYARAKGKNVDVEFSAEDASRSDRDFLVKIFSAVIDAGAGTINVPDTNGYAMPREFGALIAYLQKNIPNIGRAEISVHNHNDLGLAVATSLAAIENGATQCEATINGIGERAGNCSLEELVMALKVRQDYYGKAKQTRINTKYIYPASRLLTGITGVQVQPNKAVVGANAFAHESGVHQ

SEQ ID NO: 90723 - protein, 118 aa, Unknown
  Obtained from environmental sample
  misc_feature (1)..(118): Xaa is any amino acid
MINNIFIFEDDRYVNFLPLTYMRPVYDLICGISPLIAKIARLFPEANISLHCREYLKHSVKQNHAGIGVNHLNTGLGCLIINGRLLAGEKIRDNLILDGRDRLFVNEEDEVIAGYLNT

SEQ ID NO: 90724 - protein, 627 aa, Unknown
  Obtained from environmental sample
  DOMAIN (474)...(627): Transketolase, pyridine binding domain
  misc_feature (1)..(627): Xaa is any amino acid
MPKSILVHPEEVRKPNILKLKDIPVNQYKSDFKKESGLYGTQRLVRIWHDMVVIREFESMLNTFKTQGAWNGIEYHHKGPAHLSMGQEASSVGQCVNLDTDDYIFGSHRSHGEILAKCFSAIWQFSQNAEGEKRLEAIMKNFLDGETLGIAEKIPYNGLRDLAENFVLYGTLGEIFARKAGFNRGLGGSMHAFFTPFGSMPNNAIVGGSADIAAGSALYKRINHKPGIVIANIGDASMGCGPVWEAMMLSAMDQFHTLWPESAGGAPPILFNFFNNFYGMGGQTSGETMGYGFMARVGAGVNSDNMHSERVDGYNPLAVAEAVARKKTILLEGRGPVLLDTITYRISGHSPSDASSYRTPEEVKFWQEADSIEEYGAYLIQNRAATKSELDSLREGIKAKLIEVVKLATNDEASPRVSGAFIESVMFSNGKAEKLDEREPEIIQSVAENPRVKALAGKVRYGFDAEGKPVSKNKAFQYRDALFEAVLHRFTIDPTMAAWGEENRDWGGAFAVYRGLTDLLPYHRLFNSPISEGAVVGAGVGYALSGGRALVELMYCDFLGRAGDEIFNQASKWQSMSAGLLKMPLVVRVSVGNKYGAQHSQDWSALTAHIPGLKSYFPATPYDAKGM

SEQ ID NO: 90725 - protein, 433 aa, Unknown
  Obtained from environmental sample
  DOMAIN (216)...(401): ATPase family associated with various cellular activities (AAA)
  misc_feature (1)..(433): Xaa is any amino acid
VSDSLRKYNEFRPEKLDNLTMSKFFVTLEKILDERGNSELTYDTMKMEIKDLIDQNMQLLFCRKIMSYNLYDDDLILLVCFCHFSGNNDDDNIGTHDIKFLFDDTSTYYEVKRQLTRGAHSLINGKFIEFTNNNGFVNSDSWKLSDMAKKELLSELMERPNYQKDLILFDKIKPKKMFYNAKEAEAIKKLNSLLQEENYSKIQDRLEGKGMRKGFACLFTGAPGTGKTETAWQIARETKRNVMMVDIAETKSMWYGESEKKIKEVFDTYRTAVDNSEIAPILLFNEADAVIGKRKEIGSSNHSIDQTENTIQNIILQEMENLSGIMIATTNLTQNMDSAFERRFLYKITFDKPSVESRKGIWNSMLPDLPNDKAEELSKKFELSGGQIENIARKIEVDAIINGSELCMDTLVQYCKDELQNSLSTGRRIGFGE

SEQ ID NO: 90726 - protein, 276 aa, Unknown
  Obtained from environmental sample
  DOMAIN (40)...(237): ABC transporter
  misc_feature (1)..(276): Xaa is any amino acid
MNRTSYGEVFLNAKSLRREFGYGENKTVAVNDVNFEFHRGEIVSIVGESGSGKTTIAKMVLGLLKPTAGEIDYEGKPRDISTYAKRRQYWQNIQAIFQDPFSTYNIFNRVDSVLLDCIRLQAGQDGLKSISKEERFEKMREACQFVNLKFEELSNKYPFELSGGQMQRLMIARIFMLKPKLLIADEPTSMIDACSRATILEMLLKLREEINMTIVFITHDMGLAYYISDTIYIMEKGIIVERGTADEAILNPKSDYTKRLLSDVPKIYQPWDFSVK

SEQ ID NO: 90727 - protein, 989 aa, Unknown
  Obtained from environmental sample
  DOMAIN (724)...(886): Alpha-2-macroglobulin family N-terminal region
  misc_feature (1)..(989): Xaa is any amino acid
VRSDANPRTEEGDTIPISLNFSHAVDPDSSPSLFSVQGMPALTKDNIHFYGSTVVINRLPLEYEKNYQVNVSGNLKDVYGRSLGQNQTVLAKVGQANSYVYHLNYGPRMLEAGFPPLVVWESVNPLFIFSSIAAASGPYEHPPLKNLPERDISNYQKNKKNFIVEDLSPFLGPGGKGSVAMAWEYETRSQWNNRIIQDSRWLTVQVTDIGITTRYAYNKVLVWATKLSTGAPIANARVELLEGNTVVRQGTTNAQGLAVFEFRDGEFVSRFTDLSPSYGVSDWSKGFRIRVIQDGGAMAGGDQAEFVPNNSHNIWRFPVESAVSPFNAESDRALVFMFTDRGLYRPGETVTFRGIDRNLSRGRFFPYEGNYSIEVSTGGRNAPVIASLGGKTTGSGGSHGSFAIPANLDPGRYVMRYKRLEGGGQDYSITFLVANFERLRVEASLKFPDLTYYQGEKISGRLSASYLSGGGLSGAPYTYYWSREPAGFNPNGGTASDGSWRYWRFGPETYDGRYFAASGEGTLGPDGSADIAHNVGVDGVEGIAYRYRLEASVQDAARQEISVRSAAIVHPASFYIGSRLDTGTLKAVDSASEKSSSYFLSSGSPATVSWALLTPEGTPFEQSSDNRDAPEINFKLIRYEWKQSRQAGIGGRINLSWERVEETVMERSFRPGRREHSGVIPFTPSNSGEYQVRLSSKDSQGRSVQTRYSFYVTGAGWARWGRGDSDSITLRPDKSSYAPGETAKLLVQSPLPKGKYLLTLEREGILEERIIDLDGSALTIDVPIKESYIPIVYVAIASYTVRSGPPTHTYYEPDLDKPKGLFGLTSLYVDNDNRHYNIEIEPSKNVYKPAEQAEVTLKVSQNGKPAAGVEVTFMAVDRGVVDLIDYHVPDPLAFFYNPGNFPLGVRGADSRSLLIDPVTYNLSDLQGGDEEDYSKMEERKDFRPTAVFEPYLVTGADGTVKVKFNLPDSLTTYRCTAVASGTSDFGIAE

SEQ ID NO: 90728 - protein, 388 aa, Unknown
  Obtained from environmental sample
  misc_feature (1)..(388): Xaa is any amino acid
MSKEQITKLRYASLSLLFVTCYLLFVLPSLPASPLHSTTWGFRLDLPEGYEYVEGNNQDRYSFQGPNKAMFDLVVYNGTYQDVEQMANDIKRRLGSSGETALFEYEGKTAALLDLHFRDFSGWGLCMELAKNAAGSKTPFLCALAYSPSSGADMDLFHISALDSIAPSDLEARRPGPVMEFGYPRGETVETPIKGTTISALLRENDAEAAQALVDREFALLRHYEKAPNWQQAWIRFYRAIYRDAWDRVAAAAFRLEREWNSDQGLDNRAFAEKALAFVQGFTYDRDLEGSDFVNLVTAISEGRGDCDSRAMLWAMILDQADIPAAMMVSRSHSHAMGLADIPGGGARFESGGKKWLVAETTDKVGIGLISAGMSDIESWLGVIFNIP

SEQ ID NO: 90729 - protein, 1059 aa, Unknown
  Obtained from environmental sample
  DOMAIN (192)...(274): Cache domain
  misc_feature (1)..(1059): Xaa is any amino acid
MRDVIAMRNFVIVMASIAAAAAVVILFLVLNSAVRSIINNAKKYRAIFSYTIVLVVILAFALMVVLSSAFMTNIVSRQLENNALAALDYLETNITVDLREPRTLLGGASETVRKMILHGASEKEVHTYLNEITAFLLSDEEQLADFDGLFGYFNVFGGALLDGQDRAPPENYNPLERPWYKEAVAAGGEITFIQPHLSVMSAKPMIIIAYGRALYDDDGNLLGVVALNMNFERVKGYIVQANLGKVWFGILLNEQFDFIFHREAGLEGTNFADVNSDTANLVAMLKSGNDYVYEFMMINYQNIPSIAFVRKLENGWYLGIITPKDGYFTEVKRVRLILILIGTVLSAIFSVILVHMISERRKADAKINEAEKAIMANRVKSDFLAKMSHEIRSPMNVILGITEMQLEKKDLPPETLVALGKMRNSGHLLLNIINDILDLSKIESGKMELVTTNYDIPSLINDTVQFNVIRFDSKPIQFILNIDENIPVNLYGDPLRIKQILNNLLSNAFKYTDMGEVELSFSAEVSGTGKSVMLIINVSDTGHGMTQEQIDKLFDDYTRFNIDPKRQIQGTGLGMSVTKRFIEMMKGEITVKSEPGKGTTFNIRIPQGYIDSDVLGKEGTDNLQQLCAGREAREKTAEFVREYMPYGKVLVVDDMEPNLYVTNMVLAPYGLTISTAKSGQEAIDKVKSGMVFDIIFMDHYMPEMDGAEATKIIRGLGYKHPIVALTANALAGQAKIFMENGFSGFLTKPIDTRQLNATLNKFVRDKYPVKVVEAARKMKKPDDDEDEEEDLPDLSQLKALIVDDFKPNLNGEAAMLKEYKMQADCLLSGQEAVDRIKSGEPKYDIVFMDLMMPGMDGIEATKAIRSLGTEYADTVPIIALTAMPDDDATGKEKALLDSGFQKVMYKPFTLETVDTFIKDWMSDKIKNCTIPPEKKEKSMEVDIPQVDNERIKKIYGKKFNIYLDVLRSYLDVVPKSLEEMSHVTKETLTAYVTSVHGVKSVSDFIGAEEARKMALELEMQGRAGDLSGVLAKNDTFIQYAKELIVNVEKYLAKIDVPVT

SEQ ID NO: 90730 - protein, 393 aa, Unknown
  Obtained from environmental sample
  DOMAIN (50)...(115): His Kinase A (phosphoacceptor) domain
  misc_feature (1)..(393): Xaa is any amino acid
DARPGKKTVILKSTKTPLIQDDKVIGLLGISSDITEHRDAINAANEASRAKSAFLARMSHEIRTPMNAIIGMTELALREEEVSSVHRHIRTVKQAGAHLLSLINDILDFSKIEVGKLEIFEDEYMVSSLVNDVISIIRMRVADTNIRFVVNIDSNIPNLLFGDETRIRQVLLNILNNAVKYTERGFVSFTAQSEVIDEKRINLVMEVMDSGKGIKQEDVNKLFGEYMQVDQNKNKGIEGVGLGLAITWNIVKAMGGDIKVYSEYGKGSIFTVRIPQIVSSPEPLASVKDPGKIKVIVYERREIFANSIAFTIDNLGVDCTLVTSNSELHGELSAKEYNFIFISFSLYESNKSTIMKLGKQAKVVLLAEFGESAYDKKLSVIAMPVYSISSRIY

SEQ ID NO: 90731 - protein, 97 aa, Unknown
  Obtained from environmental sample
  misc_feature (1)..(97): Xaa is any amino acid
NDVLPDDKVHYQSMYTLMKNPFDDLLFSLPSWYIKKVSGNNDGFVSEYSARWDNNTIKIAEGISHGEIHDLKMRKIAGINIPDIYKGIVNGLSERGF

SEQ ID NO: 90732 - protein, 413 aa, Unknown
  Obtained from environmental sample
  DOMAIN (215)...(313): 5'-3' exonuclease, C-terminal SAM fold
  misc_feature (1)..(413): Xaa is any amino acid
MPKNPLYLIDAYGLIYRSYFAFMSFPLKNNAGKNVSALFGFARTLISLLNDGAPVLGENGKSAPADGYLKETPKLLAAVFDSRTPTFRHKMYSEYKATRQKAPDDLHAQVPLVEEFLAALNIPSLRADGFEADDIIATLAKKCQEEKRQCYILSSDKDLLQLVGGGTFELRPAKNQKNAASGRAPSSAATPGAQNTTGPAWEIIGPAEVKAEWGVPPEKVLDLLSLVGDSSDNVPGVKGIGEKTAVEYITRYGSLDGIYKNIAGLGGSRGKKVAEGKESAYFSQSLIRLESNVPLPITDIDKLSAENLDRKAAAQVLFREGIRQSAKQLDPNISVAAASGAPKTQAEGQQANIGAVYSADKSLFGNGVYKIIKDIAELITILDEAKNKSSSPLILRPIRWTRGIPGLIASRWR

SEQ ID NO: 90733 - protein, 522 aa, Unknown
  Obtained from environmental sample
  DOMAIN (355)...(521): DNA polymerase family A
  misc_feature (1)..(522): Xaa is any amino acid
IGDKSAVKLITRYGSLDEIYRNIAAIEGSTGKKIAEGKESAYFSQSLIRLRDDVFLPIESIDELSAEELDRSAGAAVLLREGIRQSAKQLDPNVKVPAAQNIQNAETQKETPDSELKNEIKFEKLAASSPDHNLLGDGVYKTILDINELKSVLEQAKKQQIFAMDFETDSLDAWNSHPIGISLAVKPKEAYYVPVAPHGRETVSAFNEPEKVRALLAELLADEKITVVAHNAKFDYKVSRGWGIDRWNCKIWDTMVAAWVADPERNNYSLDSLAEYTFDYTPVKYHDIVPKGRSFDAVPLETAARYSAEDADLCMRMLRHLEPLLEKNGATGLFENLEMPLLPVLAEMEGVGIMIEPEILASYGKELEVELENLQREAWKMAGHEFNLLSTKQLQDVLFNERKLKPGKKLKTGYSTDAATLEELAREDPLPALILRHRTLAKLKSTYVDTLAGMADGERRLHTNFDQCGTATGRLSSREPNLQNIPIRAEEGRRIREAFIAGPGCLLLSGGLQPDRTCGFGP

SEQ ID NO: 90734 - protein, 285 aa, Unknown
  Obtained from environmental sample
  misc_feature (1)..(285): Xaa is any amino acid
KKDALMGLIKAAVGAAGGVLADQWLEFFVCESMEADVLAAKGQKRTSKRSSNTKGEDNVISNGSGVVVNKGQAAMIVDNGRIAEFCAEEGRYTYDQSSESSVFHGGLGKGIIGAIKSMGDRFKYGGSPGKDQRVYYFNTKEIIGNKYGTPSPIPYLVVDPNISLRLTISLRANGEYSYRMVNPALFYANVCGNIEGHYTRDKIDSQLKSEIITVLGPALAKLGTGLEYHEITFQTDKLAEILNEALSAKWREGRGLEIANFGITCTASPEDDKRIKDLQTSAVMR

SEQ ID NO: 90735 - protein, 148 aa, Unknown
  Obtained from environmental sample
  misc_feature (1)..(148): Xaa is any amino acid
MVTIDEYKCPNCAGAVKFDSSVQKMKCPYCDAEFETSVIAEYQKNAAAEAQTADSFKWTDDAVNAWKEDELDGLSTGSCPSCGAELVGDQNTVAMVCPCCGNAQIVSKRLVGLMKPNYVIPFKLDKKAAVAALKDFCKDKRLLPDFLS

SEQ ID NO: 90736 - protein, 512 aa, Unknown
  Obtained from environmental sample
  DOMAIN (237)...(512): Methyl-accepting chemotaxis protein (MCP) signaling domain
  misc_feature (1)..(512): Xaa is any amino acid
VYEGTGLAAVYSDNSTIVAHWDSSRIKDTLQNNAAERALFGSDTDPIVESILNGGGKNRDPYVTTHYSPVKKTDVYFIFEPILVSGFEITPWSLQLGLPVPEITKPIRALVSYSIMFAVGLLVLAAVITLFVATGIVRPITKVTATLRDISEGEGDLTRTIAVSSKDEIGDLAIYFNKTLEKIKDLVLLIKKQSHVLSDIGNDLSSNMTETAAAINQITSNIQSIKGRVINQSASVTETNATMEQVIANINKLNGHIERMASNVGAVTKTLLNNADNVKTLLEASEVGKTGLAEVVTDIQEIARESEGLLEINSVMENIASQTNLLSMNAAIEAAHAGEAGKGFAVVADEIRKLAESSSEQSKTIGNVLKKIKESIDKITKSTETVTTRFESIDTGVKTVAEQEENILNAMEEQHKEHEEEAASRQTGNISLAEISRVVKTGSEEMLEGSQEVLKESQNLEKVTQEITGGMNEMASGADQINLAVNNVNDMTSKNRDAINSLIKEVERFKVE

SEQ ID NO: 90737 - protein, 339 aa, Unknown
  Obtained from environmental sample
  DOMAIN (148)...(335): Ferrous iron transport protein B
  misc_feature (1)..(339): Xaa is any amino acid
MIFALAGNQNCGKTTLFNQLTGSNQHVGNFPGVTVDRKSGEIIGYKDVSIVDLPGIYSLSPYTSEEIITRDFLLKQKPDGIINIIDATNIERNLYLTMQLIELQIPMVLALNMMDEVQANNGSIDIHHMREVLGIPVVPISAVKKSGLAELMEQAVETVRNQKKPERIDFCSGAVHRAIHATIHLIEDHAQMKGIPMRFAATRLVEGDEQMLKILSLDKNEAETIEHAVKEMETEMDTDREAALADMRYQFIEDVCSKCVVKAHESREYRRSVTLDSILTHKFFAFPAFLGIMLLVFALTFGVIGNRLSDLLVSGVDFLSGVVDKGLTAYGINPVVHSL

SEQ ID NO: 90738 - protein, 352 aa, Unknown
  Obtained from environmental sample
  misc_feature (1)..(352): Xaa is any amino acid
EFFVCESLDADVLAAKGQRRTGKRGSNTRGEDNVISNGSGIVVNKGQAVLIVDNGRIAELCAEEGQYTYDQSSEPSIFYGGLGKGIVAAFKNIGERFKYGGSPGKDQRIYYFNTKEIMGNKYGTPAPIPYLIVDPNINLRLTISLRANGEYSYHIMNPLAFYANVTGNVEDTFTRDKIDSQLKSEIITVLGPSLAKLGAGLEYHMISAQTDKLAEILNEALTAKWREGRGIEIVNFGITCTATEEDETAAQAVADSGGNARPHNGCRVAGERAERRYAYCRREHQRRDGGLHGHGHGKHGRRHELPEPVCDGSGAAGKRAAGCGAANCGRGSCRSRQLGLFLRTRGKRRQVL

SEQ ID NO: 90739 - protein, 336 aa, Unknown
  Obtained from environmental sample
  DOMAIN (51)...(74): Domain of unknown function (DUF1610)
  misc_feature (1)..(336): Xaa is any amino acid
MKCPYCGAEFEIAALEEYQKQLQVPEESINWDGKDTAWDENELEELSTGSCPSCGAELLGDKNTASMVCPNCGNSQIVLKRLTGLLKPEYIIPFKLDKKAAVEALKNFYKGKRLLPDCFKEENRVNSIQGVYLPFWLFDANARGHVRYKASKTKIWSDSNYRYTKTDFYSVVRDGSMQFEKIPVDGSERMDDSYMDAIEPFDYTQLKDFQTAFLSGYLTEKYDVDAEKSKERAVQRIKSTVETEFAKSVTGYGSVSAESSAIGVENGKVSYSLFPVWILNTKYNKENYLFLMNGQSGRLVGRLPADSGKSWKYRLLFTGILGAVFTIVIQALRIFL

SEQ ID NO: 90740 - protein, 270 aa, Unknown
  Obtained from environmental sample
  DOMAIN (2)...(270): Beta-galactosidase
  misc_feature (1)..(270): Xaa is any amino acid
YRFEWLDEIMDMLAENGMAAVLATPSGSRPAWMTQKYPEVLRVNRYRQKNLYGERHNHCMSSPVYREKTTAINTRLAERYKEHPALAVWHISNEYSGECHCPLCQENFRSYLKKRFGNLDALNEAWWNSFWSHTYTDWSQVESPGPLGEINVHGLNLEWKRFCTDQIIDFYLNETAPLKKITPNIPCTTNLMSGSSGVDNFRLARVLDVDAWDSYPEWTGTEKDIETGVLFSFYHDINRSAKDKPFMMIESCPTATSWRPVAKLCRPGVH

SEQ ID NO: 90741 - protein, 155 aa, Unknown
  Obtained from environmental sample
  DOMAIN (16)...(152): NPCBM domain
  misc_feature (1)..(155): Xaa is any amino acid
WLCFPLFAPEEVNIELPENAEWLGKPTNFRQEWGSLQIDKSVTGKPLTIAKKRYKKGIGTHASGFLSWELNGEYEKLTAVLGLDEDEFCSNGVQIKIIGDGNLLADTGKLGQGQEYPLDISLKGINQLTFETDGLGDIGCDHVDIAAAMLFKPIP

SEQ ID NO: 90742 - protein, 342 aa, Unknown
  Obtained from environmental sample
  DOMAIN (138)...(339): Binding-protein-dependent transport system inner membrane component
  misc_feature (1)..(342): Xaa is any amino acid
MTELAKQRLAKFRHNKLAWFSFVILAVAYLLSLTSPWLVNDKPLLLKYNGKFYSPALFHYGQSEFYGSYATEPNYKELVFYAKENSVPFFAIFPPIPWSPIKSQLSAEGAPPYAPSSAHWLGTDAHGRDVLSRLIHGFRICMSFSLLLSLIGTFMGIVIGGIQGYFGGKLDIVFQRLIEIWAALPFLYVVILLGSIYGQGFWLLAVIMAAFSWIGLSYYMRAEFFKIKNMQFVKAATVLGMGHVRIFFKEILPNALTPVITLFPFSIIGGISGLTSLDFLGFGLQAPTPSWGDLLSQGLANLYAPWITIFTILALFITLMLASFIGEGIRDAFDPKSGDRFE

SEQ ID NO: 90743 - protein, 361 aa, Unknown
  Obtained from environmental sample
  DOMAIN (13)...(235): Queuosine biosynthesis protein
  misc_feature (1)..(361): Xaa is any amino acid
MVSMFSNLAKLTYNLQDYDFVFPNELVAQKTAGKGKTKILCCPKNGGALHILESSRITALFKAGDCIVVNNTRVIPARLLGKTKHGGKTEIFLLKQLEPAADNTAMWEAWVKPGKAFENGKEIFVSNIKCKSLGFAKAENSKTRIINFSISNSEFNSFLEKNGQVPLPPYINRSACTSDKSDYQTIFAKYSGAVAAPTASLHFSEDMADELKSKGVFFAETTLHVGPGTFENIKETSDFRQHRMHSEEYELNEQNANMINECKKNGGRIICIGTTSTRVLETVANEEGFVKAASGMTDIFIYPGFKFKATDALLTNFHWPKSSLILLVSAFYGRENTLQAYKYAVENSLKLFSYGDGMLVI

SEQ ID NO: 90744 - protein, 238 aa, Unknown
  Obtained from environmental sample
  DOMAIN (1)...(87): SRP54-type protein, helical bundle domain
  misc_feature (1)..(238): Xaa is any amino acid
MFDALTESLESTLKSLRGQGRLTEENVSASLREVRRAFLAADVNFNVTRDFVQAVKEKALGQNVLTAVSPGQMIVKIIHDELVEIMGGKAKEVSLAGKPPVGIMMAGLQGSGKTTFAGKLALYFRSKKKRKPLLVAADVYRPAAIKQLQVLGKSIGVPVYEEGQGNPVEIIKNGCKYAEQNGFDLVIYDTAGRLQIDETLMQELEQARNAVRPEEIFFVADAMIGQEAGECCRGIFKR

SEQ ID NO: 90745 - protein, 252 aa, Unknown
  Obtained from environmental sample
  misc_feature (1)..(252): Xaa is any amino acid
MSIIDENIDDVFHRIQVRLFPNYFPITEGRYIARTDNEACLSVERICAAMRNRGGFLGDYEYLTETIKQFLDECTYLLCDGFSLDLGYFSVHPGVGGTFNSEKDARNPRRNPVNFKYRTRPPLRNLARHISVEITGVAESNAFIDEFIDHDEDSVNGIFAPGDMFCVYGNKIKLAGDDPSCGLFFVPVNDPSKAVKVTRIGENSSSIVTGIAPDTQYQNNRIEIRTQYSGSDASFLETPRSIVSDFVLDKVN

SEQ ID NO: 90746 - protein, 269 aa, Unknown
  Obtained from environmental sample
  misc_feature (1)..(269): Xaa is any amino acid
MNVPVGIAILLWGRGLRGAVDEDGAREAGAGHKLDFFGCVLLGIGMLALLMPLTLHARWGLASAPTLSLFAISVVSFLAFFAREKRAPEPLLDIGMLRQNPLFAYGNLAALLNYMGIFAVGMLTSVWLQLAQGLSAATAGWIMLGQPLVQALLSPVAGRLSDHFGTKIFTTSGMFLTALGMALLGCLTKESGFAAIIASLSVVGVGMASFSAPNTSSVMGSVRRDSLSFAGAVLGTTRVMGMTMSVAILGGLAASHLGQGGWQDLLQFG

SEQ ID NO: 90747 - protein, 160 aa, Unknown
  Obtained from environmental sample
  DOMAIN (58)...(160): Domain of unknown function DUF143
  misc_feature (1)..(160): Xaa is any amino acid
VTTVKKTAKKKAAGKTGKVGKVGKIKTDKTDKTDMANTADTADKGAKSGKGGGVLAGQELVDAIVSVLEDKLAERIAVIDLRKVSAAADWFVVCSGDNTSHTTAVANEVIGALKQRYKTAPWHYEGVEDGRWALIDYTDVVVHVMLEDVRKYYDLESLWS

SEQ ID NO: 90748 - protein, 411 aa, Unknown
  Obtained from environmental sample
  DOMAIN (3)...(396): Sodium:dicarboxylate symporter family
  misc_feature (1)..(411): Xaa is any amino acid
MKVWIKLLIGAILGIILGHFLPDNQRVMDSLIWLEQFVLSIGRYAIIPVLVFSLAISIYELRQDGQFWPLVIKNLLLIAGISMLVIGIGVLATLAFSPGRIPVMAEEQLDVIRLDVAQNIKELFPYNMFSVLTGEGVYLFPVYVFAFFFGMGLSYDKSYSKPIISITDSLSRIFLHISSFIIEILGFIMIVLSAYWMIRFKGVLQAGIFFDLICLLWIIAIVLGFGILPLFLYFIRPKVNPWAVLYGSLGPAIAAFFSGDINFTLPVLIQHTKENFGVRRRSNVVSMALFSSFCRAGSAMVAAVAFIFIFKSYSRLGISFSEIMSIGVRAFLISFLLARHPGDGAYMALTVLCIGYGQGFEAGCLILKPMAFFLIAVGTFLDVMIASFAAYAIARLNGHIEKTSIKRAVSS

SEQ ID NO: 90749 - protein, 562 aa, Unknown
  Obtained from environmental sample
  DOMAIN (364)...(544): Protein export membrane protein
  misc_feature (1)..(562): Xaa is any amino acid
LFLWPTLRWYFLIPKDKQAQALESRQQIKTYASQSAQADLQRLFDAARVNGPVPEGLEFITAKAKKLYKSNKLPVPETMDAKAALEAFSGRREALDTIESKYRDEIFGLKDLQKNAVKLGLDLSGGLSIVLQANLDMLQEKLGRSLTEDDRVDAMNRSLEVLNSRIDRFGLTEPVIRRQGSDQIYIEIPGTADPERINDIIMGKGSLTFNLEDSEATVAFNNYYRQNPTTTFDAGGNLINPSIVPSDVMILGYYTKDKYGLDEQVRNADGSLMYIAAKKEVGLDGNHIQEAVVERNNMDGKPEVTFRLDAEGGEIFYRLTSANVEKMLTIVLDDKVRSRATITTSIRDAVRISGFGADEANNLALLLRTAALPVELEVASQQSIGASMGEDTIKQGLYALLLGVALVLVFMLVYYKTAGINAVVAQILNFYIMFSILSALNFTLTLPAIAGFILTIGMAVDASVIIFERMKEEMRLGKSRKAVIDAGFDKAFWAIMDGNITTFIAALFLSQLGSGPIKGFAVSLSIGVFSSVFTALFVSRLIFDFSTDVFNPKDLSVSWTIR

SEQ ID NO: 90750 - protein, 259 aa, Unknown
  Obtained from environmental sample
  DOMAIN (6)...(174): short chain dehydrogenase
  misc_feature (1)..(259): Xaa is any amino acid
MRLAGKTALISGAAQGLGAAMACRFAEEGAFVFIGDMKTEVGNQVVEKIRGKGGKAFFLTLDVTNEQNWIDAMAAIQTQAGRLDILVNNAGINIREPIEVMKAENFDTMLAVNVKGPFLGTKHAIPILRKGGGGSIINMSSVCGLVGHAFTTEAYTVTKGAITLLTKSIAVRYAKDNIRCNSIHPSTVNTPLIQELFKDPEKKQQRYGEVPLGRLATDDDVANAALFLASDEAAFLNGCSTAGGWWNYCGLSLSQNISH

SEQ ID NO: 90751 - protein, 562 aa, Unknown
  Obtained from environmental sample
  misc_feature (1)..(562): Xaa is any amino acid
MHYKNFITVTYAPAGYLNDNSLEQIKADIEKVSNYIKLDKIYLETYRSEILIERKKMEAVKVLFTEKGYAVSGGITTTVKRTLMGSMCFTDPENRKRLGEIAAYTAELFDEIILDDFYFTNCRCESCIKAKGDRDWATFRLALMNDISENVIIKKAKAANPKVNCIIKYPNWYDSFQANGYNLEDESKMFDMIYTGTETRDPHYTHQNLPRYLSFFLPRLLEHIKPGKNGGGWYDLFDCSLEDYVQQAYLTLFAKCREQMLFCFPLLVNNPVYTAAVGAFYDEADLFIEQLGEPVGVACYKPYHSYGERLLHEFIGMCGVPLDPYPYFPKDAKTVFLTADAAWDKEIVGKIKQSLLNGSKVFITSGLYEKLAGKGIENILPLEVTNRKITTDVFTNSTFGRGNCGYIKAAASITLPHVAYNENDIWPLSAALTPHSSHAMLLCGAYGKGILYVLTIPDSFADLYNLPAETLNLLRREFNLPITLECGSRVSLFPYDNDTFILQSFLDRPERVRVRINRVGVSLVPLKMPKMRPFEIVRSGENESIFDIYITPGHYMAFRIEG

SEQ ID NO: 90752 - protein, 301 aa, Unknown
  Obtained from environmental sample
  misc_feature (1)..(301): Xaa is any amino acid
NSQKAEETSAKLMAMANTLDSRIQSGRQQLAALQAIKARGEQLAALNKYAKFRGTPECYEVLGNENLLLIDENGIPLVLVPSGTGVWLPLNNPERLYMRLTSVDGKGADSLAGFIVEERGGRKKHYNGYGLLTGITELNGDSVEIVRNAEHKITLIKGPHGNEWAVENNWDFISAINGPEKTSVKYGYSGNDLAWVKDQDEDTGSYGYTGGLLNRITKPDGSAIKIDYGYSGSDGSLMVSITTHEEGASEKFDYNPSQKATTYINHSGVITRYWYDGKHRTVREEHSDGSVKTYLYNEMDL

SEQ ID NO: 90753 - protein, 285 aa, Unknown
  Obtained from environmental sample
  DOMAIN (140)...(177): RHS Repeat
  misc_feature (1)..(285): Xaa is any amino acid
GNVIKYTYREDGELIKKTQGLWYWEYGYEAGGRISTATRGKTGTSKKYIENYAYQWQGWNEKRSVTISGAGTMAYIVDPWGQVTAFTNAAGDSSIRTLNGTGNTLREQASSGGFYEYRYDALGRPYQAGREGEPAVQVRYNLDGSIAEKTDRLGKSTQYSYDGRGLLTKETTALGERRFFYDDAGRLIRQDTASRNSVTYRNDWNYNDSRRTVTVTAGGIYSETLYLNAWGEVTRRVDGEGNETKYEYDKAGKLVKSIDGYGRAVSYSYNELGKVAKVIYADSTV

SEQ ID NO: 90754 - protein, 186 aa, Unknown
  Obtained from environmental sample
  misc_feature (1)..(186): Xaa is any amino acid
MLSIRLGAMGANTKYKDSVFSLLFSDPDLLRELYCALEGVALPSDTPVTINTLRNVLFMGRINDISFEIGGKLVILVEHQSTINPNMALRLLIYIARVYEKIIDSKKTYTTKPVRLPRPEFFVLYNGVAPYPDEKTLRLSEAFESAASLGIPEKEIPPLELVARVININQGRNGEIVRRSKTLNGY

SEQ ID NO: 90755 - protein, 224 aa, Unknown
  Obtained from environmental sample
  DOMAIN (17)...(220): Binding-protein-dependent transport system inner membrane component
  misc_feature (1)..(224): Xaa is any amino acid
MLSEKILDVLSMLPAATGQTVYMTFVSTFFACLLGFPLGVYLFATSPAGLTPRRVLYNVLSRIVNLFRSLPFIILMILLIPLTRLIIKTSIGPTAVIIPLSIAAAPFVARVAEAALSEVDQGVLTAARAMGSTNFQIIYKVLIPEAMPALVSGLALTIINLIGYSAMAGAIGGGGLGDLAIRYGYYRFRTEVTIGAVIVIMIMVEAVQVIGTAISRNLCQNDRP

SEQ ID NO: 90756 - protein, 191 aa, Unknown
  Obtained from environmental sample
  DOMAIN (12)...(185): GDSL-like Lipase/Acylhydrolase
  misc_feature (1)..(191): Xaa is any amino acid
CFIDLSREGFDIVMIGDSITYGGDWNLLLNNKKIANLGIGGDSTDGVLNRLEDVYLLNPKACFIMIGINDFSGNKSVETVLTNYRKIVTEIKSHNIRVIIQSVLHLGEKYYLNHIGGKNKKDWRKMNEKVKSLNEKLKIMAVELDVEFVDLNEGLSSNNILSEKYGNEDGIHLSKFGYEKWAEIINPIMYQ

SEQ ID NO: 90757 - protein, 89 aa, Unknown
  Obtained from environmental sample
  DOMAIN (1)...(62): Global regulator protein family
  misc_feature (1)..(89): Xaa is any amino acid
MLILSRRINEKIMIGDDVSISIIEIRGDQVRIGVDAPKTVKVFRQEVFDSIKAENKAAVESKPVLPIVDFGAPQQEKAINITKGPGIGE

SEQ ID NO: 90758 - protein, 578 aa, Unknown
  Obtained from environmental sample
  DOMAIN (280)...(313): Tetratricopeptide repeat
  misc_feature (1)..(578): Xaa is any amino acid
MRVKEDADDIKIISGNNSAAKNAYILLKNNGLSLFVLILIALSLYIRCGVYISVFLTRNTRKKAIRLFKHARRLLRLAGLSARLRAVQRRGNMTIGLSESEWALQLNSIFNGIYPLYQSAAAARFSLNYSEQELKIQTANYRDFRSSYNANVSIWRRIKTWIFPLSLITPGKILTVFILLGLLAGSESQIVTAQDAQTSQDSRSGGEEIISADTLFREASDADYSEHWERAIELYRKGAKTFPNDTRFPWALGNLYYGRSLFNLAWDEYKKAEALNPYDAPVLIRLARTAGYLNRSAESAALYERALEIEPENIEVIGSLGWMYFKIHRLADGEKLLVSAIERFSYNSDLSMTLGTIYSDMYRYDDSKYWYNKSIELGEEYKDNEYTSIAWYNLSILESRFYLYELCMYATDSAIKLYNRASGHLARAELLKHRLKLTEAQRECEIAYETDTSPLSKLRLAHIFQKSGRLEEARLYAQDCLKDSNNSWMLNFGIDPDRYKREIHHTLAKTYSGLLNTERYWVWETPKEKMLSLFRIISYTLKREVNYKLYRKYCLAAANAYAKTFSDNFAASSGAASS

SEQ ID NO: 90759 - protein, 296 aa, Unknown
  Obtained from environmental sample
  misc_feature (1)..(296): Xaa is any amino acid
IRQFITVGFGAEQEKLYKVVLNPSKITDRAGRALTNKKPSSFYVYLPKIKPNAKWDRGYGIVERFGPQQFPITASGVSSLDFRVYKIDPLHTAFGDFPPAQIEVSETTMPPGPGEEPASLDSDYGKTRYGYSYENVKVVKHIRMLGSPHYSGIVDVGGEGGRKISSVDLKPMFAAISGKDKPGTYLVGFRLLDGTQNRYYAKVNVTDLCLSAVESKSKGNKVMFAVTSYSSDKPVADASIRIDGLIDGDMVTLAQGKTGSDGFFSFEHTKATMEKLNNSTVRRVVVSKGDDVLVIN

SEQ ID NO: 90760 - protein, 405 aa, Unknown
  Obtained from environmental sample
  DOMAIN (3)...(234): EAL domain
  misc_feature (1)..(405): Xaa is any amino acid
MHNINIPSDKIIACFQPILSADTKEIYAYEVLGRYVEDDGTVKSLGAFFTDPDTSHEEALRVDRIVRKYAFKKYAEEKRDEYLFINIRLAWLLPYAASPEEMLTLQLVEEFGIAPEKLVIEITEEEFNANEEYIRAIVHYKKIGCRIALDDYGKSASNIDRLAKLQPDIIKINMDYIQNSEKSYHYREYMRSIASFAESVGIEVLYEGIETQRQFDICLSLKGRYYQGFLVARPQPSMREAEVNNAVFSASIENVYTFLQNEIIKAEALRKSLDAEVEHFLAENPLDNAKNDYDAYLTKLCKELSNVRLVFLCDRHGNQLTSNIVQQPEEPASGGSKCLTKYKNKNWVWRGYFYEALKSVAMGQKSYISHTYNDFATKDKVRTYSYAISNEIFLFVDVEEILPML

SEQ ID NO: 90761 - protein, 305 aa, Unknown
  Obtained from environmental sample
  DOMAIN (9)...(225): Ribosomal protein S2
  misc_feature (1)..(305): Xaa is any amino acid
LAVVTMKNLLESGVHFGHQVKRWDPRMKKYIFAERNGIHIIDLQKTIQAIKDAYEAVRRTVASGKTVLFVGTKKQAQQAIQKEAERCGMYFVNNRWLGGMLTNFVTIKRSLLRLKKLEKMEVDGTFENLTKKEVAALGKERAKLQKNLGGIKEMKELPGILFIIDTRMEAIAVAEAQRQGIPIVAVVDTNCNPDGIDYPIPGNDDAIRAITLFTSIIANAVIEADNEVGLKIIETLGDEDEDMESLLTDVSKKEDDQEVDIAAAIEKYSSAETMMEAQKDEIPPEEPEQVDHIQVDEDKIYGEDA

SEQ ID NO: 90762 - protein, 283 aa, Unknown
  Obtained from environmental sample
  misc_feature (1)..(283): Xaa is any amino acid
VTRAGYTFGGWYGNSSFTGTVVGAAGSSYTVSSNTTLFAKWIIKTYTVTYDGNGSSTGVPSAVSNVDSGSAITLPGQGNLARTGYNFGGWNTKADGLGTNYAANGSYTVTGNVTLYARWTTKAYTVTFDGNGATSGIPAAIDANHGDNITLPSITRTGYTFGGWYKNDNTINYAAGSSYTVTDNVIFYAKWTTIPYTVTFDGNGATSGVPVAKDANYGDNITLPSMTRDGYTLGGWYQNSAGTGIGYPAYSSYNVTSNVILYAKWIVIYTLTTAISPPDGGTV

SEQ ID NO: 90763 - protein, 315 aa, Unknown
  Obtained from environmental sample
  DOMAIN (1)...(308): Pyridoxal phosphate biosynthetic protein PdxA
  misc_feature (1)..(315): Xaa is any amino acid
IYELCRPVIIGDAGVMEKTVREVIKREDISVRPVSSVKECLFKRGTIDVYDLRNVELEKLKIGKVDAMSGEAAFTSVKKAIELALAGDIDATITNPLNKEALNLAGHHYAGHTEIYADLTRTKDYSMMLAEENLRVVHVSTHVSLRTACDRVRKDRVLKVIELAHNTCECLGIREPRVAVAGLNPHSGENGLFGSEEIEEIIPAIEAAKGKGIKAEGPIPPDTVFAKAHGGLYDIVVAMYHDQGHIPLKLLGFQYDKSSGKWTAVKGVNITLGLPIIRSSVDHGTAFDNAWKGAANELSLISAIEYGVMLAKHKK

SEQ ID NO: 90764 - protein, 91 aa, Unknown
  Obtained from environmental sample
  misc_feature (1)..(91): Xaa is any amino acid
AKDRAGISNPANIQIDKNDKLYQACLELETFLVKNLLTGMRNTVQKSGLIDEGFAGKIYEDMLYDEYAKDFTKTAGFGLAEQAYRQLKPYM

SEQ ID NO: 90765 - protein, 305 aa, Unknown
  Obtained from environmental sample
  DOMAIN (31)...(305): Initiation factor 2 subunit family
  misc_feature (1)..(305): Xaa is any amino acid
MARLRTIDWENDRVKLIDQTLLPNEVRYIDIVNAESMYEAIQILRVRGAPAIGVAAAFGLYLGVRDFNGGAVGSFLDFVDERAAYLASSRPTAVNLFWALDRMKKFTHAQAKSCTDIDTLKKRILEEAIRILEEDKSMCRAIGEHGFELIKDKECILTHCNAGGLATSELGTALAPIYVGQERGVSFRVFADETRPLLQGARITALELSEAGIPVTVICDNMAASVMASGQIKACIVGADRIAANGDTANKIGTYGVAISAAYHKIPFYVAAPSSTFDLKIRSGADIPIEKRGREEVAVLGGVKK

SEQ ID NO: 90766 - protein, 393 aa, Unknown
  Obtained from environmental sample
  DOMAIN (126)...(193): Elongation factor Tu domain 2
  misc_feature (1)..(393): Xaa is any amino acid
EIDIPADMQESVGKLRQALMESVAETSEELMNKYLDEGGLSDDEIRAGVAKGVLDGSVCPVLAGSGLLNIGVDQLLTKIVNLCPSAASRNEIDAVEGEEQKTVSVKTDDPTTVSFVFKTVSEEHLGELNLVRVFSGKVATGHELLNVSKGTAERIGNMYFIRGKERVDTDEIHGGDIGGLLKLKATHTNDSLVDKSVKYRVAPTAYPEPLVSVAIVAKVKGDEDKIAVGIAKLNEEDKCFSYKFHSDIHQSILSAMGDIQLEIILENLKNRFKVEVERKQPKISYRETITKPAKYVEYTHKKQTGGAGQFAKVFIDLEPMPRGGGYEFVDKIVGGVIDQPLRPSVDKGVRAKLEEGIIAGYPIVDVRVSLVDGKTHPVDSKDVAFQIAGREVF

SEQ ID NO: 90767 - protein, 175 aa, Unknown
  Obtained from environmental sample
  DOMAIN (8)...(170): Outer membrane protein (OmpH-like)
  misc_feature (1)..(175): Xaa is any amino acid
MKKFLLLFVAGYFLSVTVEAQQLTRIAIVDLPRVYTAFMAESRAVRDFEERSARVQAEIDRMTAEINNLKVSQVNAQAQGNVEQALRYEAEVTKRSDILREYYRTKTVELDSIRKSLTQSGAFLEQVYDEIRYVAESEGYSMVLNLKENNGIVWYNPTVDLTDKIIKNLMDKARR

SEQ ID NO: 90768 - protein, 468 aa, Unknown
  Obtained from environmental sample
  DOMAIN (69)...(276): Bacterial extracellular solute-binding proteins, family 3
  misc_feature (1)..(468): Xaa is any amino acid
MINGQEIPKYILLSVIFLTMTISGCGKPAANQPGKYTEPALFMSFLDVPGITENEIKAIEIIKKRVDHLVYGSTLSTEVFISDDGEIGGFTALFCDWLSTLFDIRFQPVVMEWGDIFTRLKTGEVDFSCFTPTEERLKTYFMTDPVAVHSLKIMRIKGSPSLDRITQTRPIRYVFLENPVTIKVATDTFQDGTYEIILAKDNDIVYQLIKTEAADAFINYNVGEAAFDAYDDVVIEDFIPLNFNTMCMAAQNPELAPVISVVTKALRNGGIQYVNKLYNEGQNNYIRNKFLKSLNAEEREYLQNTSVVPVTAAPWFYPLDYFNKFENRWEGIAFDVLDEVTKLTGLSFDVVNSGDASWAEVFQIFNDEASICLDLIASPERINRYLWSKYIYLSENYALVSRYNFPNISISEIQYAKIGLIKSTAWASMFQNWFPEAVNATMYDSQDEAFLALDRGEVDLVMAGTNAL

SEQ ID NO: 90769 - protein, 1307 aa, Unknown
  Obtained from environmental sample
  DOMAIN (987)...(1065): OB-fold nucleic acid binding domain
  misc_feature (1)..(1307): Xaa is any amino acid
MRLADRAEEFGMSHLALTDHGNMFGAMEFIAACGHKKRKNPVKPIIGCEAYVSPGSRHDKKGSENENNYYHLVLLAYNRTGYFNLVKLCSYAYTEGFYYRPRIDEELLSRYHEGLIALSACASGEIPRLIQAGKIDEAEKKALYYRDLFGKDADGNPNFYLEIQDHGIPSGAMRGSDLSQKDINEAVIKISKKTDIPLVATNDVHYLDKDDYISHDILLCIGTGKVRTEEKRKKYFGDQFYFKTGDEMAKIFAEYPQAIENTVKIARRCSADVPKIETKELPQYLPEFKIPEGFKEPGDYLKHLTDEGLARRYAKVKESDSDKWKKIKDRADYELDTIISMGYTGYFLIVWDFIKYAKENNIPVGPGRGSGAGSIVAYSLRITDIDPLKYGLIFERFLNPERISMPDFDIDFANEGREEVINYVTRKYGKERVAQIITFGTLGAKAVIKDVARVLGISIPESEMITKLISFDPEMTLDKAKEEEPRLREMENDPRFTELFAIAHKLEGLNRHSSIHAAGIVIGKKPLIELVPLFQEREEKGGNIATQYSMNFLEECGLVKMDFLGLKNLDILKHSQELIRRRGGKYSNFNMEDIPEDDKKTFKMLGEGKSHAVFQFASDGMQDILRQTKPTSIEDLTALNAMYRPGPMQFIPRFVDCKNGKAPITYPDPSLEGILKETYGVIVYQEQVMEVARIIAGYSMGKADLLRRAMGKKKKEIIDGEKIPFLEGAAKQGYSKQKAGAIYDMLVPFAGYGFNKSHAAAYSVLAYQTAYLKANFPAEYMAATLIVEIKSTDRLLYSIVETRKMGINVDPPNINYSDKLFTVMDGRIVYGFLGIKGVGDAPADEIVRGRQDGHYKSFMDFLDRVDIKAVSKKVIELLIHTGAFDDFKVSRETLAGNMEKAIEYAQKGKEDRQLGQSNLFGDSTESGMPDFKFTEFPPVSRTERLNREKELIGFYFSGHPLDEYRQLWEKAVKADLAHHETIQPGNHILIGIIKNIKTIISKSGKMAYAVLEDYNGEIEVTFFSRTWEACEGKVQDDKVAILRGKIEYQRNKDKYGFIVDSLIDVREAQTAIEEEEALQKKREKFRNVWFYMADLKSGGLSKAEKGSYTVIGQLSGLRQTQDKNGDDMAFGTLQDFEGNIDLVFWAKTWKESRELLNMGEFVALKGSLDPERDRNRQQPSLKVSKVDDLAALTRSAARKAEAGEQPKVPPLEMQVVKKENSPDTAQSTAVLNEIHIRLQDGAADRDEGIQPLRNYLSGNQGPCPVFIHIGEKIIRTNKGLSLEAEKEALGVLEGCIGVAQSWKEQCK

SEQ ID NO: 90770 - protein, 431 aa, Unknown
  Obtained from environmental sample
  misc_feature (1)..(431): Xaa is any amino acid
MGTGLLKAHLEAFDAIGAGITDQRREGYDKQYEYADAIKGVYGVFFFQHPSMLEYQERLKKKNERSNVQTILRVNKIPNNNQITRLLDDIKSETFAPVFEQGLETAQRHKGLDQYLVLGGRYRLITLDGVWFYQSENVKYGYCLQQQMKDGQTLYYHDMITAALVKPGFQAVLPLVPEFIRNEDGKEKQDCERNAAKRYLERKGERLRGLKPTFLGDDLYACHSICAKILDMGMSFIFTCRDESHPWIAEQVKYSPMEGRVRSEWNGRNHLEYRYAWVNGIENRAEGEKLSVNYLSLKIWNKEKDEITYSNSWITNKPVTADTAAFLAHCARTRWKIENEYNNVLKCRGYNLEHNFGHGQEHAADIYCLLNILAFLFHSIQDALDEDYQAARKSFGRRDAFFWALRYEICRYLHDDWSLFFLTVAGQAPDG

SEQ ID NO: 90771 - protein, 276 aa, Unknown
  Obtained from environmental sample
  misc_feature (1)..(276): Xaa is any amino acid
SGGGFEASYKLRAQSGWSEEFYDEDDEGMEMGDDSGFASMPGGLYAPESSEPFYGIGRFGFWWSASEDGGNAYSRSINCCGDDGVGEASPNTESFGYSVRCLLDDKSNERKEQRLREETRKKEIEARKKMEAEQKCMEEERQRKETAERETMEEGQERFGKTSAYFTDSRDGQKYRAVKIDGNTWMAQNLNYMPENGKSRCYKDSASYCGKYGRLYDWETAANACPAGWRLPSNKEWSGLMSAVGGKFKKYEHNPGWFGAGAALKTNAGWDCYKDR

SEQ ID NO: 90772 - protein, 382 aa, Unknown
  Obtained from environmental sample
  DOMAIN (1)...(131): Uncharacterized BCR, COG1636
  misc_feature (1)..(382): Xaa is any amino acid
MVDEYGLDLFLRNVGPETGMPGRCGICYRLRLEKTAAYAAEHGFDAFSTSLLISPYQQHETIHSLGEELAARYGITFLYRDFRPLFRKGQTAARALGLYMQKYCGCIFSEKERYEKSQNPEPRTPNPEPLYFQRLALLIGSDALEKLRQTNVLIFGAGGVGSWCAEALVRSGIGRIGIADYDTVNASNINRQVQATSSTIGLSKVEVLKQRLLEINPDCEVTVWSKIFSNETAVEFGIEKADYAIDAIDTFPHKLDLIEFLFNAGVTFFSSMGMACKMDPTRIKTGSIWESRGCALARLVRQRLRTRGFTGDFTVVYSDEPPVNAGQNPAVQDTDKGDSADKKRINGSCVTVTAPAGMALASLVLRDIAGQGPAGKGQTEKR

SEQ ID NO: 90773 - protein, 842 aa, Unknown
  Obtained from environmental sample
  DOMAIN (149)...(330): ATP-grasp domain
  misc_feature (1)..(842): Xaa is any amino acid
MVDTCGGEFEAKTPYFYSIQNGTENEALPFIRKSVKQRIVVLGSGPIRIGQGIEFDYACVHCVWTLKSLGYEVIVINNNPETVSTDFDTADRLYFEPLCIDDVMSIIEIEKPLGVIVAFGGGTAIKLTKKLRERGVNIIGTSADSIDICEDRQRFDALLENLQIKRPKGYGVMTEAEALDAAEKLGFPVLMRPSYVLGGQNMIIAFSPDDIREYMEIILRSKQENPVLIDKYLEGMEIEVDALCDGDPSMGGQGGVFIPGIMEHIERTGIHSGDSIAVYPAINIDDALAEKIFDVTKRLCMALNVKGLVNIQYVLYENDIYVIEVNPRASRTVPYLSKVTSIPMCELATKLSVGHKLSDLGYAPGIGKIPPYVAVKVPVFSFEKLAGVDTHLGPEMKSTGEVLGLGKNLEEALYKGLVAAGYKIKKKGGVLITVRNSDKAEITLVAKKMAQAGFSLYATRGTARFLEERGFEVQSVEKIRDCATNNTATLLESGKVSYIISTSKKGRDPALDDVKLRRKACSLGIPCLTSVDTANALADGLLSGYSETNTELIDINHLRTDRTKLAFTKMQSCGNDYIYFNCFDIEEINSPESLSVFLSDRHFGVGGDGVVLILRSDIADAKMRMFNLDGSEGSMSGNAIRCVAKYLYDNGIVTKRDMRIETKSGVKKMYLSTRNGQVSSVKVDMGRAELRPEQIPVNLGGESVIARKVTIGGVEYGLTCVSMGNPHAVMFSNHLDDLDLNETGPLFENDPLFPDRVNAEFVNVIARNYLEIRVWERGSGETQASGTSACASAVAAVLNGFCDKNTDIRVRLPGGELIVCYTDEVVWLTGDCVKVFDGTVEI

SEQ ID NO: 90774 - protein, 669 aa, Unknown
  Obtained from environmental sample
  DOMAIN (1)...(210): Carbamoyl-phosphate synthase L chain, ATP binding domain
  misc_feature (1)..(669): Xaa is any amino acid
MTEAEALEAAEKLGFPVLMRPSYVLGGQNMIIAFSADDIREYMEIILRSKQENPVLIDKYLEGMEIEVDALCDGAPSQGGSGGVFIPGIMEHIERTGIHSGDSIAVYPAINIDDALAEKIFDVTKKLCMALNVKGLVNIQYVFYENDVYVIEVNPRASRTVPYLSKVTSIPMCELATKLSVGLKLSDLGYKPGIGKIPPYVAVKVPVFSFEKLAGVDTHLGPEMKSTGEVLGLGKNLEEALYKGLIAAGYKMKKKGGVLITVRKNDKAEIIRVAKKMVQAGFSLYATRGTARFLAERGFDVQSVEKIRDCADNNAATLLESGKISYIISTSKKGRDPALDDVKIRRKACSLGVPCLTSVDTANALADGLLSGYSETNTELIDINNLRTDRTRLAFTKMQSCGNDYIYFNCFDTEIDSPESLSVFLSDRHTGVGGDGVVLILRSNIADAKMRMFNLDGSEGSMSGNAIRCVAKYLYDNGLVKKRDMQIETKSGVKRLYLSTRNKVVCSVRVDMGRAKLGPQDIPVNLTGESVIARKVAIGGVEYEITCVSMGNPHAVVFSNRLDDLDLEEIGPLFENDPLFPDRVNAEFVNVIATNHLEIRVWERGSGETQASGTSACASAVAAVLNGYCDKNADIRVRLPGGELIVNYTDEVVWLTGDCVKVFDGTVEI

SEQ ID NO: 90775 - protein, 374 aa, Unknown
  Obtained from environmental sample
  DOMAIN (151)...(263): Miro-like protein
  misc_feature (1)..(374): Xaa is any amino acid
TRGRTAWTFPARGKPAAQAVMAVLRNAGFRDALPGEFTFRAFMNGKLDLTRAESVMELVCAKTDRGRNNAVNRLSGVLEKEISAVKKMLVEVLSGAEIFLDYSEDEISADAEEIAGRLPNETLAREAIARLQKLAKSWQLERICQEGVTAVIAGRPNSGKSSLFNLLLKEERSIVTEIPGTTRDWIEAWVSIEGIPVRLVDTAGLRDSSDPVEKIGVERSRDLLETADLVLYLIDGEEGITDEDAALIDKLEIPHLVIWNKTDIAPAPKELPAVSAKTGESLAELSAAIAAIITTYVENTDAASASLGTERQKNLVEAAIAALEEALRLTKGGEPLDLVSPMLREAVNSLGEITGEVSTADILEEMFSKFCVGK

SEQ ID NO: 90776 - protein, 440 aa, Unknown
  Obtained from environmental sample
  DOMAIN (3)...(412): Family 4 glycosyl hydrolase
  misc_feature (1)..(440): Xaa is any amino acid
MPKITFLGAGSTVFARNVLGDCMSTDALRDSEIALYDIDAVRLKESERLVNAINKGKGGRARISSYAGIENLEKALKGADFAVNAIQVGGYDPATVADFEIPKKYGLRQTIGDTLGIGGIMRALRTIPVMEQFARAMEKVCPDVWFLNYTNPMSMLTGFMLRYTGVKTVGLCHSVQGCSYWLFKGLGLEDKLEGRRELIAGINHMGWLLDIRGKDGVDLYPEIRKLAKAKNSGEKHNDMVRYDYIDKLGFYCTESSEHNAEYNPFYIKSKYPQFIEEFNIPLDEYPRRCIAQIEGWKSEYENLSKEDIIKHERSQEYASYIMESIVTGNTFKIGGNVLNTGLSIENLPAEACVEVPCLADGSGLRACHVGKLPVQLAAMNMTHINVHLITIEAAVTKKRDHIYHAAMLEPHTAAELSLDHIRAMVDELLEAHKVWLPKYV

SEQ ID NO: 90777 - protein, 120 aa, Unknown
  Obtained from environmental sample
  misc_feature (1)..(120): Xaa is any amino acid
MRLSGITPESLVDGPGLRYVIFTQGCPHQCPHCQNPETWDIDAGKEYTARQLIRLLKQQKKKKQGVTFSGGEPFLQAAELAEVALAARQIGWDVVTYTGFTYEELIAENNDDIKALCPQA

SEQ ID NO: 90778 - protein, 432 aa, Unknown
  Obtained from environmental sample
  DOMAIN (304)...(432): Carbohydrate binding module (family 6)
  misc_feature (1)..(432): Xaa is any amino acid
VRDDTFDGPGELFRIKLEKDGLTAAAKAAAQAAQVVFIAGNDPMINGRESVDRPSLDLPPRQEEMIRRVLAANSKTVLVILSGYPYTCKNIAADIPAILWMAHGIQETGNGLADILGGACSPAGRLPLTWYEDEKQLPPMMEYDIISAGSTYQYFTGEALFPFGHGLSYSNFEYTQLVIDKRAAGENEIINVSFKIKNTGSVEAEEVPQMYVAFSGSVFRRPLKSLKGFTRLAIKPGKEHVVHFSLPVEELAVWDSFQNRFYVETGQCVVKIGASSADIRLSGGFKVYGKNVFPRKIPDHIYAQSFDDYSGCFLHEKRGSDIPAVFNSSEGGWIRFAALDFAGGRGLISAIVQGAPGSRVEIRLDAPGDALAGTLLIPNTGDISFYPLTEKNSPRRRPVWAYAETQIEKIRGVHDLYLVFYGKTGLWRIDIQ

SEQ ID NO: 90779 - protein, 637 aa, Unknown
  Obtained from environmental sample
  DOMAIN (143)...(346): 7TM diverse intracellular signalling
  misc_feature (1)..(637): Xaa is any amino acid
MAALEFDVPGFEPYYGDRLPAPVIGSENYFVFKTTFSVSTDCAGKNITLYIDPMYAPRIIRVNNTVINQAGIFSGGVYSTGIALAIHVPLAAGLINYSEDDSPIENVLVIETFPQYERNPLPEFSIAEYTFNERKVFLKNLLTSHLVLASQVLSLLIAAYHFFLYFSRGRKDIKYLYFSFLCLSFFLAYTSVGFIFNSPYYTMIMRITRTFQLLTFSFFAVFMLESVGLFGNKKKYIIISILGYSVLCASYIAIQETKQSINAAYSLMTNLNTIPLLACSIIILSYVVLLKKNIKVVPLFIIALTSAGASLRDLIVLSKGIEPLFWAAPYSFIFMVILIYAMLIKEENFIQGAFSRYLAPEIISEIVKDPNKLNLGGEKREMTALFTDIQGFSAISEQLDPAHLVRLLNKYLTEMSNIIMEHLGTIDKYMGDAIIAFFGAPLFHADHGALACRSALAIKAAERELNETIISEKLSPVPIFTRIGINTGEMVVGNMGAEKKMDYTIMGNAVNLASRIEGVNKYYHTGGILISEYTRAKIGDEFPLRRIDRVRVVGINTPLRLYELLPMDTDQGAVETWEKALDLYEQRNFKKAFGLFVSLLKSYPKDNAARVYALRCKAFVETPPPDNWDAVRNLTNK

SEQ ID NO: 90780 - protein, 397 aa, Unknown
  Obtained from environmental sample
  misc_feature (1)..(397): Xaa is any amino acid
MPEGWHTGKGGVDKIEIPFSRLELVGSKRKAKMQAEAFSQYALIYAENLQDGLPVRDTPDNNARRIYRLKTGEIIKILSVAEGSPAIGSTGDPLPGEWYKVLTEDGSTGYCFSYRLKLFEHSGGQLAAVKTVVTEKAEDPELEQLLSKTWSPELYLTMINSKKINLEDLSRQWRFDPGQETGLARIFVSGTDNSYAYTSIRPDGNRTWRFEGTNLSMQLRAETTLAVQFLEGGGSMRTLLFVALPVSVDDLIMQETARRERLYNEIYSQGPIFTSNNYGTITFKQDSLPGGTTPAGGGTFSWKNFDLLVPRFIPEDIEGDGTILIDLFLDRSLEERYDGAFTLRFTNTRIALRCMYSLDNEGFRIEIVPDSSIEDVTIMRRGASPMVLYFFRDTEFW

SEQ ID NO: 90781 - protein, 348 aa, Unknown
  Obtained from environmental sample
  DOMAIN (1)...(309): Major Facilitator Superfamily
  misc_feature (1)..(348): Xaa is any amino acid
MIIASGTVISSVFSAKIIKRLGTGIVTSVSVLMTAVALAGFSLSKSFYFLCFFAIPLGLGAGSVDAALNNYVALHYKARHMSWLHCFWGVGASVGPLIMSSFLINKNSWNLGYRTISIIQFCLVFILFISLPLWDKKRAGAERAEKQTSAKFKDLFSIGGVKQILIAFFCYCSLETITGLWGASYLVTEKGISPEIAARWITLYYLGITAGRFISGFITMKLNNKQMVRMGQIIIACGIITLILPFGNTALFCGLFLIGLGCAPVYPSLLHETPVNFGAEYSQAIMGIQMGSAYVGTTIMPPIFGWLASYMSFSIFPIYIGIILLVMITTVEMVNRKNIKNTFFNHKR

SEQ ID NO: 90782 - protein, 335 aa, Unknown
  Obtained from environmental sample
  misc_feature (1)..(335): Xaa is any amino acid
DGDDNTGGNHQLGGKDWDARLTEYVRNEFAQKKSANIEEMENDPELRAWFSENIEKAKKMLTSRTSTALTVSFNGDKEKIEITREAFDNVTTAELEGTILLVDDMLAKKGLTMANDIDEIILVGGSTKMPQVQLKLEQVYGKPISSFEPDKAVAMGAALVASGASYSGGGEASAGGAAGARHALDGESGTIEIHNTDGSTTTFIEKCTKSYGLAAQSGGKEIIGNIIFKDTVKPAHQEREFVTSCANQTNINLRVYENNSLEEDATVEESTQMYESCIVSLKPGLPGDAPINIIFDLDGNGGINHYRRRSHKQYTYYRYSCPHRRRRCKCRYGRD

SEQ ID NO: 90783 - protein, 70 aa, Unknown
  Obtained from environmental sample
  misc_feature (1)..(70): Xaa is any amino acid
ITPLNKNIPLNAETASIIDEERQRIESGAFNVFSGVMKTNDGKSIGREGGNLTDDEIRNEMNWYYRTVIR

SEQ ID NO: 90784 - protein, 439 aa, Unknown
  Obtained from environmental sample
  DOMAIN (23)...(157): Histidine kinase-, DNA gyrase B-, and HSP90-like ATPase
  misc_feature (1)..(439): Xaa is any amino acid
MTENNSRIYVLPPEEARRIAAGEVVDRPAALVREFLDNAIDANAANIEISVEEGGCKKVEVSDDGDGMIREDLELCTLTHATSKIRKLDDLDTAVTLGFRGEALSAAAAVSRVEIASSTDGRTAWLFETGPGESRPSKVEQTRRTKGTTVRALNIFESIPARKRFLKREGSEAALCRQVFIDKALAFPSINFRFIQDGKLKDFFPAVSTKKERFAAALLQAREINFLHEINITGEGFTAAVVIGGAELYRNDRRQLYVFANGRRVQDFSLIQAMEYGAQGWFPNGVHPVGAVYVEIDPSLADFNIHPAKREVRFRDPGAIHHAVSGGVKNFFHSYFLRTSRIEPQPEEDATQREGEFNFSKNNYEINHTPSRITDNFLAESIHRRENSFANDSATSVYGDMRYIGRVFGLFIMIEWGEKLYIIDQHAAHERILFNRFLK

SEQ ID NO: 90785 - protein, 89 aa, Unknown
  Obtained from environmental sample
  DOMAIN (14)...(75): Exonuclease VII small subunit
  misc_feature (1)..(89): Xaa is any amino acid
MAKKTTPAKEGGKKSFEERLERLEALGEKIRKTDIPLDEALKAFEEGIRLARGLESELEKIENRIEILMNSADAPLSDSPELELFDDGE

SEQ ID NO: 90786 - protein, 238 aa, Unknown
  Obtained from environmental sample
  DOMAIN (33)...(238): D12 class N6 adenine-specific DNA methyltransferase
  misc_feature (1)..(238): Xaa is any amino acid
LLTAKKYVSPVQGLRALETKPILKTTYINNRRYLGNKYRLLPFISLVVSEKCDEINTVADIFAGTGAVASAFTDKQLITNDNLYSNYICHVAWFSPQPYSQKKIESLTTAYNNTVVKGENYMSKNFANTFFSRTDCLKIGFIREDIEDRFRSGEINERERALLITSLLYATDRIANTCGHYDAFRQGVDFEKHLELYAPIPTGNLNTENVCYNENANALVRRITADLIYIDPPYNSRQ

SEQ ID NO: 90787 - protein, 273 aa, Unknown
  Obtained from environmental sample
  misc_feature (1)..(273): Xaa is any amino acid
MDAYPAVNRGSAPQQPQQPQQPQQFQQSSAQTGGVGIGAGGVGIIDNQNMSGSVGVNKSIPVDSIRGMGINVSGINTSGVNSTDNQNIRADVGVNNKQVAVDNSRGVNNPGGIGININSNAKPVDNIGNTSINVRGINTNSINPADNQNIRGDAGAYNRQGAVDNSRGVNNSGNVGINTNSNAKPVDNVGGMSVNVRGINTNSVNTNNINPADNRNIRGDVGVNNSQGVIDNSRGVNNSGGIGINTNSNARLVDNVGNIGINARGINTIGINP

SEQ ID NO: 90788 - protein, 392 aa, Unknown
  Obtained from environmental sample
  DOMAIN (29)...(382): N-acylglucosamine 2-epimerase (GlcNAc 2-epimerase)
  misc_feature (1)..(392): Xaa is any amino acid
MLNKQEATREVKENILPFWQNMADEENGGFYGETDFYGKPNKTADKGCILNSRILWTFSAAYRVFNDDAYKACAQRARDFLSSAFLDTVNGGLYWLVDHTGKALDTRKQFYNIAFGIYALSEHYLATGDRSSLELATALFDATEQYGLDPSAGGYIEACGREWRGIDDFRLSGKDLNCPKSMNTNLHVLEAYTNLVRVGGSERVIKALETLLRITLDKIINRDWHFNLFFDMNWNSLVKDISYGHDIEGSWLLYEAALATGDEKLILKVKQTALAIAEVIYNVAIDQKNGGLISGCDMEGHIHSKKEWWPQAEAVVGFYNAYELSGERKFYDAAERTWDYIQKYFVDREHGEWYNELNLDNTPDFGLPKAGFWKCPYHNARACFEVARRMGE

SEQ ID NO: 90789 - protein, 420 aa, Unknown
  Obtained from environmental sample
  DOMAIN (6)...(396): Arginosuccinate synthase
  misc_feature (1)..(420): Xaa is any amino acid
MKKKIILAYSGGLDTTVIIPWLKENHDCDVIAVCVDVGQAADWKAISKRAMSTGASACYVADVKKEYVEEYIWPALKAGAVYEDKYLLGTSTARPLIAKVLVDYARKEKADAIAHGATGKGNDQVRFDLGIMALAPDIEIIAPWRTWKLKSRQDEMRYLARRKIPVPMKKKNSYSMDDNLWHISHEGLELEDPANEPQLRKMLTMIVPPEKAPNKAEYVEIEFEKGIPVSLNGRKMEGVQLINALNKIGGANGVGIVDLVENRVVGMKSRGVYETPGGSILYYAHQELEHLCLDRQTYSFKQQVSLKLSELIYGGLWFTPLREALCAFVNSTQATVTGKVRLKLHKGSINAAGVTSVYSLYNTSLASFTTGELFNHADAKGFIKLYGLPVLVRSLMEQGKKEGARASGAASGKARAKTKR

SEQ ID NO: 90790 - protein, 292 aa, Unknown
  Obtained from environmental sample
  misc_feature (1)..(292): Xaa is any amino acid
MAINSIGRELWRVNTGGALSGPIVTGWDGRMFVPTAGKISCYTASGTLLWTNELGSGISAGPLLDQNGCIILALENNRLIRITPFGAVRSWKLPSAPVVLVPLEKDILAMYGNGNILRVDSSAEDSAPLPFPGLSARPLAAAARNNRAAVFLANGQMLLLSGSDGKVLWTAVSFIRPRINEEKADLIFDERGIYALCAGGAASFTADGDLRWFANLENASGIPVFSDDGVLYSGGKDWILNAWKIEDRALNQKHNLYGPAPDASYGTGNPPPSVFARVTGRFYETSVRRELK

SEQ ID NO: 90791 - protein, 104 aa, Unknown
  Obtained from environmental sample
  misc_feature (1)..(104): Xaa is any amino acid
MAIKLTQIQSMIYEIRGQQVMLDADLAKIYQVETRRLNEAVKRNIDRFPPEFMFQLTQIEYDNLKSQIATSSWGGRRKLPFAFTEHGVIMLSSVLNSKIATQIN

SEQ ID NO: 90792 - protein, 1029 aa, Unknown
  Obtained from environmental sample
  DOMAIN (1)...(123): PHP domain
  misc_feature (1)..(1029): Xaa is any amino acid
VKLCSFAYTEGFYYRPRIDEELLSEYHEGLIALSACASGEIPRYIQSGKIDEAEKKAVYYRDLFGKDAEGNPNFYLEIQDHGIPSGGLRGSDLSQKDINKAIVDISKKTDIPLVATNDVHYLDKDDYISHDILLCIGTGKVRTEERRKKYYGDQFYFKTGDEMAEIFAEYPQAIENTVKIARRCNTDVPKIETKELPQYLPEFEIPEGFKEAGEYLRHLTAEGLVKRYAKIKESDLTKWEEIKERADYELDTIINMGYTGYFLIVWDFIKYAKENNIPVGPGRGSGAGSIVAYSLRITDIDPLKYGLIFERFLNPDRISMPDFDIDFANEGREEVINYVTRTYGKERVAQIITFGTLGAKAVIKDVARVLGISIPESEMITKLISFDPEMTLDKAKEEEPRLRELESDPRFTELFAIAHKLEGLNRHSSIHAAGIVIGKKPLIELVPLFQEREEKGGNIATQYSMNFLEGCGLVKMDFLGLKNLDIIKHSKELIRRRGGKYSNFNIEDIPEDDKKTFKMLGEGKSHAVFQFASDGMQDILRQTKPTSIEDLTALNAMYRPGPMQFIPRFVDCKNGKATITYPDPSLEGILKETYGVIVYQEQVMEVARIIAGYSMGKADLLRRAMGKKKKEIIDEEKTPFLEGAVKQGYSEQKAGAIYDMLVPFAGYGFNKSHAAGYAVLAYQTAYLKANFPAEYMAATLIVEIKSTDRLLSSIVETRKMGISVDPPNINYSNKLFTVVDGRIVYGFLGIKGVGDAPADEIVRGRKDGHYKSFMDFLNRVDIKSVSKKVIDLLIQTGAFDDFNVSRETLAGNMEKAIEYAQKMKEDKQLGQSNLFGDSNDADMPDFKFTEFAPVSRAERLNLEKKLIGFYFSGHPLDEYKEIWQDVVSVNLGQVETYKTGNCVLVGIIKNIKQITTAKGGKMAFAALEDYNGEIEVTFFSGPWERCERLISDDSVVILKGKIDYQKDKDRYSFLADGVISKQEVPAVVKEVKELDEKNKLHRNTWLYMADLKSSYILQAKKGNYTVIGN

SEQ ID NO: 90793 - protein, 416 aa, Unknown
  Obtained from environmental sample
  DOMAIN (304)...(409): Peptidase family M23
  misc_feature (1)..(416): Xaa is any amino acid
MKKATLETILDRACFFGLRGFERSDLAQILPEMQGDKKGLLIEPLNNALFEQNAFGNINAIPNFSEKNGWQIILGDQHFECTEEKIINCYANISALKRKFARIAVLLPQEKNASTDKILTGIENSCLAVFSKNDLQEAKIDDLLKLKIAQINIPKTPLFLAAKYAWIFTILLCVLPFLIASQPDEQVSNLRNIASEVQKYSEKGDIVHILKEGESLTQIARFAIGKYNSLVSTEAMIKEYLKDNELSLDSKLKVGDTLRLKLPTFNNPQHKTMQGAWNFFTGLLNDSLAYITELYNPNQTATMRRHDGIDVAGRKGTRILAPFSGTAWTMEDERGGLMIAIARENDLLIFMHCEQRFYLNGQSVMEGDPIASVGSSGHTTGPHVHVAAGKISKNGERNISGLRYNALNPFIWFKEM

SEQ ID NO: 90794 - protein, 686 aa, Unknown
  Obtained from environmental sample
  DOMAIN (407)...(566): Anticodon-binding domain
  misc_feature (1)..(686): Xaa is any amino acid
GTSPYEDGSGYVTVATTRPETMLGDVAVAVNPADERYKDIKHKKIKLPLTGRAIPFIEDGFVDREFGTGAVKVTPAHDPNDFGMGQRHKLEPLQVMDESGKMTGDIPEKYKGMDRFDCRKAVIEDLTAAGLVEKIEDHSHAVGHCYRCHTVVEPYYSDQWFVRMKPLAEPALAAAVKDEVTFYPARWKKTYIDWMENIRDWCISRQIWWGHRIPVWYCGCGETIASEETPDRCPKCGSATLRQDEDVLDTWFSSWLWPFSTMGWPESGEFMKKFYPTDALVTAPEILFFWVARMIMAGCHFTGKLPFTDVILHGTVRDKTGRKMSKSLGNSIDPLEIIPVYGTDALRFSMVMITAQGADVFLSKDTFDIGRNFANKLWNASRFLISNIKTEKLTGAIPPVDRLKAEDKWILSKLQRVIGDMDSAISTYRFNEACHIIYDFTWHEFCDWYVEAKKADFYQEDDPQRKTDSLSLCGYVLASILKLLHPIMPFITEEIWSFLREKMSFDKVIDAESIMLASYPDPIPSLVNEKLESDFDLLKSCIVALRTIRSENNVPPDKTGTAVIIPADKEAETWLSSQTPAINLFAKLSETTVGIEAKKPGFAGSAVVRGNQIFLSLEGLIDKQVEIDRLTKEVVRLKSMADGAKARLESENFVSRAPKEVVEKEREKYQGILVNLEKTEKALASL

SEQ ID NO: 90795 - protein, 574 aa, Unknown
  Obtained from environmental sample
  DOMAIN (215)...(360): Glycosyl hydrolases family 2, sugar binding domain
  misc_feature (1)..(574): Xaa is any amino acid
MGRLKISPLFSDGMILQHGIPVPISGESMPMTQITLSFLEKTYKAGADGGGKWLILLDSHSPGGPYSMEISTPTDRISITDIYIGDVWLCSGQSNMELPMRRVKDDFPQEWNEPNPLIRQFSAPQEWDFSGPRQELSGGSWKAASADTLEEFSATAWFFAGQIFKSYNYPIGIILAAWGGAPIEAFMSADALAAFPEKIALGKKFAGAAFCDSLISEKQALIETWNNELTAADSGFAWQKPETDISAWNEIQLPGDFAQTGLASKNCLNNFCGVIWLCREFEVNDSFAMAAEKGRAKIWLGTITDADTVYINGVEVGNTTYRYPPRKYPVPAGLLHAGKNRIVMRVVCCNGEGGVTRSKDFHLFSENGRIELSGTWKYRVGINVNSRPEEFFLQRQPTGLFNAMIAPILNYPCKGILWYQGESNDSKPSEYAALLSALITDWRNKRQQTLPREPHDIPFLFVQLPIFGAPGENNESDSWPIIREAQYSALSLPATGMAAALDLGEWNDLHPLNKKDVGRRLALAAERLVFKNENTAPGPVLRNIEKRGDTLLLNFDNCGGGLTAVEQPHVSAIA

SEQ ID NO: 90796 - protein, 504 aa, Unknown
  Obtained from environmental sample
  DOMAIN (336)...(458): Anticodon-binding domain
  misc_feature (1)..(504): Xaa is any amino acid
RTTPTSPLPTPYSPTQCTTADGYSVNSGSYDGLPTAETKKRITQWLEDNKLGKNMVNYKLRDWVFSRQRYWGEPIPVVHCDCCGLVPLDEKDLPLKLPDVQSYAPTGTGESPLAAITDWVNTICPKCGKPAKRETNTMPQWAGSCWYYLRYLDPHNNKAFAAKDKMEYWAPVDLYVGGVEHAVLHLLYARFWHKVLYDAGLVNSKEPFMRLVNQGMIVSFAYQRKDKTLVPSDQVEKKPDGSFIEKATGEELSEVIAKMSKSLKNVINPDEIIKEFGADSLRVYEMFMGPLEVSKPWSTAGLIGVTRFLERIWGIANEKIKENKEERKSAEDTERLTKLLHKTIKKVSADTVSMNFNTAISAMMIYTNELAKLAEIPCSLWEPLVIMLSVYAPHLGEELWEKLGHKESVSACSWPVFDEQLTHDEEVTVVVQVNGKIRDKFTAATGTAKAELEKTALALPGALKWTEGHTIAKVITVQDKLVNIVIRERGTGTGNREQKKSNEQ

SEQ ID NO: 90797 - protein, 478 aa, Unknown
  Obtained from environmental sample
  DOMAIN (224)...(437): Methyl-accepting chemotaxis protein (MCP) signaling domain
  misc_feature (1)..(478): Xaa is any amino acid
VDTAYAQYMDEAVKAVQNGDSFACNSYAPALKSNIEITIQSFPMGNSGRSWSVMIAATESYILREVNFLTKITIIIAAIAIVIAAVIIYFVLQSTTNPIVKVADTLRDISEGEGDLTRTIAVSSNDEIGDLAKYFNKTLDKIKNLVLLIKKQAGLLKDIGNDLASNMTETAAAVNQITANIQSVKGRVINQSASVTETNATMEQVIANINKLNGHVENQSRNVSQASSAIEEMVANIGSVTNTLINNATNVKSLQEASEVGKTGLQEVASDIQEISRESEGLLEINSVMENIASQTNLLSMNAAIEAAHAGEAGKGFAVVADEIRKLAESSSEQSKTIGTVLKKIAESIKKITVSTDNVLKRFEAIDSGVKTVSMQEENVRNAMEEQGQGSKQVLQSVGSLNELTQQVKSSSEEMQNGSHEIIKESENLEKVTHEITGGMNEMASGADQVNAAVHNVNDMTVKNREGIDALIKEVSRF

SEQ ID NO: 90798 - protein, 58 aa, Unknown
  Obtained from environmental sample
  misc_feature (1)..(58): Xaa is any amino acid
EIPLHGRIMAIVDTYDALISKRPYKEANTDEEAAKIILAESGRQFDPKIVEVFLEVLG

SEQ ID NO: 90799 - protein, 309 aa, Unknown
  Obtained from environmental sample
  misc_feature (1)..(309): Xaa is any amino acid
MRNSNSKEQGTGNREQGTGNRERQTHFLFLCYLLSVICYLLSCSSAPKNTGDIYEIRKDAEVQLEHGNRQADRGSLDAALVFINEARRLAVITDNPSLLVRSSLSLGNVLFALGNADEAFESWNKALEEANRAGNKELAAVCRIHIARGKLFSPDGKNAAQSLRDEVNREMASIKSDELYIAFAWTVIGLAEKELGRYAAAEEAVKRAFAIHEKALNLKLAAYDWFIIASFRSLSGNSAGALKALDSAIEYDRRTENSWGLANDWQAVGDVQKKAGNIDAARAAYFRAAAIFRAMGNFEAADNALARGE

SEQ ID NO: 90800 - protein, 53 aa, Unknown
  Obtained from environmental sample
  misc_feature (1)..(53): Xaa is any amino acid
MNFDIELEQEEDGRWIAEIPEIPGVLAYGVTPLQAEAKAKALALRVLAERMEN

SEQ ID NO: 90801 - protein, 203 aa, Unknown
  Obtained from environmental sample
  DOMAIN (5)...(185): 5' nucleotidase, deoxy (Pyrimidine), cytosolic type C protein (NT5C)
  misc_feature (1)..(203): Xaa is any amino acid
MDADSFIFGVDLDGVVGDFYGAMRKIAAEWLDRPLESLTTEVGYGLEEWGIAEFGGYERLHRFAVTQRNLFRDMEPIKDAPAILRKLSNMNIRIRIITHRLFLKYNHKATITQTVDWLDSWDIPYWDLCFMADKGAVGAHTYIDDSPDNIVRLRDHGCNTIIFSNSTNLDLEGPRADNWQDVERLIMEALKEWETGTRNMFAP

SEQ ID NO: 90802 - protein, 290 aa, Unknown
  Obtained from environmental sample
  misc_feature (1)..(290): Xaa is any amino acid
WAHGSGKLPRLPIAQIKEDAAIQRIQGFTGDDSGLAGDLFTLALRYTQFLEQNGLFEPAWETPPFEDMGKECFIFFPESLSDFSEYRELLAASGHVKTISADDAEVQQQPCDVFFYDNSRGEITEAALYILALRKNQNVPWDSISVSIPDDAHYGPYLLREFANRNIPCVKQSGKPLASYPAGQFFAALEGCASADFSFASIKELLLNQHLPWKNSDDIQALIEFGIKNNCITSWKEEKDGKEIAVNVWEDAFTRPFGGIKTHTRRFFEGLKQRVNALCRAGSFSDIRRQ

SEQ ID NO: 90803 - protein, 258 aa, Unknown
  Obtained from environmental sample
  misc_feature (1)..(258): Xaa is any amino acid
MESDIRKPVLNKEQMDAAYCADNAVIAAGAGSGKTLVLASRFAWLITEKKYRVREILTLTFTKKAAAQMYRRIHLLLAEIAREDTGEKSSLARQALDEFTQARIQTLDSYCAGIVKQAANRYGINPGFLIDEDRCRQLAVDEAMPFLINRRSHHAITRFYPHKNPMFIARDIFAAALINFTHFDSSFNLKQDINGQFDLICREWETQSRFITAKVRELAEAYDGNEKYLYELAPILSQFTAGNVIFPDARNIRVFLTN

SEQ ID NO: 90804 - protein, 264 aa, Unknown
  Obtained from environmental sample
  DOMAIN (12)...(262): Protein of unknown function (DUF1015)
  misc_feature (1)..(264): Xaa is any amino acid
MNENKQRLNSLGLEIPSILLPQGVNMGKWPVIACDQFTQDRDYWEKVRTAAEDSPSTINLIFPEVFLSDSDAQKRITDIHSSMKRYLKDGVFGEPKQGFIYIERDTPYQKKRRGLIAAVDLEQYDWKPDSRPLIRCTEGTVAERLPPRMDIRRGAPLELPHILLLIDDNTESLLLALAERAQKQAPVYNTQLMMDSGNVSGWFLDKEEDFGFIADKLDELCRRSVSRYKSSNGNKNPFLFAVGDGNHSLAAAKGIWEEVKKLTL

SEQ ID NO: 90805 - protein, 228 aa, Unknown
  Obtained from environmental sample
  DOMAIN (102)...(135): Tetratricopeptide repeat
  misc_feature (1)..(228): Xaa is any amino acid
TALAFINEARRLAVITDNSSLLIRSGLSLGNVLFAMGNTEGASEAWNKALDEAVFTGNNALAAVCRVHIARGKLLSQGAAQSVRDDVNRELALIKSDEIYIAFAWTVIGLAEKELGRYAAAEDAVRRALAIHERTLSLELAAYDWFMIASFRSLSGNSSGALKALENAIEYDRRTENSWGLANDWQALGDVQKKAGNHDAARAAYLRAANIFRALENNEAAEKALLRN

SEQ ID NO: 90806 - protein, 392 aa, Unknown
  Obtained from environmental sample
  misc_feature (1)..(392): Xaa is any amino acid
MDYGEVSSLLARTVGGFNAVLHTATAVKNTPPFLQTASGSFDLSGRDWLFLRLKCLDEKIAPSVDLAMRVICDADFSDRRRINDLILEMKNEINSSLAPMGHIYSSSRTCRFNSRSKSVEEKYSGISQIEFVNQLSKYDIGEIIKKLQYIREKIVKTGLIVNITGTAVNSAVAEIAQRFSRFGAPSPRLSVEISGNKPAPEVFTSRSLQVGFAALTLNAAPYDTLEQTAEIVLSHQLSTGALWEVIRMKGGAYGAFATSDSLENCVSLATYRDPNPMRSLETFSAILKNSANGKCDEDALEKNIIGCYAKETRPRTSAENGLVDFYRFLCGIEDSYRKRRLERLVSISTSDIQAAFSALGKRETTGSVIIAGTKAAEQAAKALGTEVKTLPV

SEQ ID NO: 90807 - protein, 255 aa, Unknown
  Obtained from environmental sample
  misc_feature (1)..(255): Xaa is any amino acid
VVQDKNKDEALAKLRETGIVHLELSKHAPENFTSVMERKTQTENAIGLIRQFKAPKAKPKPQTSGAWERRRDTGPRRGRRTSDLLGVEEQEPYSADAVNAPDRPELVRLMNNLANDRKNLEDRIAFLGREIIRIKAWGEFDPDTLKALVSNGIAIYPYELSPEIFKNIPKDVRYIKVGEDKAAVRLLILDKEIPDAPSFKLPEKSLSKIEMELAELTNKINALNERIKNFADRRPVLEKEMAEINSKLNFEIAKA

SEQ ID NO: 90808 - protein, 873 aa, Unknown
  Obtained from environmental sample
  DOMAIN (207)...(353): Alpha-2-macroglobulin family N-terminal region
  misc_feature (1)..(873): Xaa is any amino acid
GHQYFRQYRDYQFRDPYLGKNSFQEFLGTKTTNSEGAAEFSLNLAKFEKATYRLSFYTEAFEKGSGRNVSTEAAVYVSPLPYLVGYKADGNLNYISRNSVRALSLIAINPKTEKTNVNNLTLTITEMRYVSALVRQPNGVYKYQSIQKEYPVTTKQINIPAAGLEYRLPTNNPGEYKLSITGADDLEYNSLSFSVAGSDNVQRSLNRTAELEITMNKNDFRNGEEIELMIKAPYAGSGLITIERDKIYAYSWFKSNGETSMQTITVPSDIEGNAYVNVHYLRSQDSPEIFMSPLSYGAVPFSISRENRTNRIKLEIQGEAKPGEDFVIKYSTARRGKIIVYAVDEGILQLASYQTPDPLSFFFKKRALEVKTAQILNMVLPRYSVVQNLAAMGGGGGFDEDEYLSRNLNPFKRKQNAPVAYWSGIIDAGPEVKELRYRVPDYFNGTLRVMAVSVSESAIGVGEDRALIRSAFIISPNSPMMAAPGDEFDVSLTVTNNQKGIGEKGKVRLRVIPSEHFTITGNSEFNLQIPEGKDQTLTLPVKAAGPLGAAQIRFVASNDNETSELSAYMSVRPATPYRVSLYSGAVKNKSVETAIDRNLYEEFNTREVSLSFLPMGIAKGLSFFLNNFPYGCSEQITSAVFPFLYPQLFKELKYTKAQADEGINRAIGILQARMKDNGTIGIWTSRSYDDPLITVYAAHFLTEARNANYYVPSSMMDKLLQACKNIASGSGTSHYDFTNRSYAIYILTLNEIVTTQLIESLKKDMSRNEEIQTGLAGLYLAGNYALLQKTSEASAILGKIRRAIAWDKSFRYVDDLMYHSVYLHIVSRHFPNRLKDISESLLVDMAGQMERQSYTTFSANHALMAINAYMKAV

SEQ ID NO: 90809 - protein, 802 aa, Unknown
  Obtained from environmental sample
  DOMAIN (537)...(802): Alpha-2-macroglobulin family N-terminal region
  misc_feature (1)..(802): Xaa is any amino acid
AIPGAAKKTGACFADQFKNHRGRIAVIIAILCLIPAGFYAYGFYQSRLPQLISVDFRVQTPDTTGNPEDRSKLMVYFRGSAATLEMKDNEVPEGLITINPPIEGVWKWIDDDTLVFSTEQRWKIGTRYTVNFSKDLFPSHIKVNNSFNFETEDFSMRIADNEFYIDPEDSAIKRVLFTIQTNYPIDPSSLEKNITIEPQINADSGSLKKKSYLYSLTYNEDRTRAYIVSESLGMPAKTVEMRLTIYSGVRDANNEGKAAGTMNAYVQIPGMNNFVRVDNVDCITVKNDKQLYDRAFVMETKGTVDINELTKNITVWILPKDLPALPGLRAQKNYDWDSLKEIVPEVLALSKKITLEPLHNALKYSSTNSWKYEAEAGQYIYFKLNEGTKFYGGYVLAEAYENIFRQGSFPKELSILSEGSILSYSGDKRLSIMSRGIRDVEFNIGRIRPDDINHLVSQTSGDVTNINFRNYSFNQYNITEQYTERTTVPVVNDRDIGYFSFDFSRYLDNIPSKNLRHGLFVFNVRAVDSSYSDRRLIIVTDLGFFVKTSADAGKDIFVQSIATGNPVAGAVVTVLGLNGNPIFSTSTDSGGRARIPDFGNTYKNERAPTVYTVVSGEDMSFMAYNTNGRNLDYSTFDIGGIYGASDPKTLRAFLFSDRGIYRPGDEARIGLVIKSGDWAGNLGGTPIEYRVTDPRGAEIYNRRIRLSAEGVEEIRFSTHDWSPTGTYTASVYVIQEYKQGDELRERHVFLGSQTVKVEEFLPDTLSVSAVFNPVPQDGWIAPGELKARVSVRNLFGTAASGN

SEQ ID NO: 90810 - protein, 273 aa, Unknown
  Obtained from environmental sample
  misc_feature (1)..(273): Xaa is any amino acid
MLHSTSLPGRKDMIKKQNLIKLIAASLIFAAFDIWIYTSLLGSYRKYDAANSIKEVSLFAKTAPTDIERIDRINDWLAGLPEIIEGGKALVLGLDENYDFFPLTGDSLVSALWEAHKDSPGFQEGLQSAYYLLPYQLPRGFNVSELRALTGGALGGVESSMKVFFLPIPDESGYDIHGALLMLVPESGGVVFERLLRDLSILAWVIFTVLFAVAVLSRDPITGYSVIFLFAFAFAFVAYPLFESFRLTFFQAGSFTLAIWQETFTPRHLTALW

SEQ ID NO: 90811 - protein, 176 aa, Unknown
  Obtained from environmental sample
  misc_feature (1)..(176): Xaa is any amino acid
ANTSGTAYNVVTTVRYLNNGDENRTFDFLRRLDANIDQYTRSGSAPGQSLAIGEIPIAIGYAHDHVRLKANGANIEINAPSEGTGYELASMSLIRGGKEPVQARQLYDWVLSSPNAQRLFVDDWYLVLVQNGARRHPLALTLDQIRTVNQDMAWDGDAANRKRLLDRWTAEIESRR

SEQ ID NO: 90812 - protein, 413 aa, Unknown
  Obtained from environmental sample
  misc_feature (1)..(413): Xaa is any amino acid
MAVPLSDITIACAASGDLDAAGVLPAEREHHARAGIALDIGTTTVSARLVDLDTLSAIDTISELNDQRLFGADVISRIGVAKNGKTEALFSLINRQTERIINSFKKKWDIPKIEKLAVAGNTTMQHLFLNVDPSGMGELPFTPVFLEGKVLLGEALSLSVESVTVLPSISAFVGADISAGLTVLDILNVPGPSFFIDIGTNGEMALCKDGSIYCCSTAAGPAFEGAEISCGVGGIKGAISGVKFAEDKTAVLSLTTIGNVQPVGICGSGLVDTVAVMLKQGVIDETGFMAAPKNEFSLADGVSVTGRDIRQFQLAKSAIFSGIKILCKSRGLRLSEIKNVFVAGGFGFYINKQNAVNAGIFPVEFLNQLSVCGNLSLQGAEECLGAKDFPMRCEKIISRCTVINLAAEPSFTD

SEQ ID NO: 90813 - protein, 484 aa, Unknown
  Obtained from environmental sample
  misc_feature (1)..(484): Xaa is any amino acid
ISSRKFDVNLSANVSSDQTIFSRFIEQRSYSPDMADRLPASAQYATILSAGTLNELYQAVVVFSPDMDDMIKKADSSARTILGLTLDELLFSWSGKEFAVFGLEGRPHPVFAIQISDERKRQEVFDKAFKSIFLAEDVRLNLDGTRIPRISTPEFFQALLRRWNIFLPSPYYTVYKDFILISESADTLLSALRAMQVNNVLPRTASWSEISGGKDASSSFSLYYSLDLSMPFFMRKNTAISGFLSLYRQGLVRLSFDKGQVDVSLVLVPGSGSGVNLVNSVLVETRDRPNNRIYGSQDNSRIFISAGNTVISVNTSDNSVSEMSGQDKLWIISADGIKEKNTFNAWVVSERGRVTLVNGDLEPAQGFPVLTGIRLSAAPAAYNGKLYLCDEDGKVHSVDANGAQKIWETTFISPLRSPPSFITAKVKTGEIHYAAVYPKSFFGELWLLDTDGKLLPEWPAQLMRVDEDGFTADAGISFGSPILV

SEQ ID NO: 90814 - protein, 452 aa, Unknown
  Obtained from environmental sample
  DOMAIN (286)...(373): Hpt domain
  misc_feature (1)..(452): Xaa is any amino acid
MVTDPNDFAVALRQEEWFFVFSGYGLYEKIKTIMDNAAFPNGKRPPLALMVEFGNEPYIPDVRFISLPIQSLSIANTLNGSADSRNYFSGIGSGSTVRFTFSEARLLVVDDIATNLKVAEGLLAPYKAAVDTCLSGLQAIELVKRASLEMREYDIVFMDHMMPEMDGIETTNAIRSLEGEFFKTVPIIALTANAVVGMREMFIENGFNDFISKPIDVSKLDEMLDRWIPREKKERNSVRPLSLRQTQGADGNAPETEEGNALYSIPGVDTAKGIAMTGGTLDAYKSVLKIFCQDVEDRLPMLHTIPLEETLPEFATQFHALKSASGSLGASEISSQAAKLEAASKDADMIFIYEHLLVFVHNIIELVYNIKEALKYSEPENNSDSSSPAEHSPLFEELAEALKKKNSADIDRIIAALGEEPLDSKTKTALEKISDEVLMTEFDNALKIINSL

SEQ ID NO: 90815 - protein, 477 aa, Unknown
  Obtained from environmental sample
  misc_feature (1)..(477): Xaa is any amino acid
VNNTPAHVHQWGDWATTTPANCTTAGSKTRVCALDATHTETQEIPVDPDAHDYRYVAGSGTAPTCTADGSGNEACTYNPSHTKTGVVIPALGHDYDDWTVTTPPTCSATGIETGTCTHDPAHTSTRAVPIDPDAHDWEQLAGVAPTCTTEGSGSRKCTICETVETLNVIPALGHDDGAWHTASEADCEHDGTKELRCTRDNFVLETAAIPALGHDWGNWTQTTAPTCTTAGEDTRTCAHDATHKETRAIPIDPTAHNWELAGTPPTCTETGSGKRKCKVCNKEETLNVIPALGHDYHYTVTTPATCTTAGVETGTCTHDATHTTTRAISALGHDWGDWAQTTAPTCTAAGEDTRTCAHDATHTETRTGAATLGHDYQNWTATTPATCTTDGVETGTCTHDATHKDTRPIAALGHDWGEWTTETPITSIEQVNVTRTCSHDPEHTETRTESLQEYLSDLPDNTPETAYNIALNVNYIG

SEQ ID NO: 90816 - protein, 422 aa, Unknown
  Obtained from environmental sample
  DOMAIN (4)...(421): Protein of unknown function DUF111
  misc_feature (1)..(422): Xaa is any amino acid
MKTLYFECNMGAAGDMLTAALLELHDNPQEFLKKLNGIGIPNVLIKAEPSVKCGITGTHITVTINGQEEDDHIHDDHDHENSEHEHHHHEHTHDHTHDEHTNSEHHHSHNSYHDIEHLISHLTVSDTVKKNTLEVYKLIAEAESRAHGVPVDKIHFHEVGNMDALADITGVCMLIEELAPYVILASPINTGSGHVRCTHGILPVPTPATANILQNIPMYSDQTQGELCTPTGAALLKHFVKEFRAMPVISVDKIGYGMGKKDFEKANCIRAYIGNTANNIEEVTELVCNLDDMTPEAVAFAQQLLFDEGALDVYTTPVCMKKGRMGLTFTCMCRSEIKDKMVSLIFKHTTTLGMRENTSRRNTLQREQKEIHTQYGTVRIKTAYGYGIRKSKPEYEDIAKIARERGMAIQDVVKEIPPLDKL

SEQ ID NO: 90817 - protein, 341 aa, Unknown
  Obtained from environmental sample
  DOMAIN (10)...(341): Histidinol dehydrogenase
  misc_feature (1)..(341): Xaa is any amino acid
MKIIQAAEFDSFWKQGAAQNDDETESAVKEIIAAVRAEGDAALRRFASRFDKSSPARLEVPLSVVLEAQEEMRLSDPQLYSAIELSASHIKRFCRKQREQFNDFEYEMEKGLVTGQRVIPVQRAAVYVPGGRFPLFSSVMMCLLPAFCAGVEEVLLASPPEEDGIPDRKILAAAAITAEIAAGKLRVFAIGGAQAIAAMALGTESIPRVDLIAGPGNKYVAAAKRLLYGEVGIDFIAGPSDVLVISDNSTTADIAQNANLIAADMIAQAEHDPDARARALLPSGELAEKIIKAVEVQLANLPTAENARSSLESGGLIIVYKEKEEAVRIANTIAPEHLELS

SEQ ID NO: 90818 - protein, 229 aa, Unknown
  Obtained from environmental sample
  DOMAIN (24)...(229): Aminotransferase class I and II
  misc_feature (1)..(229): Xaa is any amino acid
VSRFWNSRVKNISPYVPGEQPRDRKFIKLNTNENPYPPSPKVIKAIQEAANERLRLYPDPQCTALREAVARRYGVKSEQVFAGNGSDEILAFAFAAFFESTSANEVEPILFPDITYSFYPVYADLWDITYRTIPVSEDFSINIADYKIPSGGVVFPNPNAPTGIPVVLSDVLSLAEYLEKRDKVLIVDEAYAAYGAESAVPCINRHGNILTVHTLSKSASLAGLRGGFA

SEQ ID NO: 90819 - protein, 202 aa, Unknown
  Obtained from environmental sample
  DOMAIN (119)...(201): Phosphoribosyl-ATP pyrophosphohydrolase
  misc_feature (1)..(202): Xaa is any amino acid
NLADAFIRSLNWKKCCPSADIKSSLLPLIVQSLDGQVLMTGFTDIEALTETFKRGNVCFHSRSRNKLWMKGETSGSVLKLVRLRADCDRDALLAVAEPAGPVCHTGAWSCFETGKKFTWEFLQSIITDRFRNPPPGSYTATLDDKLVREKLMEEAEEVCTAKTHDEVVWEAADVLYFTTVLITRAGLTVQEVLDELDRRHKK

SEQ ID NO: 90820 - protein, 212 aa, Unknown
  Obtained from environmental sample
  DOMAIN (1)...(149): Pterin binding enzyme
  misc_feature (1)..(212): Xaa is any amino acid
VIGAFRKRSSLPVSVDTRKAAVARAAIDAGADIINDISALSDDPKMAAICAEKGAAVVLMHKKGVPLTMQEAPSYSDVAEEISAFFKDTTKQALAAGIPPEKIVLDPGIGFGKSLKDNLQIIRLLAEICGKDYPILVGLSRKSFIGEITSRNGVAQNAEARLPGTLAANAAAILAGANIVRVHDIKEHIDLARVLFSLQKANRQESNNGMDS

SEQ ID NO: 90821 - protein, 203 aa, Unknown
  Obtained from environmental sample
  DOMAIN (114)...(203): Domain of unknown function DUF147
  misc_feature (1)..(203): Xaa is any amino acid
MEWILNFSSVFDLVRPVLDILILTILLYKTYDLLQKTQAAQILKGAGFLALVYVFAALLRLSTLEWLLRSLAPGLLITLAIVFQPELRRIIIQLGQGELFRPDSKGRLGQLEAVVTAAEILSSERRGMLVVFSRRVNIKNIIDTGTRLNADISSSLIVTVFEFDTPLHDGAMIIQNNRIVAAKCLLPLSEQPNIKRSFGTRHR

SEQ ID NO: 90822 - protein, 210 aa, Unknown
  Obtained from environmental sample
  misc_feature (1)..(210): Xaa is any amino acid
MTPEEFMAVAAESHAKTEATLDRLSENQAKTEATLDRLSESHAQTEKALRKMMRSVDDLSRNLGFVTNRLGSVTEFIVVPKIRLAMNAAGGHKFDSVDSDIKIRTLIGDVKKDVAQMDVFLYNDTEAMAIEVKTTLQEHDVNDHLDRLRKVRAHEEKVGIVGKKLFGAVVGIIVNSRARALALKNGLYVVKIREEEEKLDIETPDSRRAW

SEQ ID NO: 90823 - protein, 239 aa, Unknown
  Obtained from environmental sample
  DOMAIN (47)...(80): Tetratricopeptide repeat
  misc_feature (1)..(239): Xaa is any amino acid
ICGGDISVAEGAPSGTCELCGATVVFEKSVSAPVASGVGVTAVASGIEPLMERGWLFLEDGEWQRADEYFDRVLDMNPKYASAYAGRLCVELKIRKEESLRDNKNLLTGYNHYQKAIRFADTGYRVKLEGYEKVVSDRIAEEQKLEQERRNEEQRQEQKQKEQEKLEQKRLEEESIRQQRLEQERAKQQQRLKQQRLEQRRAEQQQCEKWESQGLCRYCGGQLSGLFTKQCKSCGELNY

SEQ ID NO: 90824 - protein, 141 aa, Unknown
  Obtained from environmental sample
  misc_feature (1)..(141): Xaa is any amino acid
MSDHEKKLNDLIEADVKIIQIVSYETMRVHAMLAKSAKALERDLYIWNRVEGLKKWKPKDNKPVVENADMRNGEAIFRFFDSCDNAILLLEDFHPDMTDRNPENIRRVRNFALKNQPNKTLILSQPQMNLPFELEKEVHVF

SEQ ID NO: 90825 - protein, 663 aa, Unknown
  Obtained from environmental sample
  DOMAIN (160)...(477): Subtilase family
  misc_feature (1)..(663): Xaa is any amino acid
KNIIGSLCLSLLFVVIVPAFADTPQSKSTAASPGDTLRNVWVFFKDKDNGQSVRPVSVRSALRRRKAGFRGSESELPVNIKYIREIERRGGALRTVFPWGNAASFSVNPSRISDISSLPFVKAVSPVGVYVAKKVDDGAKVLLKSKSKHSSAAVSGGYDWHTEMVNVPLAHDYLRYKGLGVPGSGVVMAFFDGGFRLDHAVYKRLREKSQVIAAYDFVDGDTLVADPDSVANNPRHIYYQNDRHGTQTLSLAAAYVPGVYMGTAFGASFALARTEDDSVESHVEEDYWAAAMVWADSLGADIISSSLGYRDGYTDSTDYKYYDMDGATAIVSIAAAEAVKRGMIVVNSIGNEGNRTEGTLTAPADVDGVVSVGSVTQNRTLSDFSSTGPTYDGRMKPEVVAPGSVISVPEPYPPYKGAPPYITVDGTSFSAPIVSAIMALILQANPSISQQAAKDRLYASCSFAVGQTALDNKFGYGIPNAALAIMDAKEIFLKITDSAKKSLPGAVAVLDERTYTADTAGNILIDAPTFRSGDTLRIQISYRDHQLPDTIKVGALPFASVVEMDKKWDDGLKVLPNITRKDGVISGWYTITGTNASTPIVVTVSTLTGKKVWRQRLRPRPDGKADFQWDVKGIKGGGAASGVYLIAVRHGYSMVCRRVVVSN

SEQ ID NO: 90826 - protein, 182 aa, Unknown
  Obtained from environmental sample
  misc_feature (1)..(182): Xaa is any amino acid
MVGTNANKKPLPVDKSLFDRVIEGGSYYVDKTLFIKDLIDRDAEVILCTRPRRFGKTLNQTMLKCFFEDTAPIGGKDTRALFRGLKIEEAGEQYMEYQGKYPVIYLTFKDAESESFDETCRMFKDMLSAEFRRHGYIKEKIGDAEDLKKFESLSSSDTDISSYKDALKFLSKCLERYHGEKA

SEQ ID NO: 90827 - protein, 113 aa, Unknown
  Obtained from environmental sample
  misc_feature (1)..(113): Xaa is any amino acid
LVNGGTMKQFDIYTTVGGTYSTKPRPAVIIQSVAFDDFDSLTVIPMTTIEVNSDFRVKIEPSEENNLGIVGFVMIDKLTTIKKSGLGEYIGHIENKYIDQIENALLKFIGLKR

SEQ ID NO: 90828 - protein, 252 aa, Unknown
  Obtained from environmental sample
  DOMAIN (8)...(172): Xylose isomerase-like TIM barrel
  misc_feature (1)..(252): Xaa is any amino acid
ICSENLSAEKLNEVKKTAAECGQEIVALCGELGGHGLELAGDNQRKIDYLKKVTDLAIELDCRIVTTHIGVVPADQGSDKYRVMREACSSIGAYAAERQVTIAIETGPEPVTRLRQFIEACGPGLGINYDPGNLVMVTNDDEVAGVKTAGAYIVHTHAKDGRMNHYAGPEEVYGLFAKGGIEAISKVSEWFTETPLGKGSVRWIPYLTALREAGYNGYLTIEREVKENAAEDIRAAVTFLREIIPQIEGGSK

SEQ ID NO: 90829 - protein, 91 aa, Unknown
  Obtained from environmental sample
  misc_feature (1)..(91): Xaa is any amino acid
MPNYLSRNPMLYPVAGFLALISLGTILLLMPFSSKDGLSFSDALFMATSASCVNGLTVISVGHELSFTGQFILLSLIEVGGIGIMAISTII

SEQ ID NO: 90830 - protein, 430 aa, Unknown
  Obtained from environmental sample
  misc_feature (1)..(430): Xaa is any amino acid
ELQNKFAASLNEQAVKSSFLYNQTAADIYERSKVFGILLESVSGLQAVQFVDSNGVRIHYSTSARDLLSQSSNSASYRNYTDDSRALPYDDISAGANEKTKYTMDDSGDRIIFSFPFYDSMDVYRGTALFTLSVRALAERLITAGCLNPTDDISVIRIPRGVVFGSPNTSKSVILDKIASVWNAGFQEYVTLDAEDAGVKYALISVKTGNDLFFGRIINDSIFAIPGSMRYIFKLSMFLTLFLTLYFLINFKPHPVTLVQNRIKTLRTNLFEELYIKKTGQDRAKWILELEQRRDEIRSELKSRLKIRRSLEKKIDEIIDKAWDELLAVMKSGYDIASLEEIVKTRAVKVEKPKAEGPKTVWDEIKELEEIDEAEPVEEIEAAESVEEIDEIEEIEEAEESDYAQEEVESLEDADEIEAALTGARRVQSA

SEQ ID NO: 90831 - protein, 522 aa, Unknown
  Obtained from environmental sample
  misc_feature (1)..(522): Xaa is any amino acid
VSTFKKTALVLIISSLLFAGMVYLLDFEPLDFVRTRFYNPSFVSSIVKENEKAAEIVQNHILELQNKFAASLNEQAVKSSFLYNQTAADIYERSRVFGILLESVSGLQAVQFVDSNGIRIHYSTSARDLLSQNSNSASYRNYTDDSRALPYDDISAGPNEKTKYIMDDSGDRIIFSFPFYDSMDVYRGTALFTLSVRALAERLITAGCLNPTDDISVIRNPRGVVFGSPNTSKSVILDNIASVWNDSFHEYITLDAEDAGVKYALITVKTGNDLFFGRIINDSIFSIPDSMSFVFKLSIFLTLFLTLYFLTNFKPHPVTLVQNRIKTLRTNLFEELYIKKTGQDRVKWILELEQRRDEIRFELKSRLKIRRSLEKKIDEIIDKAWDELLAVMKSGYDIASLEEIVKTRAVKVEKPKAEGPKTVWDELKELEEIDEAEPIEEIDTIEEAESVDETDEIEEIEEAEELDSVQEEFETLEDADEIEAILTGTRRVTAAEEIKSYTEIQISKGLLKAANEILTKIK

SEQ ID NO: 90832 - protein, 120 aa, Unknown
  Obtained from environmental sample
  DOMAIN (4)...(118): CobW/HypB/UreG, nucleotide-binding domain
  misc_feature (1)..(120): Xaa is any amino acid
MSYVKIGVGGPVGSGKTALIERLTRKMADKYSICVVTNDIYTREDAEFLVKNSVLPPERIVGVETGGCPHTAIREDCSMNLEAVEEMARNFPDVQIIFVKAAAIIFPRHFRRSLRTLPFM

SEQ ID NO: 90833 - protein, 237 aa, Unknown
  Obtained from environmental sample
  DOMAIN (51)...(197): UreF
  misc_feature (1)..(237): Xaa is any amino acid
MIITMITTITDINMDTTIESRIALLQAFDPLFPTGAYTMSGGMETYTQKGLVKDKSTLVSYLKAQLYILPYGDLGVCAKTAQGEDFILMDSLCAAMKQPCEIRTGSEKICTRFLKAQETLCGYPSLAAYRLAIKQEKCKGHYPVAVGLFIRDLKANIGEALELYCYSLLSQTVNHAVKLIPLGQSDGQAALFEALSLIPGAAQKAMAADVDGLGVSGCGFDLRAMQHETLRGRLYIN

SEQ ID NO: 90834 - protein, 270 aa, Unknown
  Obtained from environmental sample
  misc_feature (1)..(270): Xaa is any amino acid
MQAQIVQRARIILLKADGIPIDKIADKIGIDRKSIMLCIKKYKANGADNALYDAPGRGRNPEITDDEKAWIMNIACQRPYEIGCPEEIWTYTRLTAYINKNADAAGYTRLSTISRSSIRNILDNAEIKPHKIRYYCEKRDPDFEIKMNKVLVVYKQIELQFDEEGQLLPAKGIKINTISYDEKPGIQAIAATSPDRMPTIENGVRQRDNEYVRLGTLSLLAGIDLLTGEAIPLLRETHKSSDFIEFLQILDAKYPPGEIIRLILDNHSAH

SEQ ID NO: 90835 - protein, 329 aa, Unknown
  Obtained from environmental sample
  DOMAIN (5)...(326): NQR2, RnfD, RnfE family
  misc_feature (1)..(329): Xaa is any amino acid
MADMELLLKQNPLVNVSRSTAARMWLVAICAFIAALQSAVGDSFLSLIIALAALVSALLTELLITYKTHGFGKIKDGSAAASALVLALLFPNQIHPVYAALSAIFAIAVVKHSFGGLGANWMNPALGGWLFARFSWPHAFSIALNGSMISLDETGTAVGNMVNSSLNRTLFSFLGAELPPGYIDLFALKTPGIIADRAVLALVLATAVIAASQISRSWLSFVYLAVFGLLARMLGDNSGSLWDGDVLYAFLSGGTLVTAFILISDPSTGAKSMPGGCIAAVLAAVLGFIFRFYGREFFGCLYAAALVNTLIPLLYKVERRLFYSAREQI

SEQ ID NO: 90836 - protein, 297 aa, Unknown
  Obtained from environmental sample
  misc_feature (1)..(297): Xaa is any amino acid
MTYTREHGKIEVTKNRVIGEVNAWINGPNALKDKVDHPAPFIINGKDTYVIRMGVPITRGSTNEVVGHLAVLMDTASIQALVAQTIQDYEEISQMAVYSGNGCIMGNLRPDRVGKFLLAVDRLYGIYQEDANQAVLEGKPFNCSSYSNSLKTNVKIEMAPFRIGNSDNTWSVMIAATEKYIMRNVTAMRNFVIVMTAIAISSAVVVIFFALLGSIKRINNNPQKIRGLFSYAIILLIILAFALMVMLSSVFMSRIVTRQLAENAHAALDYLESNITIDLKEPRTLLGGASETVRQMI

SEQ ID NO: 90837 - protein, 313 aa, Unknown
  Obtained from environmental sample
  misc_feature (1)..(313): Xaa is any amino acid
METLPFLEDIYPPNLLYAVTIRSPVARGKLINVDVPLLPDDYTFITAKDIPGKNRLENTNIPILAEENLNYIGEPIGILLGPDKTKLEEFSSRCIVLDDEENAIFSYGNENTLVIKREINTGNTFESFNETGRIVTSSYKTGIQEHWYAEPIGAISWLNTEQENDIKEGINYPIIIRTATQWPYHVKRAVTSVLNIDASLVSVEPTCLNLHMDGKLWYPSLIACHAALGTFITKKPVRLILSREEDFLYTPKRCGTNINIVSAIDDKGDINAINIDISVNLGAYEVNGNEILDKICLGTVGLYNFNKINLTAK

SEQ ID NO: 90838 - protein, 316 aa, Unknown
  Obtained from environmental sample
  misc_feature (1)..(316): Xaa is any amino acid
MIVPMKKVSLLVMDREKDAALEKIRELGVIHLERKPASSPALTKLMDRRVQLDIASGVLSAFTPKKKSKDKAPTPKFDGDLARHVVALSDRRKKLQDYIFNHQREMSRFEKWGEFEPKDFAYLKAHGINAQLYDITSVSYEKNARDVPHIVLYMDKKNHSVRLLAFDTIPNEHPYLIPERPLSLVNERDKVRKAEMVRIEEELTALSSLKKQIEDQKVSLLSDIEYETANSGMERIENDAAAPDVNISWISGYVPASDMGLLKRAASENGWAFCAADPAEDDTQVPTKLKNNKLTELIYPLTGFWKCRRDTGKRTS

SEQ ID NO: 90839 - protein, 247 aa, Unknown
  Obtained from environmental sample
  DOMAIN (84)...(246): DEAD/DEAH box helicase
  misc_feature (1)..(247): Xaa is any amino acid
VPDIFDFHENVVGNFERFSRSFTSIRAEDIRKVVDTEYANKRYWPAPLIQINPNYEKASTIADLVKDNTLHPVCGEVFRGFHLYTHQQEALAIAQRKESFVVTAGTGSGKSLAFFLPIIDSIIRAKEKDSSPRTRAIIIYPMNALANSQMDELKKYLDNFIESNPGEKPPFSFARYTGQEDGEERKIIAQNPPDILLTNYMMMELLLTRYNDEDRVVISHCRGLEYLVLDELHTYRGRQGGDVALLI

SEQ ID NO: 90840 - protein, 255 aa, Unknown
  Obtained from environmental sample
  DOMAIN (108)...(255): Shikimate kinase
  misc_feature (1)..(255): Xaa is any amino acid
ALHYDADIIVNTTPVGMYPNNGNSPLSLAGFKQLTGVADLIYNPTRTKLLLEAAELGITRVNGLVMLVAQAEMASRLFLNGPARPELVNKIYNAILKRTQNIALIGMPGCGKSTVGRLLADKMGRPFADIDAQIEAAAGKKIPQIFAEDGEETFRQLETRVLAEEAKKSGMVLATGGGAVTRPENLDLLRQNSLIVYLKRELTDLITDGRPLSQGVGIQALAEKRLPLYEAWSDYAVQVEAKPEQTAAQIEEVIQ

SEQ ID NO: 90841 - protein, 408 aa, Unknown
  Obtained from environmental sample
  DOMAIN (99)...(203): Shikimate / quinate 5-dehydrogenase
  misc_feature (1)..(408): Xaa is any amino acid
MKKTFGLLGEKLGHSFSPLIHGYLGEYDYSLYEVSAGNLDSFMTDRRFDGINITIPYKQQVAPYCVTLSDEARKTGSVNTIIKDSDGALHGYNTDYHGFCVMLEQGGIDPKGKKALVLGDGGSARTVRAALAGLGAREIVTISRRGEDHYGNIERHYDAEVIVNTTPVGMYPDNSNSPLRLTGFRQLTGVADLVYNPTRTMLLLEAERLGIPCVNGLTMLVAQAEMASRLFLSCPARPELVNRICCAILKKTQNIVLIGMPGCGKSTVGRFLAQKTGRPFSDIDRQIEAAAGKDIPQIFADDGEEKFRQLETRILAGEAKNSGMVLATGGGVVTRPENLDLLKQNSLIVYLKRELTDLITEGRPLSQNMGIQALAEKRLPLYEAWGDLAVQVEAKPEQTAAKIQEVVQ

SEQ ID NO: 90842 - protein, 343 aa, Unknown
  Obtained from environmental sample
  DOMAIN (9)...(342): Chorismate synthase
  misc_feature (1)..(343): Xaa is any amino acid
MSSQYGKKIKISIFGQSHSPAIGVNIDGLPAGIKIDTDELRAFLKRRAPGQSDISTARKEDDAPEILSGLAGGITCGAPLAIIIRNEDARSADYRELRDIPRPSHADYAAHIKYGGHQDVAGGGHFSGRLTAPLCAAGGICLQILRSLGIYVGAHILRIGGANDDPFDPVDVSAGDFDVIQRNPLPVLRREAGEAMRLRIMEAREKSDSVGGVIECAAIGLPAGLGDPMFDGIENRIAGIVFGIPGAKGIEFGSGFTGAECRGSENNDSFYMDGKNVKTRTNNSGGILGGITNGMPVLFRVAFKPTPSIGKEQNSVSLLREENAVLQVKAGMTRVSFCVRFRV

SEQ ID NO: 90843 - protein, 417 aa, Unknown
  Obtained from environmental sample
  DOMAIN (1)...(410): Peptidase family M50
  misc_feature (1)..(417): Xaa is any amino acid
LAARLVKIDVEAFSIGWGKPILKKKLGTVEYRLGMFPAGGYCKMKGESDYIEAWEERNKGIMPEKGSYLAASPAARILVCFAGPFFNLLFAVILLSFLWGIGFEIQTLGNKIILASEIMPGEIYPADTAGFKTGDRIIEIAGHKVSYYHEIQENIAVNPNKPLPVTVERDGKIIQLEVTPALEKSSGAGRIGVSFWTDPVIETVKDGSPAAKAGLMPGDTVTAANGQPLRNSFDLKKVLEQESGALVLEYERNGIMRQAVFNTKDFEEEIGFSWAQINYRTPNLSFPAAVLKGAKESIKTLTLSIKSLRLLFMGIDLTQAVSGPVRITYLMGDMAAKGGLRSFVELIALISIALCMMNLLPLPIIDGGMILLFLVELIRKKPAHPKAISIFQTCGIVIIFCLMFFALFGDIMYFVRG

SEQ ID NO: 90844 - protein, 287 aa, Unknown
  Obtained from environmental sample
  misc_feature (1)..(287): Xaa is any amino acid
MPPRTLQIRNSTAEFLIFTKQAGESGKSSSGLIEVRVQDRTIWLSQKLMSALFDCSTDNISLHIKNIFAEGELDEISVTEDFSVTAADGKNYRTKHYNLDAIIAVGYRINTRRATAFRQWATSVLRDYALRGYVIDRKRMENGAFLDEDYFEHLLAEIREIRLSERRFYQKITDIYSTAMDYNKNAPVTKEFFAKVQNKLHFAIHGHTAAEVIYERADAAKEHMGLTTWENSPQGKIVKTDVVIAKNYLTETELESLGRIVNAYLDLAEDRAKKHIPMTMEDWAKRL

SEQ ID NO: 90845 - protein, 590 aa, Unknown
  Obtained from environmental sample
  DOMAIN (81)...(146): His Kinase A (phosphoacceptor) domain
  misc_feature (1)..(590): Xaa is any amino acid
MENISKFEWINWKGESVVGYFKTLSNGWRLGLFAQKKIYYEPVYQMAFILGILGFVLASVLIIVLIHVDAARVKSDIENRHKSAFLANMSHEIRTPMNAIIGMTMIGKTASSTERKDYCLTKIQDASNHLLGVINDILDMSKIEANKFELTPAEFDLEKMLRRVVNVINFRIEEKHQKLSVHIDRAIPRILIGDDQRIAQVITNLLWNAIKFTPDKGSVSLSTRLAGIGSDICTLQISVTDTGIGITPEQQKRLFQSFEQAESSTTRKYGGTGLGLAISKNIVEMMGGSIWIQSEPGKGSTFTFTIQLERGKEEKQKRLLDVSLKDIRILAVDDDPDILTYFLEIAQGFGLFCDTAISGEKALELVDQKNDYHIYFIDWRMPVMDGVQLAREIKERKSENSIVTMISAAEWGAVAKEAKAAGVDKFLSKPLFPSTIAEVINECLGVQKQKTEDTQAADINGIYAGRRILLVEDVEINREIVLALLEPTKLEIDCAENGAQAVRMFGEAPRKYEMIFMDIQMPEMDGYEATRKIRSLDAQEAKTIPIVAMTANVFREDIERCLDAGMNSHVGKPVDFDEVLNRLRAYLPVN

SEQ ID NO: 90846 - protein, 296 aa, Unknown
  Obtained from environmental sample
  DOMAIN (18)...(296): TatD related DNase
  misc_feature (1)..(296): Xaa is any amino acid
VTNYHDDYSSFLIPHSSFVDAHCHPFDLAVCLPTAEEERRNLGINCASSAATLEEFEYCERLSIQAKQDKAAPLLPCFAVHPQMALITKTTPNVTRYSLRDNLSVLDALARQGRLCAVGETGFDLYNADFRETEKTQDELFAVHLETALQYGLPLVIHSRRAMHKIFASAESLKKCRALVFHSWSGTQGEGEALLRRGINAFFSFGVAITLNHKEAMRCCAAFPAERLLTETDTPFQPPRGREFSRYADIKTVLSAMEALRAGGGAVSGGAVNGGAVNGGTKMEKIIETNFRAAFC

SEQ ID NO: 90847 - protein, 365 aa, Unknown
  Obtained from environmental sample
  misc_feature (1)..(365): Xaa is any amino acid
VPAVFSVPAGFYPVISADLLPGKDAAFDAGKLHCELLPALTRLSVPAGLISPGAMPLTLKGERVDSFRQTYANMPPFPEPIPADPGLVLSWPVANWRDKRYEVFRWEKFPSLLIFDFADYAVQDRMLKRLAFFVEKKGFRGRLAPDSEIAELHAWNAHDYRAEDLVRFFQKARDLQFPLLAEERELERILFNADIIRGADGGKITAGEGGIISISRESNDYLRSLFMAHEGFHGIFFIDEDFRDFSRKRWRQLSAQAKRFIVSYFGYQQYDIADEYLLINEFMGHILQQPASQAGHYFGSTLPSRLETSWRKQDLPPKDEGPPGSQGSWPVLAEAFTREAQAFSNYVANRWGLAAGRVNMIKISN

SEQ ID NO: 90848 - protein, 328 aa, Unknown
  Obtained from environmental sample
  DOMAIN (1)...(320): Protein of unknown function (DUF1432)
  misc_feature (1)..(328): Xaa is any amino acid
MPTIVVVGIVFLAVIALIIFAYISSAVKLWLQAIFSGCPVGLLSIIFMRLRKVPPVEMVEAKITSVKAGIELSTDELESHFLAGGNVTRVVLALIAADKAGIPLSFKRAAAIDLAGRNVLEAVQMSVNPKVIETPRIAAVAKDGIQLVALTRVTVRANIDRLVGGAGEETILARVGEGIVTTIGSALSHKQVLENPDSISKRVLEKGLDSGTAFEILSIDIADVDVGKNIGAELETDRAEADKKIAQAKAEERRAMAIAAEQEMKAKVQEMRAKVVEAEAQVPMAMAEAFRNGNLGIMDYYKMKNVAADTQMRETIGGRGPQSDGNKG

SEQ ID NO: 90849 - protein, 59 aa, Unknown
  Obtained from environmental sample
  DOMAIN (3)...(59): SecE/Sec61-gamma subunits of protein translocation complex
  misc_feature (1)..(59): Xaa is any amino acid
MKKLIQFIKESYAELRKVIWPSREDAISSVKVVIVSTVIIAAVLGLLDILLLIGVRAIF

SEQ ID NO: 90850 - protein, 83 aa, Unknown
  Obtained from environmental sample
  DOMAIN (13)...(81): Ribosomal protein L11, RNA binding domain
  misc_feature (1)..(83): Xaa is any amino acid
TIYADKTFTFILKTPPAAVLIKKAISLEKGSAEPHKVKVGKLPKAKCEEIAKLKMPDLSANDVAGAMKIIAGTARSMGVEVEK

SEQ ID NO: 90851 - protein, 338 aa, Unknown
  Obtained from environmental sample
  misc_feature (1)..(338): Xaa is any amino acid
MTRFSFNRLGRALSVASAAVVGAVFSVGAAQDSSYIPIKVNVDATVTAVPKSTAEGAETVTLALTANTVDTLILPYVMTTGVTYFAGQRHANALSIVANKSGNITVNLPAQSYKNAEVALYTVNGKRVMSRKVSSSNAVNVISRGNAATGVYLLSVRGANNEAVTARLTHSGGGLSINAAFVGGSVADARKLSKEAADVVMTWTVTVSPTDEEYKDSVFTIQPNKWNNPLKTITLKEKPQVVDVVKGTFTDERDGTTYKKITLTSAKLGAVTWMAENLNYATRESSGNGAWCYGNDDAKCVTYGRLYNWETAMIACPAGWHLPTRDEWGALVRACGGT

SEQ ID NO: 90852 - protein, 433 aa, Unknown
  Obtained from environmental sample
  DOMAIN (116)...(279): DHH family
  misc_feature (1)..(433): Xaa is any amino acid
MRDYAKISYKFGFRHRGTITIIWGIGNRDRGSLVYYAEFRYFETSMKWEKKDIPPEKVKEISAKYGCDLLTASILTRRGITSGGSIKFFLEEDERFLHSPFELPGMEDAVERILAAKEEGEKVLVFGDSDVDGITGTVLLTEYLESMGIDVSWRIPGADDPYGLSLEAVKEFAAAYGTLIITVDCGISRLDEIKLANELSINVIVTDHHEPQDELPDALVIINPKLKDTTYPFKDLSGCAVAWKLVSALRFAQNSGLYGQPMCLLNTRPLNDAWIVEAMKMRNLTVIANVSETIIPGKLHISETRLPAFLEGQQILVWDAPLQKRVIAKLFGTGVEIGMLDVAPEIGKVIPSVAGKSLLRIKELSAVAKYSDKEAGELDVFANLFRSYARKKEKKESAGTAVPVYDMQLAALGTIADIMPILDENRIIVRSGV

SEQ ID NO: 90853 - protein, 187 aa, Unknown
  Obtained from environmental sample
  misc_feature (1)..(187): Xaa is any amino acid
MPQSAPKLNLSKSMQMYDEAQKLSPGGMMGIRRPYNFIPGEYPIFLERGYGGHIIDVDGNDYIDMLCAYGPIILGYDEGEINDAVIRQMEKGFCFSLVQPIQNELEQKLIDLIPSAEKVILVKTGSDATSVAVRIARGCTDKNTIFRCGYHGWHDWAVEVHGGVPQCVQDLTVEFEYGDLAELEAKL

SEQ ID NO: 90854 - protein, 409 aa, Unknown
  Obtained from environmental sample
  misc_feature (1)..(409): Xaa is any amino acid
MIKVEDTFNFIILPRPFYKNGVFDLTVKGRDYNFLGTMNPLRVDLGYKYDEDKQHSFLLGVYIDTPFKALGYYWNVKFDNTVQYRVNAPFAYQNTTGISMELPFRSTTFTFGLNENFFLHEEKPDWAKEKKDIHGMPIYSPYHEGLYMSTNPYISWKIPTGLLVPRVGELIYTPSISAIINHEFPQWPLDDFLKGPFLNFSHTLGFEKIDWHANYREGLSVFMGNSYQYDFNQMFYSVSLDITGIGHHIIRDFFAVSSRLMYKYWHSSDESWEGEYVSYYLRGIADKSIIAYQMFSLNMDFPFRLFVFTPSQWFNNRKLSFFDFEMHASPVIDLAVYYQRGFDKGKLLYYPGETAAAGGIELVVFPAFMRNLYVRLGFAINLKEFITARPLRLPDGDDREIYLIMGHFF

SEQ ID NO: 90855 - protein, 470 aa, Unknown
  Obtained from environmental sample
  DOMAIN (2)...(267): ABC transporter transmembrane region
  misc_feature (1)..(470): Xaa is any amino acid
MPFISLASDPGLLDSGWYKKAFDFFRAASAESFIIGLGIGIICFYIFRAVYSFLVTYSLNRYSFGLYKHFSKKVLATVLSVPYKLYAVKNSAELMRTITNEASEVGRITLNILQLCSELFTVIMVYAVIILLNWKMTLIVSAVLLIIVLLLLAILTKENKVQGEKRLASGRKMNRVLKESMGNFKYVKLKGNEENILSAYVSTVETYTRSEVVNNVLGNMPKNILESLGFSFLVAVVVFIIWVYHDASKVIPVISMYALALYRILPSIHRMLLNVNNIIYLQKCMEGVEESLRQPVEKEGDAPLEFKSFIRLEDINYRYITGNEVITDVSLEIKKGENIAITGESGSGKSTLVDIIIGIHKPLFGKVYIDETVITDDNIRSWRKKIGYIPQSIYLFDGTVAENVSFGSEPDEEKVKRALQMANIWDFLATKDGGETMVGEGGIQLSGGQQQRIGIARALYDDPDVLVLDE

SEQ ID NO: 90856 - protein, 189 aa, Unknown
  Obtained from environmental sample
  DOMAIN (33)...(165): ABC transporter
  misc_feature (1)..(189): Xaa is any amino acid
MPILEARNLTINIRRGKKYYTAVDGIDFKIDAGEIIALAGESGSGKSLTALSIPGLLSARAKIAGGEILYSSDGRTVDLSKIDEKSLRQIRGKEISMIFQEPRQSLNPLMKVGAQITEALELHSHTDDFRREYLPHARASARNVERVFGDMQHGISPNKIPFKNNVTGRTTANRLAMEMLEKLQFPQPE

SEQ ID NO: 90857 - protein, 85 aa, Unknown
  Obtained from environmental sample
  misc_feature (1)..(85): Xaa is any amino acid
MKVLPKEKTYFTYADYKELELNEGERFEIIRGKAFAMPAPNASHQAILAALASQFSDFLQDKPHKVYPAPYDVRLFYKEDESDDT

SEQ ID NO: 90858 - protein, 49 aa, Unknown
  Obtained from environmental sample
  misc_feature (1)..(49): Xaa is any amino acid
MEFLKDLWNFMRQRKKFWLLPVIVILVLFGFLMVFTSGTAIAPFIYTLF

SEQ ID NO: 90859 - protein, 350 aa, Unknown
  Obtained from environmental sample
  DOMAIN (56)...(331): GDSL-like Lipase/Acylhydrolase
  misc_feature (1)..(350): Xaa is any amino acid
MGQLPYRCPDPLFGVRLIPNAAYEQMGEGYSSGRINSNSLRDRDIPYENPENSKRILILGDSFMEALQVDLDSSFPRLLQTFIGEALLRHNVKTINAGRSGMGTAEEYLWYVTEGVKYSPDLVLLAFYAGNDFRDNSKELSGQAAFKPYIMFDADTFWVDASFSENRSYKIRALFWPLFNASVLAAETARRIEVFRRGAAKANGAPCPMDLGVFNVKQDGAWESAYTVTGKLVALLYDAVKRNGSAFCVMIIPDSYQVEDTESECVKGADLRKPNRFLQEVAETRGIPLFDLTDAFEQERSRTGDYMYGFGKTLGTGHWNEKGHRLAARTIAADTAFQRLCFPGAGTERL

SEQ ID NO: 90860 - protein, 590 aa, Unknown
  Obtained from environmental sample
  DOMAIN (1)...(386): DNA gyrase/topoisomerase IV, subunit A
  misc_feature (1)..(590): Xaa is any amino acid
MKYHPHGDASIGPALVVLANKELFIDRQGNFGNIYTGDEASAPRYIECRATPLSKDIFYNPKLTEWTDSYDGRNREPLLFPAKMPVVLVMGAEGIAVGMSTKILPHNAVEVLEAEIACLSGKKFELYPDFPTGGLMDVSEYRDGSGKVLVRAKLDTSDPKRILITELPFGSTTESLINSVEAAAKTGRLKIQGINDFTTDKVEIEVKLARGVYAQETIDALFAFTECQQSISVNLLVIRNGLPAIMTVTEVIQHHAKQLVKILTKELELEKKELSDKLHLRTLERIFIEERIYKGIEKMKTAKGVQEAVITGFKPFMKEIGPRGVSEDDVEHLLRIPIRRISLYDINRAHDEMLQIQARIKEINAHLKSITAYSINFLKGIIAKIQANEELGKGVRKTKVGAFDKIDVKEAARKDVELKYDKKTGYLGTNVAGVKVAEVSPFDRILAIRKNGMYTVTDLPEKLFIGEDAWWIGAADKEELSKTIFTIIYREKETGLACIKRCVIEGWIMNKDYFLVPDGALVLHIDTRPKFTFTLKYTPKPRLKVLSEDFKAHAYPVRGLKAGGMRLSNKQVSKADVSKMDIGRKKDDDA

SEQ ID NO: 90861 - protein, 100 aa, Unknown
  Obtained from environmental sample
  misc_feature (1)..(100): Xaa is any amino acid
MEFHPISELDAKTSPEVLAKARKLYEQDSLNIKLKELRGKYGIKQSDVSSFSQTAISKLERRKDLKISTLIDYLESLGFGLEITALPKGKNTAKEVLLRV

SEQ ID NO: 90862 - protein, 228 aa, Unknown
  Obtained from environmental sample
  misc_feature (1)..(228): Xaa is any amino acid
IEHPQNFINETRFGKGVDYKLTGAADYTLTGKTAYSFCMCPGGVVIPCASEPNGVATNGMSYSRRNSPFANSALIVPYEVGKSDVKSGIAFQRELEQRAFEMTGKNYSAPKQSAENFLAKKSGDYNLWDLMPENINTSLEAALYEFENKMPGFIKNGLLIAPETRTSSPLRIVPKENGESVSVAGIYPVGEGAGYAGGILTSAADGARLSIFLYLNSPSKFSPEKLAK

SEQ ID NO: 90863 - protein, 180 aa, Unknown
  Obtained from environmental sample
  misc_feature (1)..(180): Xaa is any amino acid
MPYSFENAIADKLADKHKQGLLRSLCQPSGVDFSSNDYLGLANHFEIAKAAADAYIKYGAGSKGSRLLGGNHKIFEETEKWLANWKGTEAALIFNNGYSANVGVISSLCDSKTHLFCDRLDHASMLDGYAIGGGKLHRFKHNNPADLEKALKEVEPESFKLIAVEAVYSMEGDIAPLKDY

SEQ ID NO: 90864 - protein, 391 aa, Unknown
  Obtained from environmental sample
  DOMAIN (60)...(282): ABC transporter
  misc_feature (1)..(391): Xaa is any amino acid
MWARLGTMHCPTHNRALQKYNASELTRHLYEKGGEDLVVIYSKNEILDRVPLTEKNRTRLLDSIEKAYSENEGKIKIGNQHYSNFLCCPNCDFSFAEELDPKNFSFNSHFGACERCQGIGDIFGSICPECKGERLKPEFLAVKIDGKSISDACNLSISEAYEWFSNIPFNKTQKIIADPLLKEILGRMEFIINVGISYLGLNRRGDSLSGGEAQRLRLAGQIGSGLEGVLYVLDEPTIGLHQSDTQKLLDSLYKLRDLGNTIVVVEHDLEFIRASDYVVDLGPRAGEFGGEVVATGTPKEISNAAAKFPHSITIPYLAGKKTLCDTEHKALDMSQEDNFFELNNLEKNNLKNISVKIPFGAITAISGVSGSGKSTLMECIYDYAEKKKKPV

SEQ ID NO: 90865 - protein, 466 aa, Unknown
  Obtained from environmental sample
  DOMAIN (204)...(458): ABC transporter
  misc_feature (1)..(466): Xaa is any amino acid
RLTTGLKNIPFNGTQKIIAKPLLKEILGRMEFIINVGISYLGLDRKGESLSGGEAQRLRLASQIGSGLEGVLYVLDEPTIGLHQSDTKKLLDSLYKLRDLGNTIVVVEHDLEFIKAIDHIVDLGPKAGEFGGEVVATGNPKELSNTKSIKKFPNSPTVKYLSGKKALEDTKPLGPPPSPLAPDFALKNLTKNNLKNISVKIPFGAITAISGVSGSGKSTLMECIFSEAEKKRKPVCFIDQTPINSSPRSTPVSYMSILDKLRDLFAKLPESKIRGYDVGRFAYNKEGGRCEVCEGRGYQLIEMHFLSDVWELCEACKGKRYNNETLKVLWNGKSIADVLALRIETACEFFKNMKRIEKPLQILNSIGLGYLRLGQATTTMSGGEIQRLKLAAELCKSNSESTIFLLDEPTTGLHLQDIQPLWNHLRKLSSAGHAVVFVEHHPDMIKLADYEIELGPEGGVKGGYLV

SEQ ID NO: 90866 - protein, 146 aa, Unknown
  Obtained from environmental sample
  DOMAIN (27)...(146): ABC transporter
  misc_feature (1)..(146): Xaa is any amino acid
MIVLEGISKSYGAVTAVRHVDLTISRGCIFGIIGRSGAGKSSLLRTMSLLETPDTGKVYYGDERVDTLRGAALLERRKKMGMIFQNFNLLGSRDVMGNIAYPLEIAGYNRKQIEKRIDELLEMVDITDKRKARMRELSGGQKQRVA

SEQ ID NO: 90867 - protein, 497 aa, Unknown
  Obtained from environmental sample
  DOMAIN (135)...(384): Penicillin binding protein transpeptidase domain
  misc_feature (1)..(497): Xaa is any amino acid
AAWRWFGRSSNDLSWAEAAVLATLPNSPALIHPGRNRETLKAKRDSLLNKLFKKGYFDEETLALSVAEPLPGEPLPLPRLAPHLLDRLVLEAEKKSSLKKSAAFVTTINRDLQMRVTDILNRASDRFALNGIFNGACVVLNTQTGEIAAYVGNTNTLHAPDVDIASSRRSSGSLLKPFLYAAMLDSGDILPSSLVSDIPTRIGSFSPENMSRNYLGVVPADEALARSLNVPAARSLRIYGVERFAQFLRSLGLTSLFRPGNEYGLPLILGGAEVTLSEITKLYANLGKTAASDSTTTSLISCGAAWLTLEALVNAARPGEEAIWREYAGARHIAWKTGTSYGFRDAWAIGVTPEWTVGVWIGNATGEGRPELRSAVTSAPVLFEIFSVLNSLGGNRNVWFAKPTTELQQVEVCASSGFPASLNCANIKYVDIPKNAPAAKPCRFCQTVILDDTLTYRIVLKPGISTAAVERKWFVLPPAEEWYFRRWNLDYKPPAPD

SEQ ID NO: 90868 - protein, 158 aa, Unknown
  Obtained from environmental sample
  DOMAIN (34)...(156): Transglycosylase
  misc_feature (1)..(158): Xaa is any amino acid
VTKKRLIIGGAAVFLLLAFIFSLPRPLFDVPYSPVLFDREGNLLGAQVASDGQWRFPGTDKVNEKFTLALIETEDHRFRRHFGVDLPAIARAAYQNIRSKRVISGGSTITMQTIRLARGPRERSFVEKFIEAYLAVRLEAGRSKNKILALYAANAPLG

SEQ ID NO: 90869 - protein, 540 aa, Unknown
  Obtained from environmental sample
  misc_feature (1)..(540): Xaa is any amino acid
GRKLIRFKVKSPDNPGSLKFTVTAESSGLKTAQHVVDIEVRSTAIPVTKTLQSLLTAGETWKGNLDYPGRDGTNTLVASFSRLPPLNLESRLDYLIKYPHGCAEQTTSGSFPQLYLDKVLLLDDKQKAEIRTNVNGGIERVLGMQLMSGGFSYWPGESSVNDWCSSYIGHFLLEARRSGYEVRTSALKNWISYQKNASAQWQTSSNKFTEQAYRLYTLALAGEADLGSMNRLRSQKLPFQASWRLASAYWLAGQRDTARNMIKGLALPERDYRELSATFGSTLRDKAMILETLILLNSQEEVGRTKQLFEEIAKELSADKWLSTQETAYALIAIVPYMSNNAGSGALSLDYSVAGKTGNIAFNTPVAERSFGIVTGTNAALSVTNKSSSPVYIRYMAKGLPAEGKEPALSEGLSLTVEYHDANNRVIAPETLKLGEDMEISVRVRNTFSQSVEEAALIIPLPASWEIVNTRIGGSESSSNYRYQDIRDDRVMTYFNLNRGEERTVSFKVNKSYEGSFFRPAIHVYAMYDESIRALIPGVR

SEQ ID NO: 90870 - protein, 582 aa, Unknown
  Obtained from environmental sample
  DOMAIN (121)...(270): Alpha-2-macroglobulin family N-terminal region
  misc_feature (1)..(582): Xaa is any amino acid
MLLTDTEHKAEIVIVDEDGKLLQGKVDLDCAIYKLDWHWWWEKSEDESAEFASTLSRNAISRQTVSATNGKAVFNFNIKYPDWGRYIVIARDSKGGHAAAKVAYIDWPGWAGRARDEGQGSTSMLTLTAGKPQYNTGEKVQITFPSNKDAAALVALEKGGNIIKSEWVTCQDGTTKYEFIAEPSMVPNIYMHITLVQPHLQKQNDLPIRLYGIVPVMVEDSRVVIYPQIKTQDNWQAESKVSFTVSELNGRPMAYTVAVVDEGLLGLTRFNLPNPKNTFYARDASFIKSWDLFQEVIGAYSGKLETLLAIGGGDDDNEVDPEKETQRFKPVVRFFGPFEIAKGSQKTETFDLPPYIGAVRIMVLAASSTSESQTGKTLRGYGTAQTTVKVTSDLMVFASLPRVLSPGDNFEVPVYVNSQKDGRRSVKVNLSAPGTVIQGSSAQDVSFEKSEEKLIRFKVRAPDKPGSIKFTVTAESAGLKTAQQVVDIEVRSTAVPVTKTLQALLSAGETWKGNLEYPGRDGTNTIVASFSRLPPLNLESRLEYLINYPHGCIEQTTSGSFPQLYLDKVLTLDDKQKADIRT

SEQ ID NO: 90871 - protein, 1308 aa, Unknown
  Obtained from environmental sample
  DOMAIN (931)...(1080): Alpha-2-macroglobulin family N-terminal region
  misc_feature (1)..(1308): Xaa is any amino acid
GGGFSGVLNKNSPVIVELKFAQDTSAPLSSNAIVLSPKIKGAVSWQDEYTLVFTPEENYKPGQRYDVAVNITGIPPFNFDFTAAVPVFLVELEPVQLGDNNNVLITGIVNADPDAENSKIEQTVSSRELGKPSWTHTDGVHRFSFAPVKRGEASRTAEVTWKGKPVGSEMDGGTTVMIPGLDIFQMLDLKFANNIIEISFSSNLKANQDLRGFIILSGNTDVRYTMEGNVVKIYGNSSGGIPSGASLYIQDLVDVDGKRLITPIQYTVPDKWELPEVRFTGNGAILPTSQGAQLVIETKNVSGILVEAFQIYNHNTFQFLQINSLEGTSQLDRVGEPVWTKAIDFQWAPSDQNRWVRRGLDMAELSKKFPGGVFHIRISFRKRHIKYLCDKNHQDFSGLNFPDDSFSRYSTTSSSESSYWDNYDDDDDYSWSEWYNYRYDPCHPAFYVNMSGHNITKSRNVLVSDLGLIAKRSLDGSWIIATTNLITARAAPNTEYKVLTYQGRVLHQGKTNSNGIASIPASSDTASGSRLFVYAESNLGRAYLRANDSLALSVSHFDISGGTPSSGIRGLIYGERDVWRPGDNIYLTFLLADPLGSLPQNHPVTFELEDPRGRPVINRTYTTSVDGFYALAAATASDAPTGDWTARVRVGGKTFNKNIKIETVMPNRLKIDLDFGANEFIKSGSHKIPLESQWLYGAPASGLKADISVTYSDKETTFKSYTDYSFRDPSRRVSTERQEIWSGSLDSAGKAVVTMNFNPGSSVPGKVTTRFLTRVFEPSGASSSEQISREYSPFSRYVGIKLPKGDAARGMLLTDTDHKAEIVLLDEDGKPFQGNVELDCAIYKISWRWWWEKGDEESAEFASSLSRSAISQQTVTAANGKASFNFNIKYPDWGRYVVIARDSKGGHAGAQIVYIDWPGWAGRAQDGGQGSQSMLTLTAGKQTYNSGEKAQITFPSNKDAAALIVLEKGGNVLKSEWVTCQEGMTKYEFVAEPAMVPNIYVHITLVQPHLQTQNDLPIRLYGITPVMVEDTRVVLNPQIKTQDNWQAESKVSFTVSEMNGRPMAYTVAVVDEGLLGLTRFNLPNPKNTFYARDASFIKSWDLFQEVIGAYSGKLETLLAIGGGDDDEEIDPEKETQRFKPVVRFFGPFEIAKGSQKTETFDLPPYIGAVRIMVLAASATSEPTGRALRGYGTAQTTVKVTSDLMVFASLPRVLSPGDNFEVPVYVNSQKDGRRSVKVNLSAPGAAIQGSSSQDVSFDKSEEKLIRFKVKAPDNPGNIKFTVTAESAGLKTAQQVVDIEVRSTAVPNKI

SEQ ID NO: 90872 - protein, 295 aa, Unknown
  Obtained from environmental sample
  misc_feature (1)..(295): Xaa is any amino acid
MELERTIQIAIKKASRVFPVILLTGMRQIGKSWVMEHLAGKQRRYVSLDDMKARALARSDPQRFIEENPPPVVIDEVQYAPELFTYIKIFSDKAKKNGLFWLTGSQKFHLMKGMQESLAGRVGILNMLGFSYWEITGKPADSVPFLPSLARVKQPPVIKQLTSPEVFTKIWQGSFPRVITNRNKTFLRKLFYDSYIQTYIERDVKDFYNIENEINFYNFLVAAAARTGQLLNYSDLSRDAQIDLRTAKLWLEILERSGIIYLLYPYSSNIAKRTIKTPKLYFLDTGLSSYLCSWD

SEQ ID NO: 90873 - protein, 513 aa, Unknown
  Obtained from environmental sample
  misc_feature (1)..(513): Xaa is any amino acid
DELLNETLLFLGAEHGKSVREVYPSIATPVHGNFSIAGISETDDEEITLLFGFGNKIEKKIKVKLDAKRASSKGNVYRIWAQKKIAELDLNYEKNSTELMELGQQFGIVTRNTSLIVLETLSDYISYGIEPPATEPEMRAEYQRRTKGTKGTKEKIVQWDGSELRDTRSRRSNFSAYNLMKDKNFAKDIDKVLKNVAGLQTSGKTELGGRRGSATGGTGGFNDGYAEGGSGGIGDMLGGLMGGSAGGGTKAKGSLKAPSARDIDMGAGDGSRSKAEIMAVVNARMPGLRNIYNKYLKLKPEFGGKITLKFTIAPSGDITSINIVSSTTGYAEFDEAIEDMVATWKWKVIKSGNTTPTIPFTFDDFGNGSRTQAVPPSPQPPQPPRPPRPRFKEIYGGSMLDKAVVASENIKGWWNIDFTPQKSKYPTPDEKALSIDSAKDNFVKGNEYLSKLTGKTDEDYQIYLKLRNDYANSPTFYFDMADWFYKLGNREIALRILTSIADLELENSSLYRL

SEQ ID NO: 90874 - protein, 71 aa, Unknown
  Obtained from environmental sample
  DOMAIN (6)...(71): ATP synthase subunit C
  misc_feature (1)..(71): Xaa is any amino acid
MDLQVLIAVGAGIAVLTGAGAGIGIGIATSGFLQAISRQPEASGKMTPMFFVGVALAEITAIYGLVISILL

SEQ ID NO: 90875 - protein, 240 aa, Unknown
  Obtained from environmental sample
  DOMAIN (17)...(233): ATP synthase A chain
  misc_feature (1)..(240): Xaa is any amino acid
MNALEIRTIFTLTLFNHSIPITETVVISWVVMVILVIGALILTRRLKEVPTGPQSLLETAVEFLDNFAKNQFGSFAKYLGPYMGALFLFLLVANTIPVLSPLPLKAFGREFIPLFEIRPPTRDINVTAALAVISILLVLFCGFAARGFTGWFKKLLQPISFMLPFNIMEYGTRLISLALRLFGNMLGGYVLMSMIEGLLPLALPVIFSLYFDFFDGLIQAAIFVFLTSLYIGEAVKVNEE

SEQ ID NO: 90876 - protein, 1184 aa, Unknown
  Obtained from environmental sample
  DOMAIN (364)...(569): DEAD/H associated
  misc_feature (1)..(1184): Xaa is any amino acid
LNRISGRSTILVFTESRRRAERLCYFINNEAALHETALQKAGVNGTVAFTHHGSLSKELRQSVERRLAAGSLFCVVATASLELGIDIGSVDEVVLAGSPGSVSQALQRIGRSGHGVGMVSRGTLFPFHGMDLLLATALKGAVEDRDIEEIRPIENPLDILAQMILALCIEKKRNIDELYKLLKGFYIFRNLNREAYLRTVRMLAGLSSNGEGKIRLRDVKPRIWLDNIAGEIGALDGSLLLLYSSGGVIANRGLYSLRLADGTKIGELDEEFVWERRIGDRFHFGGRGWRITSIEAESVQAAPLETSSDFMPFWKADTVFRSPRLVERVLAILDAYNGDTSSSAPDALAAFLDSQRNAQHGIPLSGSNRITIEIIDSPENRGDLYAVVMHSFRGGAVNYPLVLALAQELEETLKIRVESFSNDDSLLLLIPRLGIEGKVKQIENIFRGAITELNKSGGGGLCRGERLFRNRLEASGVFGASFREAAERSLLLPKAGFGKRTPLWITRQRSKRLFDAVSGEDGFPVTAEAWRSCLVDLFDMEGFRELLGAINDDSVALSFFYSSIPSPFSRDMVRQETNTLMYEYDERKDVYGSGATLSDKVIQEALGDASFRPLIKAELAHSFSARLRREEPGWAPDDQLSLYEWVKERIAIPLDEWETLCASLPENLKQELSQSSNDRLVMVKRNDAAIPSMVHREWEESWRREPLPLLGPWLRYEGPTSLSRIAEVFGISIVEAEDAVNALVEVEEVVCDVRLAEGTSPLICDSRNLEMLLRLSRRKQRPEINERPAALLVPFLALRQNLLIGYGVQGSGVRDAQVGTALSEAALKKLNACCAPVKLWETEFFTSRCALYSPDIINNEIIEGRLVWYGAGKEKIGLCRPDDLELVNVNNVKKSKQKIKSKEGIFGETMSSGEFLKKAFVKLIDNGFFDRPRDFWEIKDAINVNAGRNVNSKDCAETLWQEAWQGKLSSDSFEPLRRGIQFGFTIKNMETVEQSPQSSLGSPRMPRIPRSLRDRWRDGAPVSGRWFSIVLDENTAQDQWWNAPQPSPQGVEPEVRGSPLDPLNEEDRNRDRVRLLLARWGILCRSLLEKASYGSSASKSDPSPFTWSGLLPTMRRMELSGELVAGRFFAGINSLQFASPTIARELENAEATNSIYWMNAVDPASPAGLNIEGLDPRLPDRQQS

SEQ ID NO: 90877 - protein, 268 aa, Unknown
  Obtained from environmental sample
  misc_feature (1)..(268): Xaa is any amino acid
MIHREWEEAWRQEPLPLLGPWLRYEGPISLPRIAGVFGISLAEAEDAVNALAEVEELVCDVRLAGEVSPLVCDSRNLEMLLRLSRRKQRPEISERPAAVLVPFLALRQLTINNEQLTMSNEQSNEAAFKKLYACCAPVKLWETEFFTARCVHYSPEIINQEINEGRLVWYGAGKEKVGFCRPDDLELVNMNTIQKSGQKIHSKNEAMSVGEVFAQLINNGLFDRPRDFWEIKDAVNAGAGRNVTAKECAEALWQEAWQGRLSSDSLNR

SEQ ID NO: 90878 - protein, 514 aa, Unknown
  Obtained from environmental sample
  DOMAIN (1)...(514): Formate--tetrahydrofolate ligase
  misc_feature (1)..(514): Xaa is any amino acid
AAAEMLKITEVAERLGIPQDDLEPYGHYMAKISERQFAKAANRADGKLILVTAINPTPAGEGKTTLSIGLAQALAKIGKKAVLALREPSLGPVFGVKGGAAGGGYSQVLPMENINLHFTGDMHAITAANNLLCAILDNHLFQGNALQIDQRRIMIDRCMDINDRTLRNCVVGIGKKSDGIPRQDSFRITVASEVMAILCLASDLNDLRSRLGKILVAYSRDGKPVFARDLQVHGAMTALLKDAINPNLVQTVEGVPAIIHGGPFANIAHGCNSVRATKLALKLGDYCVTEAGFGSDLGAEKFFDIKCRNANLKPSCAVIVATARALKYNGGVPKSELNNENIDALKKGIANLQVHIENIRKFGVPPIVAVNRFHTDTQAELTAIQDFCAGMGVPAPVSEVFAKGGEGGIELARKVCETIEKQDGAKTFAPLYSNSATLKEKINTIAREIYRADNVIYRAQAEKAVKEIEALNLGDIPVCVAINAVLALRRPNAPRQAYRLQHNSPRHKNLRRSG

SEQ ID NO: 90879 - protein, 276 aa, Unknown
  Obtained from environmental sample
  misc_feature (1)..(276): Xaa is any amino acid
SVTSIGNGAFSGCTSLASITIPKYGYISIGNLAFSGCTSLTEIIVDDGDDPYFDPDGYENENYHRSIDGVLYYGSNNNQLVIYPNGKTDISFTIPSHVSIIRGNAFSGCTSLTSITIPNSVTFIGQSAFSGCTSLTSITIPFVGNELNVTINTHFGYIFGASSYYNQNSNIPLSLKTVIITGGTAINESAFYSCDNLTSVTIPSSVTSIGHRAFEDCTSLTSVKFATGSNITDTNFGSMAFPDGMSGNLLKSAYSTGKAGTYTRNVNSGVWTKTSN

SEQ ID NO: 90880 - protein, 348 aa, Unknown
  Obtained from environmental sample
  misc_feature (1)..(348): Xaa is any amino acid
MIYHIFIGSTLDDLKNERREIQRIIMELGHIPVSAEYLDSTSKNYKKLLEKTIEECDFFIAVIANMYAPKGAKISPLETECNIAEKNNVPVISFIKGEKSGGKTRGTARSSARSSAAKKGKEAGFEKKQEALKKRLGKGISETWLNSKDLCQKLQSQLVQQINLLLRNGWVRADQIFAPSVANELSRLSTENEQLRHQIKIDSNDIVARLRVQMKNTFKVLAVNKVILSFYYESGDKWENNHSFRFLRIFKLLVPELAVGKTTAEISHFLGAALNPEPGKTVRKDYPTPLNTVKKIMSDLSLLKLFRCKNNNEGSNDTDIWVITEYGRELYSAFRMRQLNKALGRTGS

SEQ ID NO: 90881 - protein, 896 aa, Unknown
  Obtained from environmental sample
  misc_feature (1)..(896): Xaa is any amino acid
MNLRPLAIILIFLFLPAIIFARDIEVTVEDEDLDMPLEGAVIVLRGGRQFTCNNKGIALVTLPDDRPTVISITYPGYETFRLSIPGADPAKSSQVEKFRAAMRLSGIMQGQELVLEAARPETSETRSGRSVAISDRELTRTAEIGIVEDVMNSVKLLPGVGYTGMFSAMPSIRGGDPGDLMAALDGFYVERPYYWMGSISIFDPKMVSSARLSHGVFSARYGHTISGLLEITSKSPSPTETELEAAIGTSATSLNLSVPLSGKGGILFMGKVTYWETLILAAQGLSHITENETLDMVNSVSTAPYIRSAALSMNYRFTPDLEWRLNAFFGSDGVGAEYKTDYTSSTDNNVEGVMEMKADYNNYQGFLITGFSASPTPKVALRFSGGIGFLETLTEDYVDNRITAAYNDDFLDLFSHVPQSILDQFGLEQGKTYSAPNVNAGIYMENTIFNAQGRFDTDIEIGKGFIVAAGVQELYSMWMLKEDVSLDFLEIRVERLTPERVNVMFPQMSPYLPLLQTIPNLAIVIPQNYNSDVRNQGFTTSAYGLIEYTTPNQRFGTELGLRVDHLYFKGKNFEFQTMPALNPRFNVDFGILKNSGIIDSLTATAGTGLFSSINSLLCFFDPGNFDIGDSVSDVEVKFNRAWTSVIGTKIDFAQRYSINIEGYYKYVYDRGYITADTSTGTITPSFNFDGIGKVWGFDIQLQKLESRYWDGWISYTYTWAKYNDPSGGNNGISNGSTNTINDSWYYPSFHRFHNFNLVLNIKPLLWFNIALRFGFASGQPRRRIDNKIYPYPVLIVNEDNEMVILQKYRRNSWYDENERTPWSFPLDIKFSFFPVNKNGRTSMEIYAAGENMMSLFYSPPGRTTFNQYTGKEDQGSSSGSFDLPIPMVSFGIKWRY

SEQ ID NO: 90882 - protein, 123 aa, Unknown
  Obtained from environmental sample
  DOMAIN (3)...(122): Dihydrodipicolinate synthetase family
  misc_feature (1)..(123): Xaa is any amino acid
MTDLRGAHTALVTPMKDSGEIDYDGFRRLIQFQIAEGIDGILPLGTTGENPTLEEEEEDKLIETAVKEAKGKVHVMVGAGSNDTKHMRSYVERAKKMGADSALVVTPYYNKPNDDGLLRHLKR

SEQ ID NO: 90883 - protein, 162 aa, Unknown
  Obtained from environmental sample
  misc_feature (1)..(162): Xaa is any amino acid
MAKITKTVKSKTTAKKTVKKSTEKDNLAKELKSLIPKLDEEGLAFLVKQAHVHLYNMQVDALNQTMIKDEQRKIKTAAKSKKNTEKSKFIDIKLSDTGSGYHILCNNTWISFTVKEITIMVNIAKGEGSGLEIRERLYNWLSRERSDFLNTASIANKFDDKL

SEQ ID NO: 90884 - protein, 418 aa, Unknown
  Obtained from environmental sample
  DOMAIN (237)...(416): Methyl-accepting chemotaxis protein (MCP) signaling domain
  misc_feature (1)..(418): Xaa is any amino acid
RTWLAVTIFVKEGDDYKRISTSIVDGTGKRAVDTFLGKGSAAYPFMREGKSYSGEAVILGKKYLTEYKPSFAANGKDVIGILFLGNEMTEIEKVIENNVVQQIKIIAIIAVVILLTSVLVNTVSFRLILLTPINSATSVLLEIAEGEGDLTKRLITKRTDEIGDMSRYFNKTFDNIKDLISDIKKKISALSSTSFELSNNMNKTSEAVEQILLQFEKMDKLLIQQEKEAEDADKAGENIKHSIEELNKLVAEQTESVNTSSSALEQMTANINSVAKTLIENGKNVSDLAEASEIGKTGLQTVAQEIVGIARDSEGLLEINEVMDNIASQTNLLSMNAAIEAAHAGEAGKGFAVVADEIRKLAESSGEQSKTTAGMLKKIKASIDNITSSSNEVLARFEAIDSGVKTVSEHEQNIRKAM

SEQ ID NO: 90885 - protein, 386 aa, Unknown
  Obtained from environmental sample
  DOMAIN (16)...(213): Metallo-beta-lactamase superfamily
  misc_feature (1)..(386): Xaa is any amino acid
TSDLFEGIWPIPNGVSLNSYVVKGEKTAFIDLFQDWNGAAAQVEEALASAGTNFSSVDYLILNHLEPDHTGWLKNFREKNPRAEIISTKKGIDLVKSFYKIDTGLRAVKDKDTLDLGGGKVLTFFEAPNLHWPETMVTWESVSGTLFSCDAFGSYGALGDKVFDDQFNEKEHSLFEEESLRYYANIVSSFSIFVERAIQKLSSLEIKCVAPSHGIIWRKDPKKIIARYSKFASWVKGPAEKEIAVIWGSMYGNTRAALDAVLWGIEKEGVPYTLHRVPDENISYVLAATYKSSGIVIAMPTYEYAVFPPMAYALDIFRRKHIFGKKALRIGSWGWVGGAKKEYDTILESLKWDSVDSFEWAGYPNEADFAFLEAKGKELARKVKAG

SEQ ID NO: 90886 - protein, 136 aa, Unknown
  Obtained from environmental sample
  DOMAIN (2)...(132): PIN domain
  misc_feature (1)..(136): Xaa is any amino acid
MYLLDTNICIYIINKKPESVIKKFDDITPDKIKISVITVGELEYGVSKSIKCDQNRIALRTFLSPFEIITFDLRDAEIYGIIRNDLENRGEPIGPYDMQLAAQALAKDLILVSNNTGEFNRIKKSKIGKLGMKHKK

SEQ ID NO: 90887 - protein, 76 aa, Unknown
  Obtained from environmental sample
  DOMAIN (7)...(47): SpoVT / AbrB like domain
  misc_feature (1)..(76): Xaa is any amino acid
MKTVKVFKSGNSQAVRIPKEYQINEDELIINKIGNSIILFPRNDPWELFKKSLYEFSDDFFAEGRNQPTIQERDSF

SEQ ID NO: 90888 - protein, 425 aa, Unknown
  Obtained from environmental sample
  DOMAIN (20)...(227): PP-loop family
  misc_feature (1)..(425): Xaa is any amino acid
MIPFGAQLHAALEKIKSGTACLAAVSGGADSTAMLVALAELSKESDFRLYCAHVEHGIRSAEESQGDAKAVQALCEKLKVPYRIITIPRGKIAAFASKNGTGIEAAARHFRHRALSAERRRVKADWILTAHTKDDLIETLLMRFLRGSGPAGLAPMMRNKGRILRPLLDVGRQDVLNYLKENNIQYRTDSTNNDISLLRNRVRHKLVPILDAHFPSWRSSVLALAETQELVADFLESEAKKRLPWENPSGEALLRLREEDFLNAPPILREEAIFAAVDALAERDSKGPSQNPKRSAIRRAVREGTAADLGQARLERRNGFITMTPVMRRGQTSEKRHGFSLLIKEAGFYTLKGEVFGAGRNLSLGIRAGCPQKLPNSGFSANLPTVFRNHRAGDFIYKGGQKRRFSDIVNSRERSRYTAIITACD

SEQ ID NO: 90889 - protein, 367 aa, Unknown
  Obtained from environmental sample
  DOMAIN (109)...(367): tRNA synthetases class I (R)
  misc_feature (1)..(367): Xaa is any amino acid
MKEKIVEAVSILLKEHLSESEVEKNIAVPPSDDLGDYAFPCFALSKMLKKNPAVIAADLKDRIGIIDGGSVRVESSGGYLNFFIDKRGLAASVIENYSNAVPASLADCGVAPIGMTDGRPQRVVVEFASPNTNKPLHLGHLRNMSIGDSVSRILSFCGCEVFKASINNDRGVHICKSMLAYKRFGNGVAPEEVGCKSDRFVGDYYVMFNDKSAFDPSWGDDAQKMLRDWEEGEPSTVELWKRMNKWALDGFRETYKLFGISFDKEYYESGIYKNGKEIVAEGLDKGIFHRREDGAVAVDLEEEKLGGKVLLRPDGTSVYIVQDLYLALLKDKEFKYDRSFYVVGNEQDYHFAVLIAIFRKLGYGGPT

SEQ ID NO: 90890 - protein, 370 aa, Unknown
  Obtained from environmental sample
  DOMAIN (285)...(361): Surface presentation of antigens (SPOA) protein
  misc_feature (1)..(370): Xaa is any amino acid
MMMMSDGALSQAEIDALLAGVDAGGGGGTATAVASSSFPETGRKALEAFFGETTDTQAGILTTMTGSEASLSNAQVTINGRDTFLDSLAEKVTVVKVDFNSGFPGEHLFIFPEEAAKTIVSMLNKEENVELDEMAMSVIGEVVSQMIGHQITALSGKTGNKSISSVPPEATNIPKAVVALPSGDFAGITYQLNLGEGKNFPMWEVLGPSVAMDIAKALSGGGQQQKQAGGGGSAPSSGGMNMGGMQMGMGGMGMGGGGMAYGSSNVQSVQFPNLMPHGGPQEAGNIGLIMDVYMEMTVELGRTRKLIKEILAMGEGTIIELDKLAGEPVDILVNHKLIAKGEVVVIDENFGVRVTEIVSPMERINDMGYN

SEQ ID NO: 90891 - protein, 56 aa, Unknown
  Obtained from environmental sample
  misc_feature (1)..(56): Xaa is any amino acid
MTEVLSQDEIDQLLTAINAGNAEPEDYNPAADSRKIKIYDFKRPDKFSKNKSVQSR

SEQ ID NO: 90892 - protein, 682 aa, Unknown
  Obtained from environmental sample
  DOMAIN (151)...(220): HAMP domain
  misc_feature (1)..(682): Xaa is any amino acid
MTLLGKEVNVVRLMVPIINKRNEVVGIVGAQLNIDLIQPRIETTMEDFEEISAMSVYSSNGFIMASYRPERIGKMMVDEEVQFGSYVNEAFEAVRAGKEFMCFSYAPTMKTNIQISLIPVTLGQAETTWAIMAGTTEDYIMRDVYTMITFAVIIAVIAVIASAAILFIVLDRTTKPIIKVAEILKIVAEGDLTKQVNVNTNDEIGGLAKDFNFTMNKIKGLINQIKYKINGLSNTSYELSVNTSKTSSAVEQITSHLDKMKGLMVKQENSTGEANKAVTEIKENIDNLKEMIAAQTDSVNVSSSAIEQMTANINSVTKTLSENSKNVTALTEASENGKSGVQTVAQMIQEISKDSEGLLEINAVMDNIASQTNLLSMNAAIEAAHAGEAGKGFAVVADEIRKLAESSSEQSKTTATMLKKIKASIDNITKSSNGVLDRFGAIDSSVKTVSEHEQNILRAMQEQENGGKQILESISRLKDITASVKKGSDDMAKSGETLVKETDGFIKTSQEAAEGMNEILATINQIKISVNHVNEISHENNSNFESLKQETEKFNNTVGNEKRKILIADDDTIHLEMVEAVLSNEYDIFTAKSGKEALNLFYQGLVPQLILLDLIMPDMDGWDTYKRIKAISALHDTPIAFFTSSDDPKDKQHAREMGAVDFIKKPYDKDDLLRRVGRILNK

SEQ ID NO: 90893 - protein, 170 aa, Unknown
  Obtained from environmental sample
  misc_feature (1)..(170): Xaa is any amino acid
MQKPGELLESVLNEIEKRIKEDINADFLADNVGLSSIHLQRLFKFAFNQSIGAYIRSRKLTASLESLFTTNSKLVSIALEYGFDYEQSYVRSFKREFGVTPGIIRKTGQIVKVTPPLNLHDAKLFENCIIFKPELVMIPQFHVISKNYQVSRSDAINHVHKLIKYFGKGT

SEQ ID NO: 90894 - protein, 296 aa, Unknown
  Obtained from environmental sample
  DOMAIN (53)...(91): WD domain, G-beta repeat
  misc_feature (1)..(296): Xaa is any amino acid
TTVKLWDAATGQEVKTFLGHTETVTSVAFSHDGKYILSGSADKTVKLWDVETGKEIKTFSGYNASITSVAFSFDGKTIFSSSRDNAIKFWNTVTGNEIKTSSEFTGFAGPTFAIAYSPDNSKILSNTNDFTLRLWDVKTGIPIRTFSGHKAFIRSAAFSPDGKFIVSHSDDTTLKLWDVNTGQEINSFSADPVIQDYRMSKGSIIQEIRNVKFSPDGKRILVCSMNNDILLLDMETGKVIRKFFVDAGYVFSAVFSPDGKYILSGSTDKTVKLWDVETGDEIRTYSGHTEQVMSVA

SEQ ID NO: 90895 - protein, 621 aa, Unknown
  Obtained from environmental sample
  DOMAIN (525)...(621): DEAD/DEAH box helicase
  misc_feature (1)..(621): Xaa is any amino acid
VFGERTKVLSELAQGTRDISIPSIVIIPQRALLNLLPPPDYIKSLLIQVLVGGKIDTSGLAKTLVIYGYTRVPRVQASGEFALRGEVLDIFMGGDDWAYRILFDFDKVESIKKFDPVNQTTEQNTPGGKLREMKIRPMREVVWTDERIEALEKKLASFKEFSNGGREIIEELISRRNIRGEEIFFPFAFEKGASLMDYLGDGTLLLFDRERLDNTKETIFREYQGMYSQSVREKKCEYPLPERLLLDFGELIKNKKKTVSFMTIKSAPKDGVCHIELPCEPSRSFFGNIDYMKDEFASLLANGWHITVAAESEVQAQRIKMIFMPRADTGTEQSVSKWPGDGSPLLKEFSIMANPLTAGFSLPDIKLMLIQENEIFGRRKRPVRSLHTARSKPIDTFIELNPGDYIVHVNYGIGLFKGIERITALGLERDYIRLEYADEETVFVPVEQVNLVQRYIGSEGNPPRLDVMGSKSWESRKNRVKKSVEDIAEKLIELYSKRKRAQGFAFPQDSEWQTMFEAAFPFEETEDQLRCIAEIKKDMESPQPMDRLVCGDVGYGKTEVAVRACFKAVMGGKQAAFLAPTTILVEQHYENFLERFSNFPVNVAMLSRFVDRKKTRVILEK

SEQ ID NO: 90896 - protein, 511 aa, Unknown
  Obtained from environmental sample
  DOMAIN (1)...(509): V-type ATPase 116kDa subunit family
  misc_feature (1)..(511): Xaa is any amino acid
MFLTREISRIAGWGDFDPASIKEMETLGLPVFLYELTPDAFASLPEEVRYVKLSANKTVIRFLVLDKEIQGITPFQLPEKSMSSFIKETDEIKLEIEELDAKLKSFANRRPALIKEMEIVEQDLEFETALVNMEKVENIPAEMGLSYLTGYAPCDDIAGLKAAAAANGWALSIIDPEDTDEAVPTKLKNPGFVNLLNPITGFLGIVPGYREVDISPWFLIFFCIFFGMIFGDAAYGLILSLIAIFGIIKTAKKGVPQALQMLLLLGIFNTAWGVLTCTWFGVEVNKVPKQLQDISLSFFSTAKTDESIVSQNLQIFCFSLGLLQLTIAHIKGFFRNIRSLKLFSELGSIAMLWGMYNVVLFLVVSNDARPIPLLPPAIYLLGGGFVLNFIFASYNGSIGKSILESCKNFISVVLGITNVFSDIMSYIRLWAVGLAGASIASTVNTMAGPMLGGFLIFAGIILLIFGHGLNLILNVLSVLVHGVRLNTLEFSSHVGLSWSGTAYKPFAQKVK

SEQ ID NO: 90897 - protein, 72 aa, Unknown
  Obtained from environmental sample
  misc_feature (1)..(72): Xaa is any amino acid
VWEYYHSQPTAEVNAGLYDIREFFQGRNDNDKMNTTSGDDTYNKLIGDLRTALKTLAIKIQPKVYGYGFLVE

SEQ ID NO: 90898 - protein, 701 aa, Unknown
  Obtained from environmental sample
  DOMAIN (155)...(235): Cache domain
  misc_feature (1)..(701): Xaa is any amino acid
MKKLKKTSFARFFTTVSLLMILSITVSLSVIFFYNLRNIVINLTELSTKTNVARSRDMVLSFIKDHEEAIKQFSAGIMHLFRQRAFSTESIAGYLSDIKEIVPNSLDLYFTNNVMWNKPGGFAAFAGGWIPEDDWDNTQRDWFTDAKKAQGKIAYSEPYVDSETGDVIITLSMTVFDGAGTDIGVSADDVAVNVMKEIIDAMRGFPGQEMYIINADGLFITHEDIEAVMEKDFFKDLNLDKYRTSVLSSQEFIKIDNKFFIYSSAIPHTGWILVSTIPSSVIFDDINTLIIRLVILCIAMLAVVVFILIFFVVRRISSPIKAIHSALEKLKDGDLTVKAAVKSEDEIGELSDFFNMTLEKIKNLVGTIKYKINGLTHTGFELSSNMSKTSTAVQQISSNLDNMENLMVKQENGAEEAGKAVGKIKTNIDSLNKMIEEQTESVNMSSTAIEEMTANIHSVTQTLAENSKNVGVLTEASENGKSGLQTVAQEILEIARDSEGLLEINSVMDNIAGQTNLLSMNAAIEAAHAGEAGKGFAVVADEIRKLAESSSEQSKTTATMLKKIKASIDNITKSSDEVLNRFGAIDSSVKTVSEHEENILNAMREQETGGRQILESIGRLRDITRSVKNGSDDMEESGKTLVKETDEFIKISQEAVEGMNEILKGVNKISSSVSHVNDMIIDNNHSFDALKKETEKFNDTN

SEQ ID NO: 90899 - protein, 380 aa, Unknown
  Obtained from environmental sample
  DOMAIN (155)...(235): Cache domain
  misc_feature (1)..(380): Xaa is any amino acid
MKKPRKTSFAMLFITVSLLMILSITVSLSVIFFYNLRKIVINLTELSTKTNVARSRDMVLSFIKEHEEAIKQFSAGITHLFRQRAVSTESVAGYLSDIKEIVPNSLDLYFTNNVMWNKPGGFAAFAGGWIPEDDWDNTQRAWFTDAKKAQGKIAYSEPYVDSETGDVIITLSMTVFDGERTDIGVSADDVAVNVMKEIIDAMRGFPGQEMYIINADGLFITHEDIEAVMEKDFFKELKLDKYRASVLGSQEFINIDDNVFIYSSAIPRTGWILVSTIPSSVIFDDINTLIIRLVILCAAMLAVVVFILIFFVARKISSPIKAIHSALEKLKDGDLTAKVDVKSEDEIGELSGFFNMTLGKIKYLVGTIKSKVNGAYPNQF

SEQ ID NO: 90900 - protein, 132 aa, Unknown
  Obtained from environmental sample
  DOMAIN (5)...(28): Prokaryotic N-terminal methylation motif
  misc_feature (1)..(132): Xaa is any amino acid
MERRRGFTLIEILIALTILSILATLGIAGYRHHRRGAAETVLRANLSILRHAIEQYKADRGKYPPSLDDLWREASKRYLQSLPIDPIARSDKMWVVEMEAPDPDSPDSEMGISNVRSGAEGVDLDGRPYGDY

SEQ ID NO: 90901 - protein, 310 aa, Unknown
  Obtained from environmental sample
  DOMAIN (14)...(310): Polyphosphate kinase
  misc_feature (1)..(310): Xaa is any amino acid
MSDKASNGESENIPSPVFFNRELSWVDFNERVLDEGLRKDLPPLERFRYLSIVSSNFDEFFMVRVAAIKRSWEDAASQALRPQELLDSIYQKVRSIVNRQYETLVGEIFPDLARGGLSLRRPNEWTDSQRNYLESFFAREVFPLLTPLRVEATEDLPSIDGYSLYAGFLLQAETIQDKDEEPSENYISAEDCISIIRIPQAPDPIIFLPREKEDHEDEDIGQVYWALLEDLVETWGSYLYPGFKVIESIIFKVNRDADFSVDEQRDEDFIEAMEEVLEGRGRSMAVRMVHSPGSEKIRDCLAQRLSLTEK

SEQ ID NO: 90902 - protein, 187 aa, Unknown
  Obtained from environmental sample
  DOMAIN (145)...(187): Bacterial regulatory proteins, luxR family
  misc_feature (1)..(187): Xaa is any amino acid
VVSRATLLEAHHKKRFEELGFKNVTVTAKEKDGLDMLIRELKPKLIIMGAGFYKSATPYMAGEILRRFKGLKMYLNIVVVSISLEPYPADFGMSLINNGVKSYINLFDGMEQFYEGLACVRDGHSFISASVQERMDIRDELPRRSSPITDRELEILRFLRNGLFVEEIAKELLISIRTVNFHKKEMY

SEQ ID NO: 90903 - protein, 468 aa, Unknown
  Obtained from environmental sample
  DOMAIN (1)...(306): PEP-utilising enzyme, TIM barrel domain
  misc_feature (1)..(468): Xaa is any amino acid
MFFDKEKLIHFRAMIVSDTEAERREALKKILPLQQKDFLGIFKAMEGKPVTIRLLDPPLHEFVPHTPEETKELADYLNVAVETLQPKIDKLREQNPMLGHRGCRLAVTYPEIYDIQVEAIALAAVECLKETIPVNPEIMIPIVMSARELKLLRPNAEKVLKKVFDAEGVSIKVKIGTMIEVPRAAIRSAHIAKYADFYSFGTNDLTQMTFAFSRDDVASFLPTYLEKTVLDVDPFKSIDEEGVGYLLAYATQQGRAVNPNLQVGICGEQGGDPLTIDFCYRAGLTYVSCSPFRVPVARLAAAQAVLRNQPEKAKAPTAKTATVSKTATIKKAASKDAPKKEADKKPVVKKPETLAPTMKKESDKKPLVKKPETSAPTVKKESDKKPLVKKPESSGLTAKKPQAAVSAAKKPAEKKPVAKKAQTSGSTDKKPATTSKVVVKKAVVKEPVAKKAAVKKPAATPKVAVKKA

SEQ ID NO: 90904 - protein, 509 aa, Unknown
  Obtained from environmental sample
  DOMAIN (326)...(425): PEP-utilising enzyme, mobile domain
  misc_feature (1)..(509): Xaa is any amino acid
MKKKLGDPNDPLLVSVRSGAAASMPGMMDTILNLGINDLAVKGLADKTKNPRFAWDAYRRFIQMYGDVVMGVDHDHFEEVLSAEKKKHGFEQDTQLTAKDLEHIVGEYKNVVRKYSGKDFPQAPLEQLWGAINAVFGSWMNERAIKYREINNIKDLKGTAVNVQSMVFGNFGEDSGTGVCFSRDPSTGVNLFYGDFLMNAQGEDVVAGIRTPERISDLEKHNPVIYDQLVKIKNRLEKHFKDMQDMEFTVQQGKLFLLQTRNGKRTGAAAVKCAVDMVAEKLITKEEAVFRVTPALLDQLLHPMIPAAALKSAVALTKGLNASPGAACGKIVFSASDAEAMHAKGEKVLLVRKDTSPEDIGGMVASQGILTSTGGMTSHAAVVARQMGTPCVAGAKEAIINEKTMTIGSKTFNEGDWITIDGSTGNVFDGKLPLITPDEMSKDMDTFLKWCDEICAASKRGSLSGFQVWANGDQPADAKRAFHSGLRELGFAVPSICSSTKRSSFTSGR

SEQ ID NO: 90905 - protein, 247 aa, Unknown
  Obtained from environmental sample
  DOMAIN (182)...(246): DnaB-like helicase C terminal domain
  misc_feature (1)..(247): Xaa is any amino acid
MAESGRERIPPHNDDAERALIGAMLIDDNAIIIAQQYLRPEDFYSSRHRKIFDAVLNLYHKGTRPDLLTLSAELERSGKLDESGGYDYIASLTGAVPSSANAEYYAQVVQVCSLRRGLIQISGETGAKAFDETIDPKITLEETQQKLFYISDPQRIFRYKKVESIVLDTVKYLNEVYNTKAEFTGIPSGFYELDRLTSGFQPSELIIIGARPGMGKTAIALCMAANIAIRQNKPVAFFSLECQTGMM

SEQ ID NO: 90906 - protein, 228 aa, Unknown
  Obtained from environmental sample
  DOMAIN (62)...(148): Ribosomal protein L9, C-terminal domain
  misc_feature (1)..(228): Xaa is any amino acid
MKVILNKDLSPLGEEGDVKDVAKGYARNYLFPRGIALPYNEKTIKLFESRKEEIEARKVQKRSDASGLKEKLESLSIEITMSAGPNGKLYGAVTNQTVADELAKQGYQIERKRIEIPGTHIKNVGKYKAAVRLYESASAEISLNVIGQEIKTETAKAAPSSRSENAVKNSERTKFPKNRQSSRSSQKTRNKWRSQEGKEYLLTMMMPKGRLLALCLLTITPSSLPSST

SEQ ID NO: 90907 - protein, 375 aa, Unknown
  Obtained from environmental sample
  DOMAIN (134)...(336): ABC-2 type transporter
  misc_feature (1)..(375): Xaa is any amino acid
VVILDEPLAGLDPGLIGKFMQIFRRICDKGHTLILITHTLERLELCDRLVYIQAGKTLFSGAPDSICGYFNVTSISQVYEHSGDAGFETKTDGGLPADAATASVNAASAQAALPRRDWAAALRHPLTALRFFFRQSYTLTARYAKVYVRDRRNMLLLMAQTPLITLLLGFVYKMSIMQFPISFYFCLTVTGIWVGGLDAVREVASELPLLAREARCGMNRWAYIIARIAVAAALSAAQAILFTASAVVIFKQLEFSWPLLILLYVSIFAGNLLGLAVSVCSGSVGRAISTLPIVLIPQIFFSGILVLFEQMAELGRHISRLTISRPVSGIMNKVFFLDRPLFWHSDWTELILLCAGLITIFWIALRSRTGRRGAA

SEQ ID NO: 90908 - protein, 331 aa, Unknown
  Obtained from environmental sample
  DOMAIN (1)...(322): Aminotransferase class I and II
  misc_feature (1)..(331): Xaa is any amino acid
MHSFKEAVCEKLKRENKLIYEPEQIIATSGAKHAVFNAIAAIVDTDDEVLIPTPYWNTYSALVKYCGGNPVFLECTKENKLRLKAEQISKAATSKTKAIILNSPCNPTGVVYSKEELESFAKVIVENDLYCISDEIYEHLIYTNEPYISIAALPSMQERTIIVNGFSKAFCMTGWRIGYLAAPNKELAKGIVKVQGQTTHHPSNISQYGAIAAVNGSIDSVIAMRQEFSERMHRMSEIFRSIPGIDFLEPEGAFYLFVDVGSYYGKKTEEGTLISNSIEFCKALLDEQGLVIVPGISFGNDSYVRFSFTASLPTISVAVPKFKEFVEGMKR

SEQ ID NO: 90909 - protein, 234 aa, Unknown
  Obtained from environmental sample
  DOMAIN (51)...(204): Caudovirus prohead protease
  misc_feature (1)..(234): Xaa is any amino acid
MIIRTKGGEFCEANSSVLLDFLGLKKDVAGIHKVAGDVELIAAVPFLMSNDELAMSNEKGFPWTLSTFDLDRFGERVDPNGWDFAQFVKNPVVEWAHRFDIPAIGKIEGLAIDDKGLHGSVVFNDKEYDQFGWGIGQRVKAGVIRAGSVGFRVLEIEIPSKDDSTDGTTLIFRKQELLEFSICNVPANPWALVKPNALAKAKSNEQAPTESAITMNNEDGSNAAPFWGGLINNL

SEQ ID NO: 90910 - protein, 540 aa, Unknown
  Obtained from environmental sample
  DOMAIN (382)...(540): Methyl-accepting chemotaxis protein (MCP) signaling domain
  misc_feature (1)..(540): Xaa is any amino acid
MMQSVAKAEPTIFQVYTVWKPNAVDGMDARYAGRPGNTETGQYAAAFRMENGQANLTVTTDVDDAMVYLNSADAKAKKDRYVHPVPRNIDGKDTWYFRIMVPIINSRNGEVVGGVGCLCVIDAIQPTIENTIKTREDVAAAVVYSSNGFIIGHYLPERIGKMLRDVDTVYGKYMDEVVRAVANGDNYACTSFSPALNTNLAINIQSFPMGSSGSSWSIMIAATESYVLKEVKFLTKITIIIAAVAIVIAALVVFLTLSATTAPIVEVANTLKDISEGEGDLTKTIPVKSDDEVGELSTYFNKTIQKIRGLVLLIKQQAGVLSDIGNDLSSNMTETAAAINQITANIQSIKGRVINQSASVTETNATMEQVIVNINKLNSHVENQSRNVSQVSSAIEEMVANISSVTQTLVNNTANVDTLKEASEVGRTGLQEVATDIQEIARESDGLLEINAVMENIASQTNLLSMNAAIEAAHAGEAGKGFAVVADEIRKLAESSSEQSKTIGTVLKKIAESIKKITSSTENVLKQFEAIDSGVETVSQ

SEQ ID NO: 90911 - protein, 545 aa, Unknown
  Obtained from environmental sample
  DOMAIN (169)...(234): His Kinase A (phosphoacceptor) domain
  misc_feature (1)..(545): Xaa is any amino acid
DTATGEMVFAYSHCIFDEDGNRLGVAAINIRAGHIGERVAHTALAKGGFGVLITQDLTVIGHMNPDFVGLKMNDPAIPLSFLTDELVKTGKVTGAEWVNWRGETVVGFFKTLSNGWRLGLLAPQNIYYKPVYDMALTLSILGIALAAVLIILLIRVDAAKNKSDTENRHKSVFLANMSHEIRTPMNAIIGMTTIGKSASDIEHKDYSFTKIEEAAHHLLGVINDILDISKIEANKLELSPVEFNLEEIFRQVVNVINFRIDEKHQKFTAHIDRSIPRTLIGDDQRITQVITNLLGNAVKFTPENGVISLDARLAGEETGLCTLQVSVTDTGIGISAEQQKKLFQSFEQAESSTTRKYGGTGLGLAISKRIVEMMDGTIWVESEPGKGSTFTFAIQARRGTEIINECSNPDNQQAEEAQAPEIEGIFAGRHLLLAEDVEINREIVQALLEPTQLDIDCAENGAEAVRKFTEAPLKYDMIFMDIQMPEMDGYEATQRIRALDIPAAKTIPIVAMTANVFREDIERCLDAGMNSHIGKPVNFDEVIGK

SEQ ID NO: 90912 - protein, 520 aa, Unknown
  Obtained from environmental sample
  DOMAIN (256)...(520): Methyl-accepting chemotaxis protein (MCP) signaling domain
  misc_feature (1)..(520): Xaa is any amino acid
ARVEQTIKDFDEVTSMVVYSDNGFVLGNYLPEFIGKQIDTETQYGPYLKEVKEVIKNAQEWQGKAYDPELKTNMVMAVANIPIGVSPTTWSVMVGSTEAYILKDVNAMRNFVIVLASIALAVAVALIYLVLSRTTAPIVKVADTLKDISEGEGDLTRTITVSSNDEIGDLALYFNNTLEKIKNMIIHIKDEANGLSEIGNDLAGNMTETAAAVNQITANIQSIKGRIISQSASVTQTNATMEQVIVNINKLNGHVEDQSSNISKASSAIEQMVANVGSVTQTLVRNADNVKTLEEASEVGRNGLREVAGDIQEIARDSEGLLKINAVMKDIASQTNLLSMNAAIEAAHAGDAGRGFAVVADEIRKLAESSGEQSKTIGAVLKKIKEAIDKITRSTENVLNKFEAIDSSVKTVVEQEDNIRNAMEEQGEGSRQILDGVSNVNEITRQVKGGSAEMLEGSQEVMKESRNLERVTQEITGGMNEMASGADQINVAVNSVNEISLRNRQGIESLTREVSKFKVN

SEQ ID NO: 90913 - protein, 257 aa, Unknown
  Obtained from environmental sample
  misc_feature (1)..(257): Xaa is any amino acid
MEKEPNGIFLRSTGKKATNTDEKTLKLMADYYVNLGAYAGIDFSAPKMGILNSFDLSMGAGFSRTISMINGNYTPYGPKYDGSVDWNSSNLFSKTVPFRYRMKTQSSLRGTYGSMSWNLPFYSDPFIDRDFFQNRAEAMDWVNMIQQGSEINDEELAKQDLGAYSWLINGSLSPSIGFLSPYVSSLSVSSLTTSLAFKIIRDSDIYSINKDHPGREFFAPDKYTIYNASGSISGTPLTIGKKSSSAKDASDTEQEDP

SEQ ID NO: 90914 - protein, 817 aa, Unknown
  Obtained from environmental sample
  DOMAIN (726)...(815): Diaminopimelate epimerase
  misc_feature (1)..(817): Xaa is any amino acid
AGLPLDEITNAVTGTTFAAFEPALDYVAVKFPKWPFDKFVYAKKELGTQMKATGEVMAIADTFEEALLKAVRGAEIGLSNLNLPRLAAKSDGEIRDMLKTVTDERLFALYEAIKRGVSVDELFDITKVDRWFLHGLVNIHKGLFDDNSQSIDGGKLIYKMVDTCGGEFEAKTPYFYSIQNGTENEALPFIQKSGKQRIVVLGSGPIRIGQGIEFDYACVHCVWTLKSLGYEVIVINNNPETVSTDFDTADRLYFEPLCVDDVMGIIEIEKPLGVIVAFGGGTAIKLTKKLRERGVNIIGTSADSIDICEDRQRFDALLENLQIKRPRGYGVMTESEALDAAEKLGFPVLMRPSYVLGGQNMIIAFSPDDIREYMEIILRSKQENPVLIDKYLEGMEIEVDALCDGDPSQGGHGGVFIPGIMEHIERTGIHSGDSIAVYPAININDALAEKIFDVTKRLCMALNVKGLVNIQYVFYENDVYVIEVNPRASRTVPYLSKVTSIPMCELATKLSVGKKLSELGYEPGIGKIPPYVAVKVPVFSFEKLAGVDTHLGPEMKSTGEVLGLGKNLEEALYKGLVAAGYRMKKKGGALITVRGSDKAEIIRVAKKLVQAGFSLYATKGTARFLAERGFEVQSVEKIKDNAVNNAATLLESGKISYIISTSKKGRDPALDDVKLRRKACSLGVPCLTSVDTANALADGLLSGYSETNTELIDINNLRTDRAKLAFTKMQSCGNDYIYFNCFDTEIDSPESLSVYLSDRHFGVGGDGVVLILRSDIADAKMRMFNLDGSEGSMSGNAIRCVAKYLYDNGMSKNTICK

SEQ ID NO: 90915 - protein, 202 aa, Unknown
  Obtained from environmental sample
  DOMAIN (1)...(197): Binding-protein-dependent transport system inner membrane component
  misc_feature (1)..(202): Xaa is any amino acid
VVVILSLALMLTVSSLAAYALVNWRGKISRGLYFFFIAGMMLPIKIASIRILELVRFLGLINTIWSLIPIYTAMGIPVALFILTGFIREIPYELTEAGIIDGAGRFRIFTRIIAPLLRPALATTAIYNLVPFWNDLWFPLIFITDDRAKTLLLGVTRLFGQYQTDWSRVLAVLTLSAIPVILLYLLMSQQFIKGLTAGAVKG

SEQ ID NO: 90916 - protein, 596 aa, Unknown
  Obtained from environmental sample
  DOMAIN (502)...(596): Fumarate reductase/succinate dehydrogenase flavoprotein C-terminal domain
  misc_feature (1)..(596): Xaa is any amino acid
MKLESNIPGGPIAEKWTRHKFELKLVNPANKRKFTVIVVGTGLAGASAAASLGELGYNVKSFCIQDSPRRAHSIAAQGGINAAHNYPNDGDSIYRLFYDTVKGGDFRAREANVHRLAECSNLIINHCVAQGVPFGREYGGLLDNRSFGGAQVSRTFYARGQTGQQLLLGAYQSMMRQVAKGSVKMFTRREMMDIVLVGGKARGIVVRNLISGELECHEADAVCLATGGYGNVFYLSTNAKGSNVGAAWRAHKKGALFANPCYTQIHPTCIPVTGDHQSKLTLMSESLRNDGRVWVPRKAGDVRRPSDIPEAERYYYLEEKYPSFGNLVPRDVASRNAKMVCDNGLGVGSSKRAVFLDFGDAIKRIGENAVSAKYGNLFQMYEKITDENPYKTPMRIYPASHYTMGGLWVDYNLQSTIPGLFVLGEANFSDHGANRLGASALMQGLADGYFVIPYTIGGYFAGNKLDKVNSAQAEFVDAAKSSKALIDRLLSIKGKKTVTEFHREMGHIMWENVGMGRNKAGLEKAISALPGLRDEFWKNVNVLGENGSFNQNLENAMRVADFLEFGELLAKDALYREESCGGHFREEHQTPDNEAK

SEQ ID NO: 90917 - protein, 233 aa, Unknown
  Obtained from environmental sample
  DOMAIN (20)...(140): F5/8 type C domain
  misc_feature (1)..(233): Xaa is any amino acid
YGDASSGSNSGEIDLARGGTAEASRSEGSYTPNLAIDGNSTTRWSSYQNGADNDNQWITIDLGDTYKVNKVILNWEAAYGKTYRIEVSTDGSSWITVAYTTNNASSGVKEHPIAPRDARYVRMFGEERGNQYGGFSLYSFEIYGEQSNQQPSTPHNARFFMPHTNETGYWWQGENARIASLAAAFIMGAPFARSKYWADTLFGMATAQLDWILGKNPFGVSMMFCFRKNQFIP

SEQ ID NO: 90918 - protein, 663 aa, Unknown
  Obtained from environmental sample
  DOMAIN (65)...(521): Bacterial DNA polymerase III alpha subunit
  misc_feature (1)..(663): Xaa is any amino acid
LYAAITPIDIRAVNIGRKLNIPLAFLDNSVFLEREDSAVHRVLRAIDLLKTVGNLGADDTAHRERILCDSGEIRRRLVTWPQAVRGTEEIAALCSFNDLFDGWIFPGYETGAVSAACELRRRVYEGNTLRYGELADREIGRIDYELKIIEEKGFSSYFLIIDDIVRMASRTCGRGSGAASIVSYGLGITNVDPLRHNLYFERFLNPARPDPPDIDIDFAWDERDELIKAVIEKFGPGYCARVANHNMFRYRSAMRETAKAYGFGDAEITQTERRLFQTGDKSVAADPLWREIFTVAKKIEGLPRGLGMHCGGLVITPEPISRYAPIEKSSEGFPLLAWEKEGTEAAGFVKIDLLGNRSLAVIRDVLKNLEEQGIIIDRNVWRPLDDKATIEALARGDSIGVFYIESPAMRQLQKKTNTGDFEHIVIHSSIIRPAANKFIAEYVRRLKGGKWEPLHPLLENILSETYGILCYQEDVSKTAVALAGFNEADADKLRKVIAKKMGGTKLAVYENQFFEGCRNNGVKEETIKKIWDMMLSFDGYSFCKPHSASYAMVSFQSAYLRVHHPAEFMAAVLSNQGGYYRPHAYIAESRRMKLFTTGPDINASRWKYYGISDGDGFHRGTLVIGLMAIKGLSASGANAILEERDKRGDYKSLNDFSQRVRLN

SEQ ID NO: 90919 - protein, 276 aa, Unknown
  Obtained from environmental sample
  DOMAIN (7)...(181): short chain dehydrogenase
  misc_feature (1)..(276): Xaa is any amino acid
MKNIKDKLILITGGASGIGQLMAFAFAEKHAKVIVWDINENAIKAMEDEARVKNIFIRGMVCDVSDRNAVYTQAQKLTAEFGPLDILVNNAGIVSKKGENVAGPAFLGVSDENIIKLMNIDALSLFWTSKAFLPSMIERNTGHIVTISSSAGIIGVKGLADYCAAKFAAFGFDESLRMEFRRMKSAIKTTVVCPFFINTGMFEGVKTRFPLILPILKKEYVVKRIVKAVLKNKKRLLMPRFVYSIYFLRLLSPTVMDGVADFFGISHAMDDFKGRA

SEQ ID NO: 90920 - protein, 478 aa, Unknown
  Obtained from environmental sample
  DOMAIN (2)...(209): D-Ala-D-Ala carboxypeptidase 3 (S13) family
  misc_feature (1)..(478): Xaa is any amino acid
SYANRNHRLKILAFRTLVIPVRDPAAYFRAALLKSLENSGIVYVEDNDVYRGKTLDSVVFAGPPLKSILDEINQRSQNLHAEVLLRSLGKKERQNGSAEGGILSEKLFMQKAGVPPEDFKIVDGSGLSPQNQLKPNSLTRFLTYMRKQKEGDIYVSSLAIPGVSGSGKRLDVEFREKIRFKTGFIEGVYGLAGYIAAENDTIAFAFYLNDAKRVNDNVARDLLDYIAGRVAKHYNSEAAQLDEGKILWQGAIAIKNIHERINYFSDKLKDKPYFLGPMGEGRSIYPSYKPRVNFSEMDCLTYIEHVLALAYSKDYDDFFNKLQKIRYKNGVIDYNRRNHFLIADWLLYNQLKVESEDLKIGNFLLFEKEINKKKFFNDPNMVNPKVSIPFLPKEKAIIYADTVNFARDTIFGIAILSDLPGLDAAHTGFAVGSSKKNGLMFRHASQLKGKVIEQPLSEFLKTTKIKTPGISFFIFEEN

SEQ ID NO: 90921 - protein, 297 aa, Unknown
  Obtained from environmental sample
  DOMAIN (3)...(57): His Kinase A (phosphoacceptor) domain
  misc_feature (1)..(297): Xaa is any amino acid
SNEIRTPLDSIIGFADLALDDEISNKTKDYLTNIRVNADWLMQITNDIMDISKIESGELSLKKIPFDMHELFASCRTLVMPKAVDKGILLHFYAEPSVGKKPVGDPVRLRQIFVNLLSNAVKFTNTGMVKLVSDIIRIDDKSITIHFEIKDSGVGMTAEQIAVIFEPFSKMETTTANRYGDTGLSLPITKSIIEMMGGKLSVDSTPGVGSRFSFALTFDTIDVSMEEMFQSRIFPKELERPIFNGEVLICEDNFMKQEVIREHLTRVGLKTVIVENGLIGVELVKSRIRKGEKLFDL

SEQ ID NO: 90922 - protein, 728 aa, Unknown
  Obtained from environmental sample
  DOMAIN (18)...(449): Aconitase family (aconitate hydratase)
  misc_feature (1)..(728): Xaa is any amino acid
KLKQNGVNVSKEQAKKGTISHGILSAHNSGNERDLRLKFDSLTSHDITYVGIIQTARASGMDRFPMPYVLTNCHNSLCAVGGTINQDDHVFALSAAKKYGGIYVPPHLAVIHSYNREMMAGCGRMILGSDSHTRYGALGTMAVGEGGGELAKQLVGRTYDMAFPQVVGIYLEGVLANGVGPQDVALAIIGEVFNNGYVKNKVMEFIGDGVDKLTVDFRNGIDVMTTETACWSSIWKTDAQVKKYLEERGRGGDYKELKPSAAAYYDGFIKVDLSKIEPCIALPFHPSNVYTIKNLQNDAKDIFAKIEKENKDAGINLNLGVKCHDGGIWADQAVIAGCSGGIFSNIMAASDILKGHSTGNSNFSLSVYPESQPTYLELVKNGAVETFMKAGALVREAFCGPCFGAGDTPANNELSIRHVTRNFPNREGSKPGDGQIACVALMDARSIAATAANGGKITAATEINVKYGKYKFFFDKTIYEKRVYNGAGKPNPQIELTFGPNIKDWPKMPALPENLLIKVISFITDPVTTTDELIPSGETSSYRSNPLKLAEFTLSRKDPSYVKRAKEVQSLEEQRGKGKTDGELEKALNSIQGITGCSGIKPANIGIGSAIFARKPGDGSAREQAASCQRVLGGAANLALEYATKRYRSNLINWGILPFLVTDEKAFSNGDYIFFPGIKPAVQEKREKISGFVLGEKTVEISAALGELTDAERQILVDGCLINFYAKK

SEQ ID NO: 90923 - protein, 492 aa, Unknown
  Obtained from environmental sample
  DOMAIN (19)...(408): Major Facilitator Superfamily
  misc_feature (1)..(492): Xaa is any amino acid
LKLNRFANTYAQPSGGEVIYYLFALSGISGLIYEGTWARYLKLFLGHSSYGQILTLCVYMGGLALGSFIAGKLSARIKKPLLAYGITEAFIGLGGMFYHPLYVFATNLFYDSTWSRTLGTSGAEAIKIAIATFSTLPVAILLGMTFPFIAAGLSRRDGDSGKTSLPLLYFTNSLGACFGILFASYILIPTLGNANTLRIAGMINFILFIFFWKISKSDNAVKETPQPITTNSQTINLWLLFSALTGLSSFIYEIVWIRLLSLLMGSSSHSFDQMLSAFILGLALGGLACRKLLAKNFEPLKLLAFAQILMAFFAVCTLYFHVPFWIAMNESNQIFNQTASGYVFWSLFKYALAVLWMVPTSFFAGMTLPILTYWLIKRTGSEKFIGSVYGWNTIGAILGSVATGLFLLPVFQLKGALLTGVFIDLVLGLLILFWFFPVYRKNFAFIAICVFAFLPSLFMNFNPDRITSGIFRFYRELPENEKVDVRNGKTAT

SEQ ID NO: 90924 - protein, 69 aa, Unknown
  Obtained from environmental sample
  misc_feature (1)..(69): Xaa is any amino acid
MRSTSVIKKEGLECLIKTLGDLETEIFISSLIRENFDYTEWQRNYFERYSLNDFLGRTAEFDKTQPFKQ

SEQ ID NO: 90925 - protein, 620 aa, Unknown
  Obtained from environmental sample
  DOMAIN (353)...(518): ABC transporter
  misc_feature (1)..(620): Xaa is any amino acid
MAFVQFSKIALAFGDRDILKDVSLHLAAGSRACLAGANGSGKSTLMKVIAGEIPADSGERAVQKGTRISYLPQSGIVHRGRALRDEAETAFAPLRALLAEAERIGGLLESATSDDGAVAALLEEHHRLQEQVENSGYYRREALIGLVLTGLGFSANDLDRDTGEFSGGWQMRIALAKVLLEQPDILLLDEPTNYLDIEARAWLESWLAKFPGGCLLVSHDRYFLDVTVNEVYEIFQGNLKRYVGNYSAYEKTRQMELASLMKRYTEQQEEIAKTEALIRRFRYKATKAAFAQELIKRLEKMERIEIPENLKKININFPPPPHSPRVALTIEGLGKNYGTKKVLHGLDLTLDSGERLVVAGPNGAGKTTLLRILAGNDNDFEGSVKFGSGISAGYFSQDAAEALNGGEQVLEFMEANAPTTLIPKLRDMLGAFLFRGDDVYKPVSVLSGGEKSRLALLYMLLKPLNLLILDEPTNHLDLHSKDVLLETLNQFKGTIIFVSHDRAFMEALSTKTLELSPVADASSRAKLYYGNYAYYLEKIETSEDSCSQSKRVSNTPGLRTKTPNPEPRPPTPMEQRAQNKQRQAEIRRLQRQEAELLNAIDELENEKSRLEAELSLPAVY

SEQ ID NO: 90926 - protein, 407 aa, Unknown
  Obtained from environmental sample
  DOMAIN (167)...(300): SIS domain
  misc_feature (1)..(407): Xaa is any amino acid
VNFASQTDSEVIAQLAEYYYTGDLLDTVIRVSNVLEGSYALGVMCADDPDILIAVKKDNPLIIGVSDHGYFIASDVPAVLKHTNKVYYLDDREIAVLRNNSVEFFNTDKEPVEKQIETITWNIDSAEKGGYPHFMLKEIMEQPKILRDTINSAIKSGGCKNIFDNLDITRFTKIVITACGSAYNAGVVARYVFEKLCRFPSMETELASEFRYKDAVIDEKTLVILISQSGETADTIAAMREAKRKGAVTLSIVNVVGSTIAKESDYCMFTAAGPEIAVATTKAFSAQLVLLYILAIWFAAKSGKLSRERELELLAEIDALPEKTERLLKQIDAVQMYASTCIGYKSIFFIGRNIDYAIALEGSLKLKEISYIHSEAYAGGELKHGTISLIEQDTLVVAISNCAPLYG

SEQ ID NO: 90927 - protein, 569 aa, Unknown
  Obtained from environmental sample
  DOMAIN (307)...(334): NAD-dependent DNA ligase C4 zinc finger domain
  misc_feature (1)..(569): Xaa is any amino acid
VGRVEKALAGEDIKFLGELKIDGAACSLVYEGGRFVRAATRGDGVVGDDVTANVRTIKSIPLVIPYKEPIEVRGEVFMTFGDFSALNDGLVEAGQRPMQNPRNTVSGTLKLLDPAEAARRKLSFAAYFLLSSDPGRVVSLYDNAKFLAGLGFPVVERSGLLSGVGEIMSFCGDWEVKRHTLPFPVDGVVIKVDSFEQQGRLGSTSKSPRWVIAYKYAPERAATVLEGVDWSVGRTGVVTPVARLHPVFLAGTTVKSASLHNYDEIKRLGLRVGDTVEVEKGGEIIPKIIRVCADERFAGSEPYEPPAACPSCGSLLAKLGDEVALRCLNRSCGAQLTASIEHFVSRAAMDVRGMGPAVVKQLLDGGLIKDAADLYALTAEKLLTLERFAEKSASNIAAALEKSKTRPLDRLIHGLGIRMVGASSARDLAGAVDDISELYSMRIEELELIEGIGLLTAQSIRLFFDRAENVDMAERLRAAGLNLTGGKSRGGASAGDFAGKTFVLTGTLERRTREQASEIILNGGGKVSSSVSSKTDYVLAGSEAGSKLDKALSLGVRVISEEEFEEMMN

SEQ ID NO: 90928 - protein, 352 aa, Unknown
  Obtained from environmental sample
  DOMAIN (9)...(352): UvrD/REP helicase
  misc_feature (1)..(352): Xaa is any amino acid
MYDDLLSTLNPEQLTAVTANNNGSLLVLAGAGCGKTSVLTRRIAYLVRQGVPPSRICALTFSRKAAEEMAHRLVKLDPSCGGKNAPMVTTFHAFALRVLQERRQGRRNFNRIGFNDDDILLLDGKRRFELIAQASTAVMRSTLGMGIIELSSALDLLLNFPEKASKRWSDEEFGLLAKIEHDFYNMRKAYGLWDFVDLICGGLELFSKYPDIADDWGRRFDVVLVDEFQDTNPMQIDMLDVLLRSGASLYAVGDDDQAIYGFRGADIRPIRNFTTRFRDAEIVKLQINYRSVNSILNCANKLWADKPAEYRKTLVSGLNPQPSGCRKPKTMRFGTQSQALEWILGRARYIER

SEQ ID NO: 90929 - protein, 567 aa, Unknown
  Obtained from environmental sample
  DOMAIN (10)...(565): tRNA synthetases class I (K)
  misc_feature (1)..(567): Xaa is any amino acid
MRGDAAIKAVHWADECAQKIVREKGEKELYTCASGITPSGTVHIGNFREIISVELVVRALRDMGKKVRFIYSWDDYDVFRKVPKNMPKQTELEKFLRFPITMVPDPWDRDSSYARHHEVDVESSLPIVGIFPEFLRQAERYRSSRYAQGIRRALERRDALKNILDKFRDEEHKIQGEWWPVSVFCGACNKDETEIDGWDGEWGLSYHCTCCGHKETVDIRNARDVKLVWRVDWPMRWEYEKVDFEPAGKEHHSSGGSFDTARLVCKEAYNWDAPVSFRYDFISIKGKGGKISSSSGDVVDLEDMLKVYTPQLVRYLFAGTRPNTEFAVSFDLDVIKIYEDYDKTERIAWKLEPAKNDEAYAWERRIYELSQPQTDSDGKTLPLEKMAKPFQIPFRHLCSLIQIADGDVEKALSSVAASSNGPSEEQLPPLRARAECAKYWVTHYAPDEFRFKLRSPATAGAPGAAGAPSTEGALDEANQRFDAATLSPQEQAAIKLLCEDVVSRIETFTDDKPCAEAIYKVAEKAGIEGKALFRAAYQVLIGKDQGPRLASFLRAIDKQRLLQILNR

SEQ ID NO: 90930 - protein, 68 aa, Unknown
  Obtained from environmental sample
  misc_feature (1)..(68): Xaa is any amino acid
MSKAHRGKGIRELAAHGRGICPVCGSTGVKVLYEAGEQKIKVCKPCRAAIKHGKKSAPVPAPAEPAAE

SEQ ID NO: 90931 - protein, 261 aa, Unknown
  Obtained from environmental sample
  DOMAIN (1)...(254): Dehydratase family
  misc_feature (1)..(261): Xaa is any amino acid
TPNFCRLPPAGKDAIEDLHAAGGIPAVLKELSKKNLIDLTAATVYGCLGDALGRVVNRNPDVIRPIESPYSATGGLAALKGNIAQDGCVVKRSAVAASMLKHEGPARVFDSEETAFDAIMEKKIKPGDVVVIRYEGPKGGPGMKEMLAPTAALAGMGLDDKVALITDGRFSGASKGASIGHVSPEAATGGNIGIINEGDIICIDIDGLSINVKLSDEEIEKRRKIRKPLSKNSVGYLARYAAQVGSAASGAVFNSQPCKGD

SEQ ID NO: 90932 - protein, 508 aa, Unknown
  Obtained from environmental sample
  misc_feature (1)..(508): Xaa is any amino acid
VKGKTFDQFFEFTKNFKTGDPVLSIGNALGEGVVVRNGLILGTVPEEDSGRWNLLKSSADGNPGNSGGPLVTPEGKVVAVVSALRENILYSVPAEVVLGGSRTELPYRQKSRVGHLILANDMNTIFETKPKLPETYTAVRKTICEAYNAFYDNSMASLFKEAPEYLSGPNNVYLLNSSPSALFPELSFVDPDDNEWTLSNLNKAKKDYPLDDDGRLYHTAVSGFSFYKVKRPLTVAVDKISTDPKYIMDLILKNIRTDRNLWGNDKYRILSYGEPSSKRSFRDALGRTWISLYWLIGFEDEVQIMYILPLPNGPIVVSTKQDSSFLHIYEWDMHKICDHLFAAYDGSFDEWNSFINLKQFIPDFLKDIRFDWKSAEQKFSLKNGYLSIGADKQVFDWNARSELYLAPSWYKLNGKLEFGIRKVILTRDQRGKDFIILYRGIKPDPKLGTNAMESWNDLVIEKHPFDGKPVLSPKDNTGFVGTILKPRRLNPDVLFSLYLSHGKSAKRG

SEQ ID NO: 90933 - protein, 280 aa, Unknown
  Obtained from environmental sample
  misc_feature (1)..(280): Xaa is any amino acid
VSRKKYRNVSIFVSSTFRDMQSERDKLRYSVLPKVNEFAEQYGAAVDIIDLRWGVDTTEIPDEDEQNHKVLRTCLDEIERCRPFFLGLIGDRYGKMPPRKDIERALKAVAAQFSLKDPNLSITALEIEYGMLSVETETESRPLINLFYFRKSPDYKGMSDEFRKTYQDKADNLAKLEELKERIRSKFGKDVKDYVAKFRDNDLIVDEEWAKTVADDIIAKLRKEWGEPPKRLSNWKEHECDAQEAFRESRITHFEGRASVIESWEAFCLGERTTPRFLMI

SEQ ID NO: 90934 - protein, 71 aa, Unknown
  Obtained from environmental sample
  DOMAIN (4)...(51): Uncharacterised protein family (UPF0150)
  misc_feature (1)..(71): Xaa is any amino acid
MTYKFTVLIEQDESGSYVASVPSLKSCYTQADTIPEVLERIREAISLCLEVEKDFQMYSKSIDVRQIVVAV

SEQ ID NO: 90935 - protein, 472 aa, Unknown
  Obtained from environmental sample
  DOMAIN (45)...(204): GGDEF domain
  misc_feature (1)..(472): Xaa is any amino acid
MNRRASGEICREWLSISSYKNANGAVALYVGTFVDAANQMSHSYSRHYYDSLTKLPNRLLLQDRLEFMINHARRNKELMALLLIDIDRFNLINDTFGYEAGDALLRATADRLVTCIRDVDVVFRSGDDEFAIILEEITRPEDAAKVARRILKTCAEPLRINGREIYATICIGISIFPPDGDGKVQILQNAEAAMRRAKEIGLNSFEHYKPSMNARALERLTLESDLRNAVGNAQLCAFYQPQVEIKSGRITGAEALLRWRHPDLGMVQPGQFIPIAEDTGLILSIGEWVLRTACIEARKSQEGGKPYVISVNLSVSQFRQQNLVSIVESALKDADLPPDLLELEITETMSMKNPEDTMTVLRKLKDLGVRIAIDDFGTGYSSLSYLKRFPIDTLKIDRSFIIDIPENSRDAEIVKAIITMAHSLDLSVIAEGVEMEPQAQYLLDNGCEKMQGYLFSPPVPLTEFDKLWAKHK

SEQ ID NO: 90936 - protein, 498 aa, Unknown
  Obtained from environmental sample
  DOMAIN (9)...(470): UvrD/REP helicase
  misc_feature (1)..(498): Xaa is any amino acid
MYDDLLSTLNPEQLAAVTAKNSGSLLVLAGAGCGKTSVLTRRIAYLIRQGVPPSRICALTFSRKAAEEMAHRLAKLDPACGGKDAPLVTTFHAFALRVLQERYEGRRNFNRIGFNDGNILLLDGKRRLELIAQISNTAMRKTLGMGIIELSSALELLLSFPEKASKRWNDEEFSLLAKIEHDFYNLRKANGLWDFADLICGGLELFAKYPDIADDWGRRYDVVLVDEFQDTNPMQIDLLDILLRFGASLYAVGDDDQAIYGFRGADIRPIRNFTARFKDAAIVKLQINYRSINAILDCANRLWADKPAEYRKVLVSGLNPQPTGCRKPKTMRFGAQAQALEWILGRARFIERQEKIPIGSMAILFRINDTLTAAAGHYKSMGLTDDKIPQLLTVHASKGLEYPAVFLCDLEEGVFPHYRMRKERRIHTWFELLKALVKPAPKPDADEARDCDIEEELRLFYVGVTRAQRYLFLVTTSKKPFYGREMKFRPSRFLRLVR

SEQ ID NO: 90937 - protein, 235 aa, Unknown
  Obtained from environmental sample
  misc_feature (1)..(235): Xaa is any amino acid
LGIFIFYIPSNMTFSPKKLALAAALGIAITLTLTACGKGNTLTDNRDGKTYKTVKIGEQVWMAENLNIDLPNSKCYDNYPANCEKYGRLYDWETAMKACPSGWHLPSNKEWDSLYRFADGTSGTDSPYESPTAGKYLKATSGWTDHNGNPAGNGEDKFGFSALPGGGFSVAVNFDGIGRYVTWWSSSENDTLSTHAYCQSIKSDFGRKFSDNGDGTDWGHDRKTTLYSVRCVKDN

SEQ ID NO: 90938 - protein, 175 aa, Unknown
  Obtained from environmental sample
  misc_feature (1)..(175): Xaa is any amino acid
MFSPSLGKLTSYKDGDLVIAVCKEKVLFPLKNIEKHLDMQVLDIGIYNGKRVVCLNLPHLEEGVSIRALFAEAELEVAHIAALASHLTWWRATYKHCPICAKPLKEHDLERCLRCEECDENFYPVICPAVIVLVIKDGKILLAHNTRFPSGRYSLIAGFVEAGENLEDAVQRELM

SEQ ID NO: 90939 - protein, 463 aa, Unknown
  Obtained from environmental sample
  DOMAIN (260)...(431): MatE
  misc_feature (1)..(463): Xaa is any amino acid
MPETNVKMPEAHHTDAASRLGTEPISRLLLKFSIPAITGMLLNALYNVVDRIFVGQGVNEIALGGLSLVLPLMTISLAFAMLFGIGTANMISMRLGQGRKKEAENALNHCFFLLLGIGLLMSAAGLIFLEPILSLLGAQEGSESIHYARDYLRIILFGTTFSMVGFGLSHCTRAQGFPAITMIAMIMGAGLNIVLDPIFIFIFKWGVQGAAWATIISQAASMIWILSFTMGRKAVIKLKPRTIKPSLAIVFQIMSFGSAPFLLQFVMSGVQLLYNTSMGWYGAAGLGIANGGDIALSGMNIGGAIMMLILMPIFGINQGAQPILGYNYGAKQFRRVLRAYLGAVAAGTLICTVGFAVGQLFSGQLVRVFAPEGSAKLMEFAPRAIRTMMILLPTAGFQIISTNLFVVTGRPKISIFLSMLRQCLALIPCMLIFGRIWGLWGVVAAAPVADGFSLFVTGTMIFF

SEQ ID NO: 90940 - protein, 480 aa, Unknown
  Obtained from environmental sample
  DOMAIN (341)...(480): Methyl-accepting chemotaxis protein (MCP) signaling domain
  misc_feature (1)..(480): Xaa is any amino acid
VVREPAGFAGWQDQLKRVTAQGLISTTGREPAFQELADVFWADVAGRGKVPIVAVIYTFTNSKGQIVGLVGINFISTVQQIVDDLKKEVYDGAGIAAVYSDNATAIAHWDKDRVAVNLKNNNKDKTLFGDDINRLADVILHGKIEILDKYSQVMKTEVYYIFQPILVSGFETTPWSLQLGIPESEIKKPIHALISYSIIFAVILLVVAAVITLLVAAGIVKPIIRVTATLKDISEGEGDLTRSIAVSSKDEIGDLAHYFNKTLEKIKNLVLLIKREAAGLHNIGNELASNMTETAAAINQITANIQSIKGRVINQSASVTETNATMEQVVANINKLNGHVEKQSSNISQASSAIEEMVANIHSVTETLFRNSENVKVLQEASEVGRNGLQEVATDIQEIARESEGLLEINAVMENIASQTNLLSMNAAIEAAHAGEAGKGFAVVADEIRKLAESSSEQSKTIGTVLKKIAESIKKITVST

SEQ ID NO: 90941 - protein, 166 aa, Unknown
  Obtained from environmental sample
  misc_feature (1)..(166): Xaa is any amino acid
MKERSKLSGGPPQTQINERNAEFFRHLPVYSGFFIPVISLLALVLLVFILSDTPGKALYFFFLGPFSNLFSFGNMLNAAIPLIIGALGVTIAMKAGNFNLGGEGQVYFGAFCTTAVFLYLSKYGIGQFSVITGILAVVFGFICAGVLGAFCGFCRQCGTQASLILL

SEQ ID NO: 90942 - protein, 270 aa, Unknown
  Obtained from environmental sample
  DOMAIN (1)...(259): Branched-chain amino acid transport system / permease component
  misc_feature (1)..(270): Xaa is any amino acid
MFKSGVTIMIPLLFAAVGGLFPALAGTLNIALEGLLLAGAFSSLAVYYVTGSVTAAVTAALVAATALSALHAFAIFKLRANLFISALAVNLLSGGLCVVLSDKLFHTRGVIVSESAAGLQKWYVIAGVFMLAAAWLAIYKTPFGYRLRACEKDSEALVSLGIRPQVYQTTAILISGFFCGIGGSFLSLNLGAFVPGMSAGKGWIALAVIFLGWRNPLGVLAAAFIFSLAEVLSNYAQGIMSLPADFLLAFPYATTLIAMVVISIFPHRDR

SEQ ID NO: 90943 - protein, 456 aa, Unknown
  Obtained from environmental sample
  misc_feature (1)..(456): Xaa is any amino acid
APIRVALALFLFLYLGPAIFAQSKTAFPRLEPDPKALEYYRLSGRDHGYSWTELAEISLWASGEYSVSNLNKIRAAVETLSNSPALPEDVKERAEFILGFMHKNLLKSYSPYQTRIGTLFSNGRFNCVSSAVLYTILCRAADLHANGVMTKDHAFTTLHIGESDIDIETTNPYGFDPGNRKEFSDQFGKVTGFAYVPARNYRDRQTISQIELISLILNNRIAELESRGNYAEAVQVAIDRAALLIGDLSAVKPDAAEKSYGPIFENPFKDLMDRLFNYGSSLLKAGRERDGLAWAAAASSMYPDESRWQEFILAAANNQIVKYIKSGKTTDARNFLEGEKALINQANYARLETVLIDAELLDSVNKIRTAADGDAALLAIDQVRSSGKISEKRAAEMLILTVQKTTVVLSAAPAKDWRAAVAYIEGVIARYGSDRELEQALKTYRGNIATDFHNRF

SEQ ID NO: 90944 - protein, 144 aa, Unknown
  Obtained from environmental sample
  DOMAIN (4)...(70): UreE urease accessory protein, N-terminal domain
  misc_feature (1)..(144): Xaa is any amino acid
MVIEKISGMKPPNTGGKTIETVPFEWFEMNNKILKKVSSKGTEIGLRLSQPLFDGGVLYEDNEKIICLELLPCETTRAHIHNMKEMGHLCFELGNRHLPLSIAEDSVSTPYDKPTFEYLEKLGFHCERVTEKFTPEIIVHGHHH

SEQ ID NO: 90945 - protein, 136 aa, Unknown
  Obtained from environmental sample
  DOMAIN (24)...(136): UreD urease accessory protein
  misc_feature (1)..(136): Xaa is any amino acid
MSDCFFTSPFKVAKPFYRGNAYTEIMVMCASPGILAGDRYNMQFDLSDNTKTIISEQSYRKLYNTGDDFSQQNTRIQAGENAVLYYVPYPVIPFAGSRFRSRTDIFLRSSSKLIFGEILACGRDGMGERFAFSEFA

SEQ ID NO: 90946 - protein, 290 aa, Unknown
  Obtained from environmental sample
  DOMAIN (1)...(234): Alkaline phosphatase
  misc_feature (1)..(290): Xaa is any amino acid
MDAGKTKKFKPISEYIHEAGMKVGIISTVTLNHATPASFYAKVPSRSNYYDIGVQLAGSNFEFYGGGSILQQSGKNGDQKSVFELAKDNGFTYVNTKDAFNALKPGVGKVIAISPRLQDDGAMPYDMDLKPGDLTIADFTRKGIELLDNPKGFFIMIEGGKIDWASHANDAGAVIRDVLAMDAAVSVALDFAAKHPKDTLIVVTGDHETGGMTLGFAGTQYDTFFDKVALQTRSYVAFDEEVLKPYKASHSVKDAKFADLIPAIKESFGIDFASLTDFQKQQIEFAFQRS

SEQ ID NO: 90947 - protein, 277 aa, Unknown
  Obtained from environmental sample
  DOMAIN (110)...(273): Integrase core domain
  misc_feature (1)..(277): Xaa is any amino acid
MEMTGLLGVSRGAYYKWVKAGISNQSKGSDDAELIRLIREIVIKHHRRYGSPRVRQELRNKYGKRVSLKKVARLMRENGLNARRRRKYIPTTDSKHSLPVCANILNRNFSAEKPGQKWVSDITYLRTLNGFEYLTVVLDLFDRKVVGWALSDNMETCNTTIPAFEMAVKNRQPESGLIFHSDRGVQYCAYSFGDVMRNLCPSVRQSMSRKGNCWDNACAESFFKTLKSEEEKLNGKYSANDVRQAVFFYVEGYYNRERIHSVLDYLTPNEYYLSKVA

SEQ ID NO: 90948 - protein, 368 aa, Unknown
  Obtained from environmental sample
  misc_feature (1)..(368): Xaa is any amino acid
EYSEALKTIFTYHTGTSGANNPNNAVFTVRLISIISGTLLFSGTIISIMTTLIRNYITNRDGAKGRLRLSNHLLILFYNKEVPAILADLMYNPDQKIILLLSDAKKQQVFDELNAAIAELDEKPKHKINLIVRQGNPASLSELKDVGIERASGILIMNNNANANSGGESRETDYLGSLDLVLKLGNFNLRPNVPIGVETSTQDASEIMQSLQKDILGLNNLQIQFFAHHKKIGQFMALSVSNPDLCNVLSELLSYRGCEFYPIEKISREEYLENHCAGIPTVVFGDKMYCLADDESAARRKRAFPYKTERRLQTSKECKSGRPLKLFVIGKNRKYKYLVEALKQTHPDTVINHFETNDIQNFVDTVVK

SEQ ID NO: 90949 - protein, 263 aa, Unknown
  Obtained from environmental sample
  misc_feature (1)..(263): Xaa is any amino acid
EEQRALQEQLRQTTQVSTASKTNQESQTQKQAPQQPLRLRLISPENNVVIAGLTAIRQPTVFRWTTDEDVEFSRFVLSRRSNPLSGRPEVDIQNPGRAVSIPALPEGVWYWTVEARSKDGYPITAVSPRQIRIQPIPLLPAPGNRLPESGFLIGPEELRKREGIVFSWSKVDGANSYILSILRDGFPRRHQILQTDPIRELTYTFDDYSVFDDSGTFFWQIEAVFYRDGILEQHGTPGENKFILDVPRPGRVKTKKTGILYGK

SEQ ID NO: 90950 - protein, 1315 aa, Unknown
  Obtained from environmental sample
  DOMAIN (632)...(827): D-ala D-ala ligase C-terminus
  misc_feature (1)..(1315): Xaa is any amino acid
MPLDKNIKKTMVIGSGPIVIGQAAEFDYAGTQACRVLRQDGIEIVLVNSNPATIMTDNNIADKIYIEPLTLTTVKRIIEKERPDSILSGLGGQTGLTLCMQLARDGFLDKMNVRLLGSSPETIDKAEDRKLFKETMQSIDQPVIPSVIATDVQTAISFADEIGYPVIVRPAFTLGGTGGGIAANETQLREIATNGLALSPIHQILTEKSITGWKEIEFEVMRDRVGNVITVCSMENFDPVGIHTGDSIVIAPAVTLADKEYQMLRSAALNIICALGVEGGCNVQFALHTDSFEYAVIEVNPRVSRSSALASKATGYPIAKVATKIAIGYTLDEIINAVTGNTFAAFEPTLDYVAVKFPKWPFDKFVYASRDLGTQMKATGEVMSIADTFEEAIIKAVRGAEIGLASLDLPRLAAKTDAEIRGMLNTVTDERLFVLYEAIKRGISVDELYSITKVDRWFLHGLKNIRDRPSLFASASPLIYKMVDTCGGEFEAKTPYFYSIKNGFENEALPFIQKSEKLRVVVLGSGPIRIGQGIEFDYACVHCVWTLRKMGYEVIVINNNPETVSTDFDTADRLYFEPLHIDDVMSIIETEKPIGVIVAFGGGTAIKLTKKLYDRGVSIIGTCAESIDICEDRERFDKLLEQLHVKRPKGFGVMTEEQALDAADKLGYPVLMRPSYVLGGQNMIIAFSPEDIREYMEIILRSKQENPVLIDKYLSGREIEVDAICDGVDTLIPGIMEHIERTGIHSGDSIAVYPALNIEDDLAGKIFEITKKLCMALNVRGLVNIQYVYYENDIYVIEVNPRASRTVPYISKVTGVQMCEIATKVSVGQTLASLGYTSGIAKMPPYVAVKVPVFSFEKLAGLDTHLGPEMKSTGEVLGLGKSLEEALFKGLVAAGYKILKGGGVLITVRDGDKGEIAGVAEKFANCGFSLHATRGTARFLEGKGFTVHAIDKICDNDMENTETLLASGKISYIISTSEKGRDPALDDVKLRRKACSLGVPCLTSIDTANALADSLLSDYSEINTELVDINDLRSARVQLPFTKMHGCSNDYIYINCFDLEINSPESLCVLLANPHTGIGSEGLVFILRSSVADARMRLFNLDGSEGGMGGNAIRCVAKYLFDNGIVKKQKMRIETLSGIRELFLTTRNETVLSVKVDMGRAELHPSKIPVKLFGENVIARPVRIGGKEYKITCVSMGNPHAVVFCDRIGKLDLHEIGPLFENDPMFPERVNTEFVEIMDRNHLKIRVWERGNGETQACGTGACASAVAAVLNGYSDKGTDIKVQLPGGNLIINYTDDAVYMTGDCVKVFDGVVEI

SEQ ID NO: 90951 - protein, 276 aa, Unknown
  Obtained from environmental sample
  DOMAIN (65)...(252): ABC transporter
  misc_feature (1)..(276): Xaa is any amino acid
MESISIKRLSFSRTVLSSSELPKTPNKSISNILNKTFDKTGFTKAIFLPKPLEILKNVNLTLEKGDILCISGKSGEGKSTLLRVIAGLDKATSGEISLFDEPIKPSEWTALSMAQKGLGFVFQNDALISDLTVRDNIAVPLRYNKIGTEEEIKQKVDRALLLMLARSFANEYPYSLSLGMRKRVAIARSWAMDANILLLDEPTSGLDKNSRNNLLSLVNNLRELYKTTIIMVVSDLHVARDLNSKISFLIDKKLSDPMLYHEIRNNEDSRIRAMVM

SEQ ID NO: 90952 - protein, 378 aa, Unknown
  Obtained from environmental sample
  misc_feature (1)..(378): Xaa is any amino acid
MNKIQSNKIGDELIQTIKIERLKLEASLNSQITLALKMANSPLIQRYFLNPTDTELQKIAFEELAEYRKTFASNSIFWVNDIDKKFYSDESYAYNVDTADTNNYWYMMTFNGKEKYNFNINYNPDLNVTNLWINARVFDNQHKSIGIVGTGVNLSDFIDTVYQNYSGIAELYFLKADGEITGVNDVNLVKSKVNITKMLGPIGTEILDKTKELKSERKIEYFETKDEKYIIAVGLIPALNWYIIATYPIVIGNSLSGMTVLFCIMMAIIFAIFVAFNIFIVRMLEPLNRMVKTIKQTSLDWELKQYESNHHKDEIGTLGEFLSMTIIDQLTGIYNRRYMDGHLKKIIKSMARTEGSLSLLLIDVDYFKRYNDTYGHDA

SEQ ID NO: 90953 - protein, 156 aa, Unknown
  Obtained from environmental sample
  DOMAIN (122)...(156): Adenylate kinase, active site lid
  misc_feature (1)..(156): Xaa is any amino acid
MKLIFLGPPGAGKGTLADRAVEFLKLPHISTGAIFRSAIAAQTPLGLKVKAIIDAGKLVDDETTIALVKEYLSKDDVKDGYILDGFPRTIPQAEALAGFSAVDKVINFDIPDSLVLERLGGRRVCRKCGHNFHMVFDKPKEEGRCDHCGGEVYTRD

SEQ ID NO: 90954 - protein, 843 aa, Unknown
  Obtained from environmental sample
  DOMAIN (545)...(682): AIR synthase related protein, C-terminal domain
  misc_feature (1)..(843): Xaa is any amino acid
VQISDNGCGIEPEDIEKSVVRHATSKLRDASDLFKLSTNGFRGEALSSIASISKLTIETALRSSVTGIRAEFEGGVLKSKEEAAIPFGTTIIVEDLFFNAPVRAEFLKNDSVESSRILDCVTRLAMANEDVRFEYRADNRMLFCTAEGNLQARISDCLGASAARSLKEVEWEESGIRVFGFISSPESLQAGKRNVPYIFLQKRPIYNALITKAINQAYSPYGDYSPIAVIFLEMPLETFDVNVHPAKKEVRFSKDNAVFLAVNHAVHNALQNAISYPSISITSTNLLKETAPKYAPEVSKSAVSKAGVSSFYERLSGANSEEKEANGGLQNNKAEISSFFERLSGANSEKKEANAGLQQVAQRVLSHPAVADKGFLITIGDRSVTGMIVREQMVGKWQVPVADCAVTTSTLDSITGEAFSIGERTPLALLNSGAAARMAVAEAITNIAAAKISDISKIRLSANWMANPATKGEGAALYEAVKAVGMDFCPKLGIAIPVGKDSMSMSASWESDGKKKTVTSPVSLVVSAFAPCEDVCKSLTPELQNVENTILVLADLGEGKNRMGGSIAGEVYNLFGGEPPDADPELLKQFFKAVQTLNAQDKILAYHDRSDGGLFATVAEMAFAGHVGVKLEIEEQIPFLFNEELGAVLQIKENDFEDACKLFPFKKIGKLSDDFHLTISSYRQSLSELRKIWSRTSYEIAKLRDNPECARQEYEWKYSEKDAGINYEVSSFCERLNEVNSEKKETNEVFGNSSKRPRVAILREQGVNGEVEMAAAFDKAGFIAVDVHTTDILSGKTDLSEFSGLAACGGFSYGDVLGAGEGWAKSILFNDRAREVFQRFFER

SEQ ID NO: 90955 - protein, 804 aa, Unknown
  Obtained from environmental sample
  DOMAIN (3)...(93): N-terminal ig-like domain of cellulase
  misc_feature (1)..(804): Xaa is any amino acid
VCAVSSAFAQDILVNEVGYEQNGPKRAVIQSSSAITDTKASLVNSSGTTVQEITLGAQTSVSGWSGRNFKIADFSSFEQAGTYKLKVGSKESQSFKIGKKILQTETGAFQISFFNSMRNTDNDRNLGIYGSSQTQNIYGGWWDATGDPGKHLSHLSYANYFNPQQIPLVVWSLLHANELQPSTFGTSTKDEAAWGADYLLRSLSTAGYFYMSVFDSWGAGHREICAWSGSDGTRSADYQSAMREGGGVSIAALARASKAGISKDSTSAQYLAGAKRAYAHLKANPTTYQDDKTENIIDDYAGLLAATELYNATQEATYKTDADTRAQSLLSRQSDEGWFYTVKKSGANTRPFYHAADEGLPVVALARYVEICNPASAIKNNVQSAIKKNLQWYAKITSEISNPFEYVKMYGDASSGVAPGETNLALGGTATASRSEGSYTPGKAIDGSTAGDSRWSSYQSGAENNNQWIAIDLGSTYKVNKVVLNWEAAYGKSYRIEISDNGTSWTQVINITNNTSAGQKTHTFTTPTETRHVRMYGVERGNEYGGFSLYEFEIYGEPSAGQQPPTPHNARFFMPHTNETGYWWQGENARIASLSAAFTMGAQLADPSGKFWADTLFGMASAQLDWILGKNPFGVSMMFGFGAKTYPNYPASRGLANIKGGICNGITARDGNENNLDWKPYGDGEWQNWRWIEQWLPHNAWYLIAISSLSNRIDNPIIPPPPPPVDPGTDPEPGTDPEPPEAIKSSNPANIPGFNIVAVNARNVMVELPFASRNSVVSIYNIHGQKLVSYSIPAGNLSATVELP

SEQ ID NO: 90956 - protein, 635 aa, Unknown
  Obtained from environmental sample
  DOMAIN (112)...(223): Phosphoglucomutase/phosphomannomutase, alpha/beta/alpha domain III
  misc_feature (1)..(635): Xaa is any amino acid
MKDSNGEALKIYKDYILNLFPKNSLQGVNIAFFQHSAVGRDIAVEILTELGANVKAVGRSEKFVPVDTEAIRKEDVAFAKQLCASGEFFCVASTDGDSDRPLLSDENGVWLKGDSLGILAGRALGIEAVAIPVSCNTATEKSRFFKEVLRTRIGSPFVIEGIKKLQGKYKSVAGFEANGGFLTESLTTRDALTPIIATIIESKKQNLKISELLAKLPARYAGSGLTRGFSVDATDGYRIEFENGDIIHLRKSGNAPEFRCYTESKTPEQAELLSDKCIKTFELWKIMGSKLYDELKELTKKEIKHIEENITPMDFEMLRDNPKYSEFDKKGKEIIERGKAAAYLIAGGQGSRLGFDGPKGVFRLESLGKSIFQIHAENILKLGKNIPLVIMTSPLNNKETIQHFEQNDYFGLDKNKIKFIEQGTIFAMSPNRELIFENNGDLFLAPDGNGGCFRALCETGALKWLEEQDIEIVFLYGVDNILAKPCDPPFIGAFLDSKMAAASKVVKKKYPEEKMGVFAFKNGLPGVIEYSEISPELAKKLDGGNILAHLFTMESLKKLEKESLPWHLAVKRVCGIEKAFKFEQLLFDAFPKLGTMYLTGVLREEEFAPIKNASGDDSPESAVEMFRKRYELQSH

SEQ ID NO: 90957 - protein, 67 aa, Unknown
  Obtained from environmental sample
  misc_feature (1)..(67): Xaa is any amino acid
MNNIVVALDIGSAFVRALICERDEDRVLKIIGASVKPSTGLRKGVVVNIEATLHSVTEAIEDAEMMA

SEQ ID NO: 90958 - protein, 131 aa, Unknown
  Obtained from environmental sample
  misc_feature (1)..(131): Xaa is any amino acid
EGTRKIASIPGTLSDFIFSAFVEETGFIGIMLFFVMYAVFGVLGYRAALRAQTVFGRLLAAGMTTMIITQTLSNVAVVSGALPATGIPLPFFSAGGSSIATTLICAGMIANFFRKGVSVPSSDLTEALNDS

SEQ ID NO: 90959 - protein, 241 aa, Unknown
  Obtained from environmental sample
  DOMAIN (62)...(228): Phage integrase family
  misc_feature (1)..(241): Xaa is any amino acid
MRRNNDKIDTRTAAKAVSALRSFFRFAMDERLVKDNPAFLLENPRRRTRLPEVMDMEVIEELLDKIDTSTPLGMRDRCLFELIYSAGLRISEAAGLNIKDVDISGGIAKVRGKGNKERITLFGTEAAEKLTEYLREARPKLAGKVNKTHALFIGRTGKRLSRKGIWKNYAKLAVIAGTSSRLHTLRHSFATGLLKGGADLRTVQELLGHADLSTTQIYTHVDVGVLRENHRRFLPRLKTAE

SEQ ID NO: 90960 - protein, 120 aa, Unknown
  Obtained from environmental sample
  misc_feature (1)..(120): Xaa is any amino acid
VYSDNCFLNEEILTHIERANNVHPIETEIPPSEKTAHFSEHHGKKELERIWLKLASNPYVISARSTNWGGKKFIRKIDKDGLIEIVLVNTEREYAMQLKTTGQTFYETEFIAKNIEENYS

SEQ ID NO: 90961 - protein, 712 aa, Unknown
  Obtained from environmental sample
  DOMAIN (24)...(709): V-type ATPase 116kDa subunit family
  misc_feature (1)..(712): Xaa is any amino acid
LNLTSRKMKRVQMTVLRSDVNTVIEYLGRHKAMHFVISDSANISSGANSVSKADSAKNTKTGSSGADSISKADNTNSVSKPDNAKVSADAELLRIKGLMEKLRSCCEFLGVELPSEPTQDSVLPDEAEEALCEKLCSAINALKQREIIVRQEKQSVEEAYSEAKAFSNLNAPFSDLDQLSFLTLRVGRLDPKVQSELKQTLGERAVIIPLGGEGNDRLLAASSRKGRFALDSELKKCSFKPIAIPEGYQGVPAELLEGLEGRLKNAEEELEEIENEKNKLRDESQAALYRLGSILLMGLAAEDIKSRLVSTSSVYILSGWIPADMINQTAADLSKATQGRTAIRIYVPDEIPEVQDGSEKVPVSMKHNKFVKGFEGVIFSYGAPLYGTIDPTPIVAIFFTLLFGIMFGDMGQGGVLLLLGLLTGKYSRLAKFKNYSTPLISVGIASMVMGLVTGEIFTREELLVAPTRTLTQAIIGKPLDRLVTVMPLAESGGSVIKLFYFFGFTIGMGVILNSLGLLINIYNKCALKKYEEAFFGKTGLSGLLLFWYAIFIAVRCIFFKGRFEYFDLAGILVPCVCIFFGPIIWRCITRERPLLSHGIMTFIMEGFVEVMETASGYISNTVSFLRVGAFALSHGVLSYIVFRFTEELANSGGPIGSISGLLVLVFGNLVIIVLEGMIVAIQVVRLQYYEFFSKFFTETGVEFAPFRFRKGE

SEQ ID NO: 90962 - protein, 370 aa, Unknown
  Obtained from environmental sample
  DOMAIN (186)...(368): ABC transporter
  misc_feature (1)..(370): Xaa is any amino acid
LLPLLTKTNKKLGEKRVESGKFIFRLLKESFGNIKFIKLKGNEEDVLQTYDTATAVKARTEVLSNVYSAMPKGILESVGFSLLIAAVMFFIRIYHDASAAIPIISMYALAFYRILPSIYRMLQNLGEISYFHKTLDSVSENLHQQHENEESAPVDFNRSISLDNISFSYLNGTEIINGVSFSIKKGEKIAITGESGGGKSTLIDIIIGIHKPVSGKIIIDDTALTDKNIRSWRMKIGYIPQSIYLFDGTVAENVSFGSIPDENKIIKALQRANIWDFLSQKEGIKTCVGDDGIQLSGGQQQRIGIARALYDDPEILVLDEATSSLDNETEKKIMDEIYNVSENKTLIVIAHRLSTVEHCDRRIRMKKEKL

SEQ ID NO: 90963 - protein, 190 aa, Unknown
  Obtained from environmental sample
  misc_feature (1)..(190): Xaa is any amino acid
MRFGNPEYFLLLPAVPLAALFFFIMYRRKAKLLSRFASAPLVRKLNSSAGPARYILKSTFFCLFLTFVIFALVRPKFGVKMEMVERKGVDIMVALDISHSMLAQDLAPNRLERAKLEIRKFINLLKGDRVGLIIFAGESFVQCPLTLDHAAAAIMLQSVSTDWVQLQGTALADVIKQSVRAMGGTNKKHK

SEQ ID NO: 90964 - protein, 646 aa, Unknown
  Obtained from environmental sample
  DOMAIN (48)...(613): Prismane/CO dehydrogenase family
  misc_feature (1)..(646): Xaa is any amino acid
MDKETILTKVSDGASAEMLEKTQADCVETCFDRAEHQKNQCGFGRSGVCCRICHMGPCRITPKSPKGICGATVDTIVARNFLREVASGTSAHSDHGRHLVLKLRDVAQGKAPGFQIKDEKALRRAARLYGVEEEGRDANAVALDLSNVFIREFTEQEEHLKTLELAPKKRQAVWEATGVKPNGIDRMVVEAMHRTHMGVDHDYLNLLHHAFKVSLADGWGGSRIASITSDILFGTPTPLKSAANLGVLKKETVNIIIHGHEPALSELLTVVVADPEIVSYAKAAGANGITLAGICCTANEILMRHGVPVAGNFLQQELAIATGAVELMVIDVQCCMPSLPEIAKNYHTEIVSTSDIARTIGAVHKSIGHGSEPLNVARDIVRRAIDNFKKRDAAKISIPRHKEDLIAGFSVDAIKYMLGGRFRASFRPLNDAIMQNRILGVVGIVGCNNTKCKTDEYTNVLTAELIKRNVLVLQTGCSAIASAKAGMLKPEIALSQAGPGLREVCEAVGIPPVLHLGSCVDNSRILEAATESIHEGGLGEDMGGYPAVGVAPEWMSEKAVAIACYFVASGVPVVLGNPFYVSGSKAVSDYLHGSVQEEFGARFYCIEDPLQAADRIVEILNQARDALGINKKAERKLFDMKDRRAL

SEQ ID NO: 90965 - protein, 360 aa, Unknown
  Obtained from environmental sample
  misc_feature (1)..(360): Xaa is any amino acid
MMAALAAAPLLFAQGLRYEPPAIDGHEPPFRQIGGSPFTSGNPAILKNNGTMFFDTSAIDFEKRQLTFTRQDKDGNTVQSYHYGELNDYITDSRAHSFYEQWYNTLTEQAKKDLGLPPAPKLQWELAVHYPPWAQRLLGNDPPKLKIEGRLKLTVAYDYTRIVVDKDTTTDIIPLDFEPEYEFAIRGSVGRLISVNITHSRKDGFDLGDDPLKNFKVEYKESYEGELEDEIIQEIVAGYTGFDMPGTNLSGYSEKHDGLFGLKARAKIGPLMLTTVLSHAQGEAMTRELGGKNDPNAMTALRDNEFIKNRYFYLDTAYKAYNNKVYSITNPERNAPRPPRITDFQAFVSIQGNETSNSTV

SEQ ID NO: 90966 - protein, 141 aa, Unknown
  Obtained from environmental sample
  misc_feature (1)..(141): Xaa is any amino acid
AKEEYYAYIHPESETDSLKANPELRRFIESLPCRSSVLTNSPPFHAERVIKKLELEGVFQKVFAIEEHGLKGKPHASFYYRALDCLGLKPEEALFIDDIPRYVEGYIAIGGKGLLFDERDKYTWYTYERIKDLKELCGFLS

SEQ ID NO: 90967 - protein, 45 aa, Unknown
  Obtained from environmental sample
  misc_feature (1)..(45): Xaa is any amino acid
DTGVFTALRDEKLFNRVKVSFDTIEWPNGIDLDPEVLYEKSVVCA

SEQ ID NO: 90968 - protein, 235 aa, Unknown
  Obtained from environmental sample
  misc_feature (1)..(235): Xaa is any amino acid
MNFYKINRLLHNKSGFQLLMPLLILFLLVIANLIVDSILMKNNPETSSFFRIRMIKDTFGNNVFSGNIISILNNASELVILAIGMTLVTAASGGQDISVGATAAIAGSIFLKVVRLSPDVTWMTIITAFLVCCAVAMLFGAFNGALVAIFKIQPMIATLILFTAGRSIAYGINGGASPKLFDNITKQMELFFRAFQSRLQYLLYYCILSDFTYCLNLPILDCTRNRLASTKKPPV

SEQ ID NO: 90969 - protein, 382 aa, Unknown
  Obtained from environmental sample
  DOMAIN (4)...(312): Melibiase
  misc_feature (1)..(382): Xaa is any amino acid
MPILGKTPPMGWNSWNTFGNNISGELVKSVADAFIQRGLKDAGYQYVVIDDCWSEKARDKNGRLVPDKNKFPDGMKALAGYIHSKGLKFGIYSCSGTHTCAGYPGSFEHEFVDAATFAEWGVDYLKYDYCYKPRNTAGEDLYKRMALALRNCGRDIVLSACNWGNDGVQKWIRESGCHLYRSTGDIQNNWKSIEGIMLSQLDNACFSGIDCWNDMDMLVVGMGGSGENAYVLSTGCSETEYRTHFSVWAMMNSPLMIGFDVRNMSEQTAAILTNKDVIALNQDIEGRAPYCVRQWNNLDNVFSLVKPLSTGGDYAVAMVNISDVKAEMSLQFYDIGLTYASGLGLEFYDCWKHEVIGFFTERASIDIEPHECRVFRCRVKKA

SEQ ID NO: 90970 - protein, 481 aa, Unknown
  Obtained from environmental sample
  misc_feature (1)..(481): Xaa is any amino acid
DRANVLRVFDPNAQAMQNGFAELEKRLQSKENGVRKEVIVYYSGHADEKGLRLGGDVYSWADFRKNVNSINADVKVAILDACGSGAITRTKGGVSRPAFMQDASSEMKGYAFLTSSNENEASQESDRIKGSFFTHALVGGLRGAADMTGNGKVTLSEAYQYAFDETLRNTQNTSAGSQHPNRDMNLAGTGDIVMTDLRETSAVLTLDSNLEGRLFIRDEQGNLFAELNKIRGRQIELGMPVGKYSIQMEAPSKIWMAKEVQISEGKKNVLSMNDMQSIEREKAVARGNADSSGMTGLDSARAKPFKFNFNAYAYNKEPANEVQLGFFAHAKKALSGTQIAVFGNLATDDIAGTQISSFVNISTENIYGLQATSSFNIATNFNGVQASVYNIAGIGNGVQVGVMNIISDTLYGVQGGVINIASKVSTLQGGVMNIANDVGKVQGGVMNIAGDAGLVQGGVMNVAGKVEKLQGGVLNIGGHVG

SEQ ID NO: 90971 - protein, 163 aa, Unknown
  Obtained from environmental sample
  misc_feature (1)..(163): Xaa is any amino acid
VFGIIDWLVLAAYWGFSIFIGLYAARGNRSFKDYMLGGGSMPWIPVGISLIATSVSATTLLGVPADVFDVDMSLIMTNVGSFLSILVVGFLFIPRFRKCGIQSAYELLEKTFSRSVRRVAAVFYAMHLVLRTGHFIICSFHCACFNFANSRLGGYFNIIFCRY

SEQ ID NO: 90972 - protein, 667 aa, Unknown
  Obtained from environmental sample
  DOMAIN (1)...(389): UvrD/REP helicase
  misc_feature (1)..(667): Xaa is any amino acid
GWFVRRNGSLAGLISGFVIYDDDDVVSLLSSILENTPKADVKHYAHNISRAKDYFLTPDDPKLAIIDHGKKFREIYKRYEERMAQIGNVDFGDLIKKPVEILRSQPEVALRFRARFQVIMVDEYQDANVAQFRLLKELCGPDTYVCVVGDDDQSIYRFRGAEVKNILEFPDRFLGADIIRLEKNYRSTSPILKAASSVVDYNRGRLGKTLRAEKGDGPLPVLAYLPDQNAEASFCADKIAASVKKKETNWSDWAILYRTNAQSAGFETFFLRKNIPYRVVGSLKFYEREEIKDSIALLAFLVNPRDEVAFRRIVNKPTRGVGAVTVDKITETSNEYNGNLLESSRALDCSAKARKGINEFIKVIEDSKKLLVSQSPTIENEDVKKQNGLISGDKLSVLVTKIINDSGLAEYHRSQDDITGNNKIGNLQELVNAASDYPQTYEGLANFLENIELDRSMEDKTNADKSGDIQNAVTLITFHNTKGLEFKRVIMTGLEQGVFPREDKKGDELEEERRLFYVGATRAMDELYLTTCAERRMYGKTAQMQPSLFIREIDRNYLQVKELEATQRVTAPQYAGGRSFIGRNFNPLNPQNLHASTGSGANAELEERAGWRRGQRLFHEDHGYGAVMGVKDSEDGPVVHVRFDSGQDKLFLSEYQGRAYEKIGEEY

SEQ ID NO: 90973 - protein, 299 aa, Unknown
  Obtained from environmental sample
  DOMAIN (49)...(299): Citrate synthase
  misc_feature (1)..(299): Xaa is any amino acid
MIDLKEHLKEISGSDYIDIELFRKYSVKRGLRNDDGTGVLVGLTRVGDVRGYIVEEEEKVPTPGKLYYRGIDIEDIANEAAKQNRFCFEETIYLLLFGKLPNQKQLESFNKLLGETRILPKNFVEDVIMKVPSRDIMNKLASSILALYPYDEDPENQSPENVLRQCIELIARFPAIAAYSYMSKKHHFDRESLIIHPSNPLLSSAETVLSLIRPDKKYTPYEAMLLDLALVLHAEHGGGNNSTFTVHVVSSSETDTYSAIAAGIVSLKGYKHGGANAKVIGMMDEIMKNVKNWESEEEV

SEQ ID NO: 90974 - protein, 497 aa, Unknown
  Obtained from environmental sample
  DOMAIN (337)...(458): Shikimate / quinate 5-dehydrogenase
  misc_feature (1)..(497): Xaa is any amino acid
LAKNCLCLTGKTIKQDVDLLNKYRKYADLAELRVDCLDSDERLYIRRFPELAGIPVILTVRRDVDGGYFTSGEGARLKLLANGLAYANADSRFNFAYVDIEEDFNAPSLEEAARTFGTRIIRSCHDLKGIIDDISAKIKSMKRAGDEIVKVAVSVKSTYDVLNVFRASDTFIKQDKILICMGHYGIYSRILAEKFGSFLTYSSTLSENVTPGAPGQMDVRELSELYHFKKITKDTKIYGVIGNPLKSSVSPWFFNTIFNLENADCVYAPFPVTDINDFLDLADGLNIQGLSITVPFKETVLPYIGEKSEIAESIGACNTMYRKEDVWYGDNTDYAGFIMSLLNFLGRKDLKRQKITIIGAGGVSRAVAAEIFKMGGKALILNRTVHKAASIASLYGFRWGGLDNQGIDLMSKFNDIIIQTTSVGMEGYNEGDPLETYEFSGKESVMDLIYTPAQTPFLKRAATAGCKTLNGYDMVIRQACLQYANFFDREIPETHLS

SEQ ID NO: 90975 - protein, 114 aa, Unknown
  Obtained from environmental sample
  misc_feature (1)..(114): Xaa is any amino acid
MSDKKILFRAVGDIRVDRDNPEFLMALVAPALNEADITFGQLEASYSTRGQIAINLTPGFRADPKNVPAIAKAGIKVMSVASNHSADYGHEAFLDTIDNLTKNGIKVIGGGKNI

SEQ ID NO: 90976 - protein, 175 aa, Unknown
  Obtained from environmental sample
  misc_feature (1)..(175): Xaa is any amino acid
KSIAAFFGKSVLSELEKETFLSRAAEVRNSLGDRPFLRAIHFFNENERVDAMTAILLEMEKAATTADKQRALIQYLDLVNESGDSSWEFLQNVFSPTRPKDQGVSSALALTKDFFRKQKLRGACRVHGGGFAGTVQVFVPVDAMNAYRAHIEAVFGAGALTVLRIRSRGAVELEF

SEQ ID NO: 90977 - protein, 444 aa, Unknown
  Obtained from environmental sample
  DOMAIN (295)...(366): HAMP domain
  misc_feature (1)..(444): Xaa is any amino acid
MSFTAEDIRIISKIATNIKSNPEKYGRREIPFPDTSDTEGRVTATAHIPDRNTDLSTLEDEIGLMANMQDVLVAVQINNKNACATYVGTEYGVTISVDPHSVQKTLYYDPRTRVWYRNAKRVNDIIWTDVYEDFFGRGLSITCAMPFYDAEGKIEGVAGLSMFLVVLRDEVVGTKIGESGYAFMINEKGEMIISDSIERDEDGRITRENILESDTFPRETALKMIKGENGIEHVVMDGKEKLIAYHGLTTVPWSLALVIDAEEVISPALLLQNNIISLKQSALAAFNSDIRFIAILLCIIIVFIIAGIMFFSEQLAGDITRPIEKLTQDATLIGAGKLDHILEVKTGDELEILAESFNSMIVGIKIITADNERLEITSAEKTREARIIQEANQNLQSILNMLPVGVGIMSTEDHSFLFTNKAFIDVFNCTSIDQILGHSGFEFM

SEQ ID NO: 90978 - protein, 228 aa, Unknown
  Obtained from environmental sample
  misc_feature (1)..(228): Xaa is any amino acid
MVLFSTGEHTIMPVRSTISMDLAKKEKTGASLGLTNSISQFGNIAGYIFVTALFLILGKIGIGRKDYLGYRIVFGVFAALMTTGALVASALRETTIKAERRRFYFAKKFYKYYMLEVFYGSRKQIFLTFAPYVLILQYGADPSIMSILYAICAGFGMLCSTLIGRIIDKVGYKAVMVGDTLFLIVVCLLYGFAHRLFPPNVAFYVVCCNFVLDSIISIASMASNIYVQ

SEQ ID NO: 90979 - protein, 348 aa, Unknown
  Obtained from environmental sample
  DOMAIN (112)...(278): Radical SAM superfamily
  misc_feature (1)..(348): Xaa is any amino acid
ANRNENEPIVIAGGPAMANPMPIADFFDCLCIGDGEILAPKALRIIGESKKAGKNKAEILEQIAKLEGFYVPAIHKEIKSVKRTYLEKLAKDLFPTKNLIANMPLVHDRFCVEVMRGCTQGCRFCQAGYWYRPTRELDADDVLDIAKEGLKATGDRQLGLLSLSTADYSPVEKMLDSFIEDPFFKNIDVSLPSLRVSSFGSSLANKVYALKGGRSATLAPESGSERLRKFINKTITNADIEVATQSAFQNGFNKIKLYIMVGFPTETEEDIQDLVKLTERLLEIGLACNKKCQINLSVGIFIPKAWTPLQWAPFVKKEKAIAHIKILRDKFYKHKNVKVSWNSWETAH

SEQ ID NO: 90980 - protein, 415 aa, Unknown
  Obtained from environmental sample
  misc_feature (1)..(415): Xaa is any amino acid
MELNTEFIEQLKVNEVELMKRIAEGLNIKTGQVSSVVGLIADGSTVPFIARYRKEVTGSLDEVQVRDIDHLFKGGMNLETRRIEIIRLIFEQGKLTEALYGNIVKAASLAELEDIYAPYKKKKKTRGMLAVEKGLGPLAEAMKTLEAPALLAFAAEFIVGEGDPRIAEHPELAVATTEDALQGAMDIIAEEVSQESENRSTVKSFYLADGKIIVKGSGKSGKGDEEAKKTSTYQMYWDYTEPLSQIKPHRLFAINRGEREEVLSVTFDVDENAAVEMLCNKYVIHNDYHKTAVEDGLKRLLSPAVIRELRGDQSEAADTHGISVFGQNLKNLLMQQPIKGTRVMGIDPGIRTGTKCAFLNDTGKYLGSVVIHNHKVEEAKKLILEGVKKFDIQLIAVGNGTGSREVQEIVSAVIA

SEQ ID NO: 90981 - protein, 229 aa, Unknown
  Obtained from environmental sample
  DOMAIN (164)...(221): Bacterial regulatory proteins, luxR family
  misc_feature (1)..(229): Xaa is any amino acid
GLGNGDENAAVKWLEGQGPIRSLQLYKVYQYFPTAKAMMATGRLSAAEKLLDSLANFASDYRRNADHIEALTLRSICLWRLKRTKEFIAVFTAAILKARESELIMPIIKNGAAVLPILQKMLNKLKLGYDADTLDRAFVQSLMMRSREISKHTPGMFWRAKSRPIKLTPKQSEVIGYLVQNLSYKDIGKRMGVTATAVDYHIRVLHEKFDALNKRELLKKAVELGFVEI

SEQ ID NO: 90982 - protein, 75 aa, Unknown
  Obtained from environmental sample
  misc_feature (1)..(75): Xaa is any amino acid
DIDETPAKAESLPASTTQKKGGDFEIPSELKKELKNILGYMDQLLESLPEEKIEEFAKSEYFDSYKKLFKELGLV

SEQ ID NO: 90983 - protein, 707 aa, Unknown
  Obtained from environmental sample
  misc_feature (1)..(707): Xaa is any amino acid
MKFSKENDITLQSDIADESALAIDDFDMPAIDDTSEVTADSTEDTVADESTSSFVDDVSEESALSDESAVAADDTADGNVVFEGSDDSEASALAADDFDMSALDETSEGSVASEGSVASEGSEEDAIADESDDSVGSDDSLGSDLAADDFDMSALGDISEENAIVEEDAVSLEDSESAASTEDNASEGSDASEASELATDDFDMSALGDDSDTAAFEESLAAEENIVADEVDAPIQEDIDVSAFDMTPEESDTSEEITAPEESDESASSDESAGSDDISFDDDVVSLDDSDLSMDDLDLSDIGDIPEESASSDESAASDESAASDEIEEKQEFVDTDIADLGVSLDAESLDAETLDTGSTDAESLDTESLDTGSADIDSLDAESALTDSAESVTVTDEQPDLSVDALDENIEIDFDAIKDHDHDELEALRENGATPVTFPPEDTSYLEEDDHINLDLSEAVIDEPELSTEGIDEPPITEPSLDIDSLDDLNISIDDSDVPSADVPSEEASSIDDSSSIDDVDIDVAMPLGDVKDDGQDLSLDNGFQSGGEISIDDQMPEGFEDELQDASVPLEEAADTSDLMSSDLASSDLMSVEEAEPAEITAPDESAEDIDKIEEIGEIDDVDEIAGIDEKPAKAASAPASAPSSAPAQKSGNFQLPSDLKKELKNILSYMDQLLESLPEEKIEEFAKSEYFDSYKKLFKDLGLV

SEQ ID NO: 90984 - protein, 450 aa, Unknown
  Obtained from environmental sample
  DOMAIN (264)...(331): Transglutaminase-like superfamily
  misc_feature (1)..(450): Xaa is any amino acid
LVFIGGALLIRPFQEKAVDKGGGLLEPNLFRFDFSQIIRLESEISVNDDLVLIVKKDPYDSHILLRRYTLSAYNPRQGFFRLGEVDEAAHPQNLPSRRTLLQNKEIERFRESEQEYYIVNFDSSAFIGMNMPVEVIPFETWDASSFNSAYAVISHTSEAVPYELVNAVHDRDWSESLGMKPEEYALYTEYGSDEAIAAFARKIIGDSINSSISRFPRRGGENSPSYWEQVQMIYDRLKFGEYRYSLKPGIAADGDQLKHFLFNTKKGYCSYYAFAFTLMLRSLGIPCRLAAGFFVDPSTEAFGYFPVRADMAHAWAEVWFPGYGWIEYDPTTENIAEGEEFRFSSGTPPELFERLMKEILDNRSRLKAKEGDEPESERGNLASLGRSALSFINKKGPVLLVALLLLLFLSIRFGFFWLYSISRMPRKKALYLWAYVKRRMALAGFRKSNI

SEQ ID NO: 90985 - protein, 529 aa, Unknown
  Obtained from environmental sample
  DOMAIN (302)...(335): Tetratricopeptide repeat
  misc_feature (1)..(529): Xaa is any amino acid
AEGEEFRFSSGTPPELFERLMKEILDNRSRLKAKEGEESESERGNLASLGRSALNFISRKGPILAVALLLFLFLAIRFGFFWLYSIRKEQRKKALYLWAHVKRRMALAGFRKSNIESEPEWARTASSITRNLYQLYLNAAAARFAPVFTFENKKEMEAHYRFFNGEYKKAVALWRRILACILPPLALILVQTKRRPDSSTKILSSILVVVFILLFRMDTMAQADLDSSQLGRTADSIYESAFAAQMAENWERAIELFNEGAKTYPDDFRFPWSLGNLYYNRRLFNLAWDEYRKTERIIPWETEILLQLANTAAYLNKNEASASYYERLLVLDPDNREAVSSLAWMYFKLHRLREGERLLLDAMDYLGEDIDFAMTLGTIYSGMFRYAESKDSYQKAIQGAKAVGDRIYAALSYYNLSILETRFYQFALAFDCTNASLEAMDRASGKLARGELFLARLELSRALADYQEAYKTDSSPLSKLNLAQAFQIGGRLNEAAVYANDCLKAGDNSWMMNYGIDPVRYKRDIHEIL

SEQ ID NO: 90986 - protein, 532 aa, Unknown
  Obtained from environmental sample
  DOMAIN (265)...(502): FGGY family of carbohydrate kinases, C-terminal domain
  misc_feature (1)..(532): Xaa is any amino acid
MDIKQAITENKTSLGIELGSTRIKAVLIDDTYSPVAQGSHDWENKLEDGVWTYHLDDVRKGMQDCFKNLALDVKNRYGLALSSVGSVGISAMMHGYLVFDKTGNQLVPFRTWRNTTTEKAAALLTEEFKFNIPQRWSIAHLYQAILNGEPHVKDIDFITTLAGYVHWKLTGKKVLGIGDASGMFPVDNSKYNPLMIKQFDDLTASNNFQWKIEGILPAVLNAGERTGVLTAEGAKLLDSSGCLRDGIPFCPPEGDAGTGMVATNSVAERTGNVSAGTSIFAMIVMEKELSKVYPEIDIVTTPSGKPVAMVHCNNCTSDIDAWIKLFRELLDMSGAKINKAALYDDLYYKALEAQEDCGGLLSFNYYSGETITGIDEGRPLFARLPDSNFNLANFMRTLLFSGMATLKYGIDILTEKEKAKIDSLLGHGGLFKTKGVGQRFMAAVFNAPVGVMESAGEGGAWGIALLAAFINQQGETLEKFLAEKVFAGKTGAQIKPDPKDVESFRKFMKRYTAGLKIEMSAVENLKRGNYES

SEQ ID NO: 90987 - protein, 93 aa, Unknown
  Obtained from environmental sample
  misc_feature (1)..(93): Xaa is any amino acid
GFVTNITDNHGIGFKYFDCKGIKKIKIRTRGYNDGVFHVKAKWNGESLAQIKIEYSNIWTEYSSDINIPDGKNALYFIYEGKGYASMASFTLE

SEQ ID NO: 90988 - protein, 259 aa, Unknown
  Obtained from environmental sample
  DOMAIN (27)...(258): Putative esterase
  misc_feature (1)..(259): Xaa is any amino acid
TDIGKDFDPHHVPTGFDSKINGSTYGTLTEKEYSSTTTGVTRKCYVYTPPGYDSGLTYPVMYLLHGIGGTHTEWLGGNPNEVLSNLINADKAKPMIVVIPNVRAMNPDIVPSDIFSITSINAFNNFINDLKNDLMPFINENYPVSNERNKRAIAGLSMGGMESLHIGLRMPETFGYIGAFSSAPGLPLTATQMNLPDEYKNNTFIMMCCGLEDGLLSFSQAYNKLLNDNGVQTTFYTIHGGHDFSVWKNGLYNFAKRIF

SEQ ID NO: 90989 - protein, 339 aa, Unknown
  Obtained from environmental sample
  DOMAIN (164)...(338): Protein of unknown function DUF115
  misc_feature (1)..(339): Xaa is any amino acid
MEGGFSYKGKTLLSRVDPAGKADRIVDTVPVVDGTLYLCPSPLYGYGLERLLSRIEEPAPNSAVLCVEAEPELYDISRKSFSGALKSSRQLCLTNAREPAELCALIREKWGSRVFRKIHVLRLNGGWQLYPALNELADTLQREIALDWGNAMTLAKLGRRYIRNAIRNLALIPRHPSIDGLSFGAEPVLVLGAGPSLDGVLDALAARFGEGCLLPETRPFRIICVDTSLPVLRERGIRPDLAIILESQHWNLDDFTGLSGWDVPAAFDLSALPRSASVLGNRLFLFFTPWTQLNIFTRLGAAGLLPASLLPLGSVGLSAAAISLRLTQGTVITAGIDFS

SEQ ID NO: 90990 - protein, 152 aa, Unknown
  Obtained from environmental sample
  misc_feature (1)..(152): Xaa is any amino acid
MILKKFNYSEFTDKPNAWSLDGLDLENINLLVGKNATGKTNTLLRILWLGSMLAGKQPQLYESGNYDVEFTHNNNIYQYKLNLSSYNVEYEKLIINNVQQFERKKDGTGQILTTQFSEKMKFQLSPNQLVITSKRDAIQHPFLEELVKWAEG

SEQ ID NO: 90991 - protein, 294 aa, Unknown
  Obtained from environmental sample
  misc_feature (1)..(294): Xaa is any amino acid
ESKQEIAAAAADAGDLAREALAALNKNAADIMARSEQDMRQTLEEIADAAADATESAREALAALNKNAADIMAQSEQDKRQTFEEIAQAQTFAAKALADLEKSAANFKTQSEQDAKAALGKIKDAALQADTLAAKTLAKIDGSAHTLAEQSNKLVKQTMIDLEKGADAVKTQSEQSTREALEKIKTTALQADALASKALAKMEAPANDLAARSAKFVQQTLTALEKNANGLKAQSDATARETLEKIKTAALQANTLIEKALARLDEPVHTLSDQSNKIVKQALIDMKRAQAIKH

SEQ ID NO: 90992 - protein, 285 aa, Unknown
  Obtained from environmental sample
  DOMAIN (4)...(284): Alpha amylase, catalytic domain
  misc_feature (1)..(285): Xaa is any amino acid
VFYEIYPQSFYDTNGDGIGDIQGIIEKLDYIKGLGCNALWINPCFDSPFRDAGYDVRDYKKVADRYGRNEDLFRLFAEAHKRDIRVLLDLVPGHTSEEHPWFIESKKTNPVGEYKNRYIWTDSWFFWGLDGLKFIAGEAERDGCYIINFFKCQPALNYGFLERKEKWQLPPDHGDCAATREALKDVMRFWLTGDSGRGCDGFRVDMADSLVKFDDPQKSATSAVWKNIRAMLDAEFPEAALVSEWSSPPLSLKAGFHADFLLDHGNSGYRSLVRDYENGGTDNSY

SEQ ID NO: 90993 - protein, 286 aa, Unknown
  Obtained from environmental sample
  DOMAIN (1)...(282): Alpha amylase, catalytic domain
  misc_feature (1)..(286): Xaa is any amino acid
VRLGITHVHLLPVFDSASINELAVDDPDSAEPKFNWGYDPMHFNVPEGSYSSDPKNPYARIIEFKAMVQALHDAGIRVIMDVVFNHTYRTGGWPFDALVPGYYYRLTDTGSYANGSGCGNEIASERPMVRKFIIDSCRYWAGEYNIDGFRFDLMGLIDTPTMKLLTEELRRDIDPALIIYGEPWQAGGSVLPPKSQTITGVQKGLGFAVFNDRIRTAIKGGSDDDSRGFATGGPSREEAIVRGVMGSIHDFTSEANESVNYVTAHDNLNLWDKICFSLGEKNLAVS

SEQ ID NO: 90994 - protein, 179 aa, Unknown
  Obtained from environmental sample
  misc_feature (1)..(179): Xaa is any amino acid
MGVYMRLFTKPRLTLLLATTIALFAICLSGCGGSGKPGTLTDKRDGQSYRTVKIGGLVWMAENLNYKTDNSYCYEDKDDNCKKYGRLYDGGSAVCPKGWHIPESEEWDDLFTIVGNRDIRLKWDDDNLSSISGDNSVIGKKLKSKEGWDNNGNGTDDYGFSALPGGSRSTFGTYSGIGA

SEQ ID NO: 90995 - protein, 288 aa, Unknown
  Obtained from environmental sample
  misc_feature (1)..(288): Xaa is any amino acid
KNAKVIIATYQSLGISNENDDSSFLLENYPENYFSHIVIDECHRSAWGKWSLVLKRNDQAVQIGLTATPRNLIVNEKTPEAEKDNEITADNIKYFGEPVYEYDMLQAIEDGYLAVCEIQRRDVNIDEDGLSIDEVWERAPCYVTTGEPVPSKEELKDYYEKADYETKLMLPDRISRMCKDLFDSLLYKGTAEQKTIIFCVRDRHSELVANELNNLYNQWCKINYKKQCGHYAFRCTSQSGGSDYIDDMKGSKSDYFIATTVDLLSTGVDIPAVRNIVFFRYVKSPISF

SEQ ID NO: 90996 - protein, 532 aa, Unknown
  Obtained from environmental sample
  DOMAIN (138)...(340): Transposase IS66 family
  misc_feature (1)..(532): Xaa is any amino acid
MQVETLDATVRDYINELETRNQELQNKVIEIETNHKQDYQQLYNEYLTLKEQYDLLVYKRFVRSAEQLLADEKQQLLFAEEAEQPEANEEKPLELQAVKSFTRKKNGGRKPISANLERRPRVIDIPESEKTCACGANLTKIGEETSEKLVIIPPQIYVDQIIRPKYACRQCEGTEDEEKPTVRIAPVEPAMIPRSIASASLLATIFTQKFEMHLPYYRQEKQFEQIGVVISRQDMSNWQQQAYEKLEPLFAILKRTVKEGPVVQMDETEVQVIGEENRSDIQKSRMWLARGGPPGKKVIWYEYHPTRAAYNAKAFLEGYSGYLQTDGYDGYDSAVKDMPGIIHVGCMAHARRRFFEAAKINKKPQSAEEGIKHIRKLYQLEDALRGKWKDDLERFNEERKKEAASLLDEFKAWLLKRVNEVPPKTLLGEAVNYALNQWDKLIKYLESPYLTPDNNACENAIRPFVLGRKNWLFCQSVGGAKSSCGIFTLIETAKQNGLVPREYLTALFEKAPLASSPQDWEKLLPWNIKFPV

SEQ ID NO: 90997 - protein, 85 aa, Unknown
  Obtained from environmental sample
  misc_feature (1)..(85): Xaa is any amino acid
MPFWVIKAELRENYTIYIEFNDGLCGVIDFQNKLKTDHRDIIRELIDKDKFKAIKIERHTLCWDNGVDFAPEYLHDQIKTEKKVA

SEQ ID NO: 90998 - protein, 511 aa, Unknown
  Obtained from environmental sample
  DOMAIN (7)...(335): tRNA synthetases class I (E and Q), catalytic domain
  misc_feature (1)..(511): Xaa is any amino acid
VNKGELSIRDRYAPSPTGLQHVGGIRTALFNYLFARSRGGAFVLRLEDTDRSRFDQSYVQNLYDTFDWLGIHWDEGPDKGGPFAPYIQSERTELYKKYADELISKGQAYYCFCTAERIDKVRQEREKANLSGYDRHCRVVPPEEAAKRAAAGEAHTIRLKIPLGETTRFTDHLLGDIEWKNDDVNPDPVLLKSDGFPTYHLANVVDDHLMEISHVMRAQEWLASTPLHVIMYKSFGWEPPEYCHLPMVMGQDGKKLSKRHGATSIDEFRRQGYLPEALINYIALLGASYEEARPEGRVRPEGRIDIFSLSELEQLFSIDKLNKAPAIFDYKKLEWFNGQYIRMKSDEELAVLCLPSAIEAGLFGTKGAEPTSDQKKTFISAMPLIRERLTYTHEAPEKLAYLFAPPALPSQEEFIPKKADLAETIRLLRLARDMVNQLANEVNDIAAEAYIKEQAEKAAVKLGDLMMPLRVAITGSRVSPPLFGSLRLLGAQESLARVETALEQLAMSNEQ

SEQ ID NO: 90999 - protein, 90 aa, Unknown
  Obtained from environmental sample
  misc_feature (1)..(90): Xaa is any amino acid
MNRIIIIGNGFDLAHGLKTSYRDFIDDFWEKQGEKIFGPHKTLNYNDPSSHYRYKYDGRFYRILSTTYVIPKNATHGYGYTRFDNINKYG

SEQ ID NO: 91000 - protein, 273 aa, Unknown
  Obtained from environmental sample
  misc_feature (1)..(273): Xaa is any amino acid
KGEAPYLNQVPSDKDGKDGKDGKDGKDGKDGKDGSNCVVQPKEGGYDVICGGVNMGALNNGNDGEKCSIKTATSNSAYLQINCGINSELLAKALCGTEAYDPEIKVCKDGELKEKDIANTFTDARDGKKYKYVQIGEQVWMAENLNYAVKGSKCVGSKGGGNNTLIDANTEYCDTYGRLYKWEAAMGALASSDKNPSNVQGVCPAGWHLPSNAEWAKLIDFAGGAAAAGAKLKDTSVYGGTDDYRFSALLGGAGTNKWDQITSLRGEGYWWSA

SEQ ID NO: 91001 - protein, 344 aa, Unknown
  Obtained from environmental sample
  DOMAIN (4)...(94): Cyclic nucleotide-binding domain
  misc_feature (1)..(344): Xaa is any amino acid
MPKPLQYKAGSLIYFQGDPADKVFLLQVGKVNLVYQDIETGEDVHDLVSQGEFFGVKSAMGRYPREENAMAMLDATAMAFTVPEFEALAMANTRIIMKMLKVFSNQLRKIHKQVSSLMAKEEQNPEAGLFSVGEYYFKAKNFGKARYIFSRYLTFYPSGKHVMQAANYLQQAEMGAVKTAAAVAPAAPVASQISPATPAAPVAPPASEPRADSGANLTDAAKAYYDAVSLVSQQKYQQAYLSFKKIADANEDPEYVAKSIFEIGRCLFLLNKFDDCIRYYTMMITKYPRHPDLADALFYMGQSYEKNNRKDQAATFYKKILTMPGDEEDGTHIKARRALKALEA

SEQ ID NO: 91002 - protein, 346 aa, Unknown
  Obtained from environmental sample
  DOMAIN (1)...(293): recA bacterial DNA recombination protein
  misc_feature (1)..(346): Xaa is any amino acid
GDTDRFLLLDEALGIGGYPRGRIIEIFGPESSGKTTLALHAVAEAQKLGGIAAFVDAEHALDPIYAKNLGVNIDNLWVSQPDSGEQALEIAESLVRSGAVDVIVVDSVAALTPQAEIDGDMGDAQMGLQARLMSQAMRKLTAIIGKSRTIIIFINQIRMKIGVMFGNPETTTGGNALKFYSSLRLEVRKTETIEAGKDTDAIGNRVKVKVVKNKVAPPFRRTELELIFGKGISYYGSLLDAAVKYNFIEKKGAWYSYGEEKVGQGRDNARDYLEQHPDFAVELEVKLRKQIFPGREFQMAKQPSAAKPAAKPEAKTASAAAQPQQGPGRPRKLASPGGSLSDEALF

SEQ ID NO: 91003 - protein, 73 aa, Unknown
  Obtained from environmental sample
  misc_feature (1)..(73): Xaa is any amino acid
MESTAAEKGRSFKLDEFEGPLDVLLFLIRKNEKNIFDTPIAEITGQFLDYLRNAPAMDLEEASEFHATAAWLL

SEQ ID NO: 91004 - protein, 165 aa, Unknown
  Obtained from environmental sample
  DOMAIN (33)...(163): ScpA/B protein
  misc_feature (1)..(165): Xaa is any amino acid
METSPGENPATFSGFRSFKLNDFEGPLDLLSFLIKKNEINIFDIPIAEITEQYLDYLTDLSEYDLDEISEFQTMAATLLLTKSMMLLPIEISSDDEDEDPRQELVERLIEYQKYKKLSGLMEEKVRDTEWVMERKRLERPLPFNDEAMWEKVDVWDLLKIFAELP

SEQ ID NO: 91005 - protein, 345 aa, Unknown
  Obtained from environmental sample
  misc_feature (1)..(345): Xaa is any amino acid
EPDADEKLSYFTTGSSLYNLTTFIKSPELDDTSFTKNPRDSTQLRFVKNDIFALVNKMKESSFPNNGYRDLIDLDSWAKYVLIQLVLDNFDFNSKAQDGYLPGSNYAYKIESCDRIKAGPLWDFDLAAGLERSAPIGGGGWGWGGGAQSSFPAHYKTYQDSIVPTHPFYKRLWEDPVFKAKYKRIWIENKSHFQAMSSFIDSIKTVAEGSVNNNTWNSGTLNAQTFNTEIQNLKGWLTNRINWVDQQIGSDLNGVDGQLGIDGSKDIPESLPDVCQGTTPIIVQQPKTNNLNSNTRIEVYNLQGKLIYTSNTSRELGSIPIQTKGIYIMRTTSGSEKKTQRLVIK

SEQ ID NO: 91006 - protein, 501 aa, Unknown
  Obtained from environmental sample
  DOMAIN (77)...(500): UvrD/REP helicase
  misc_feature (1)..(501): Xaa is any amino acid
ICRMRRGEVAISPGYDGEYGVIRTFAPGETKESGAGLFEDNIVNDTNIKKEPRQTKQKTTALVNDKKPLPQTRAFSLDADQQATVSSDLRKGIIIAGPGTGKTAVLAAKIARVISEGSNPATVLALSFTVKAAAELRDRVLRLTQKQKVEKPETEKPVIGTFHSLCASILREQYAAALFPSDFKILSETERDDLLAKTCAAANNKALSPRRLGKYIEERKRYLLLPGEKPKDLSRILPASLVSLIPEDDSGDNSVNEHAYAEYRKQLHFLGAVDYDGLIAGTVRLLAMREDILKYYCQKFNFIFVDEYQDINFAQYALIRLLVHNREAAPSLWVIGDPNQAIYGFRGSDKAFIDRFLQDYPDAGRFELRKSFRCAEPIIKAAGQLASAGCLAQTELKGADVNSSAPVSLFRRTYPTDKSEAEGIARIIASLVGGTSFFALDSKTTKGIDSNNADFSPSDCAVLVRASALTEPIAKALNDHGIPFEIAGAPTWWEEEPVKTL

SEQ ID NO: 91007 - protein, 280 aa, Unknown
  Obtained from environmental sample
  misc_feature (1)..(280): Xaa is any amino acid
MTNYYEKEFETLPREILERLQLERLQTLLGYVYEKCDFYHKKLDEAGIKPTDIKNLSDLKKLPFTTKQDLRDNYPYGMFSAPMNDIVRVHASSGTTGKLTVAGYTQNDIDIWSAVMARAFMAGGCSHSSIINVAYGYGLFTGGLGAHYGSELLGALTIPASSGNTKRQLQMFKDFKVSTLCCTPSYALYLADEMEKEGYKISDFNLKQGFFGAEPWSEEMRTQIQERLGIKAYNIYGLSEIIGPGVSIECEYQCGAHIWEDHFLPEIINPETLEPLKTAS

SEQ ID NO: 91008 - protein, 319 aa, Unknown
  Obtained from environmental sample
  misc_feature (1)..(319): Xaa is any amino acid
NGPFEFFPHYANALISLPAAALIFCACTQVPEYCGNGSSAFDTKNQFCFDNTAYLKCGGKTYDPINYQCNDKGQIVSKTPVTPPVTTPATYAVTVSSAGTGAAGDGSYAAGVTVTIKAGTAPGQKFKNWTTTSSGVTLANADSASTTFKMPANAVTVTAVFEQVLYAVAVLGGTGAVGSGDYAMGATVSISAGTPPTGQWFKNWMTASVGVSFANAAGGTTTFTMPANEVRVMANFEASPPNVSYGTFTDSRDNQEYKTVVIGGKTWMAKNLNYQTKTSEGNSWCYGDNNTFCETYGRLYDWGTATTVCPSGWHLPSRY

SEQ ID NO: 91009 - protein, 344 aa, Unknown
  Obtained from environmental sample
  misc_feature (1)..(344): Xaa is any amino acid
NDTGISTYGTDAFGFSALPGGYRYTNGNFYRAGTYAYWWTANSFNSNTAYRRVIYQLFVRVDEEVVDIDKRYGQSVRCVQNYSASNAYWVTLSSAGTGNSGGGSYEKGETVTISAGTPPGGQQFWNWTTTSTAVTFVNANSATTTFTMPANAVRVTANFVSSSVQLYPITDVRDNKKYNTVKIGSQTWMAENLNYATSSGSWCYGDSADNCAKYGRLYYWDVAKTICPSGWTLPDTADWRKLMNVAGDSSVAGRKLKATGGWGSSSSYNGTDDYGFSALPGGDRHADGSFNHRTSSDIQGLWWSITEFNDKNAFSYNMSYSNSIVKGGYFDKVAGYSVRCLKGE

SEQ ID NO: 91010 - protein, 346 aa, Unknown
  Obtained from environmental sample
  DOMAIN (90)...(245): Peptidase family S49
  misc_feature (1)..(346): Xaa is any amino acid
MKLNAKLLVFGACFLMARPLFAQNIFLELNLNSQRGQGFTRSMRSKSSLELFRVIEQAGDDRKIGGIILNISACQEGKETLWELRNALEKFKAKGKKVCSFISGADLDLYCLATIGDKIVMDDQGVLMLTGYAWGRGYVKHSLEKLGIGARELRYLKFKSAAETYTRDSMSEADRTQYGEILDDMMQLAHDTVYAARSWNTGEFNRIINHEFMFSAKNALARGLVDRSGRKDAVLEAVREISDGNAAGLFLLYGDAESSLTGSKFPYKPAKQGGLFSKPPVIAVINANGVTDMERGVAAWTLAATIREVSERRRVKAIVLRINSPGGSAEAADYVAEAIKAAKERV

SEQ ID NO: 91011 - protein, 690 aa, Unknown
  Obtained from environmental sample
  DOMAIN (478)...(622): GAF domain
  misc_feature (1)..(690): Xaa is any amino acid
MMSLLRITKAVFKKYAQVFAVFLTFALMVLFSYSFTSKKERVNLQDKVKDAISKTEANIKAELKEPETLLAGVSETLRAMLFDNRDADTVQEFIDHIDNYVQSESDKRMLGVIGFYAVFDVFDGKFMSGSKTWQKPENFDPLSLPWYTAAVKADGDIAVTQPEVDKSSGKVSLSFSRRIFDDERQPLGIIALDIYLDKIKQEAINTRFTKDGYGFLLDDETEVIVHPEPWMLGLLLNEVKSNIAVYSDELQRTGSVSEAVTADYRGIQSIVFMQRLYNGWYMGVVTPRANYYQSTKHLAVILSAFGVVFAVLLGWMLLTISAGKAASDERIQLMSDSNPIGMSFWDGNLHIIDCNNTTLEMFGLSSKNEYFQMFDELSPGRQPDGSISNIKCYELLREAMETGFLRFEWVHQKPDGEPIPCEMTLIRTKYKKDFTIMAYVRDLREQKRIMKMMEWRTHLLDMVNSAATILLSSNNADSFESSMMRSFELVGHCLDVDRVQIWRNEMFENEMHYVLRYEWLSEYGKNCKKVPMGLHFPYSMKKEWEDLFLYGDHINMPLKDMSPEDQAFLGYYEMKSIVMIPMFLENEFWGFFSIDDCRNERVFSSEEISILSSAGLMMSSAVNRNIQMNKMREADERMHIMIDAAPLCAIFWDKDLNPIDCNQETIKMFELSSKQEFINKFGLLSPEYQL

SEQ ID NO: 91012 - protein, 440 aa, Unknown
  Obtained from environmental sample
  misc_feature (1)..(440): Xaa is any amino acid
NRLLFLFSLSFVLAVSSCSRLGYGVLLWSIDEPPVDSGSVLPVYIKSNIEKIWVVGIPEKAGTYKGNKKEIPLTQLEFIGSKRKAEKWAESFSPYATLYAENLQDGLPIRGTADNNSKRVYRLRLGEVVKVLGVAKGIPPISTTGDPLPGEWYKVLTNDGAIGYCFSFRLKLFTQNEGSVQTISSTPKSNPDPDLDLILSKTWSPEIYSQMINSGRINIQELEKKYRFDLGQDTGVARIILPDLERQFTYQRIISEGERTWNFEGTNLLMELKTNTTLSVQCTENSGVRRTLLFSALPTKVDDLIIQENARRETQFMTIYNQGPVFSSNNYGTITLLQTGDFTWTGYDLLVPQIIPQETKGGGRISMDLYISPSYEERYNGAFTLTFTDTRQNNTIYFLYALDNQGLRLEVVPDYGIENITVMRRSPSPVVLYFFTDTPH

SEQ ID NO: 91013 - protein, 90 aa, Unknown
  Obtained from environmental sample
  DOMAIN (2)...(89): Chaperonin 10 Kd subunit
  misc_feature (1)..(90): Xaa is any amino acid
MKVIPLGDRVMVKLEKNEAKTAGGIIIPDTAQEKTQQGTVTAVGPGTEKEKITVKNGDKVMYDKYAGTQVKIDGEEHLILRMADIIAIVE

SEQ ID NO: 91014 - protein, 528 aa, Unknown
  Obtained from environmental sample
  DOMAIN (6)...(234): DEAD/DEAH box helicase
  misc_feature (1)..(528): Xaa is any amino acid
MALSVTRALNDRGILVAEAGTGTGKSLAYLVPAALHALKNNCRVIVSTHTRNLQDQLITKDLPGVAALCGGKLRYSKLKGRGNYLCRNRFYKMLKGEIGNFSQRERNAALPLIVWSQYTESGDVEEQTFFSPKWFFKVWNLISADSMECSGRRCPYFATCFLQKARQLAQSSHIVVINHALFYSDVCSEASFLGATGSIIFDEAHHLESSGHQHLRTELDTNRVTAFIDRLQNLLHVAPAFKEFVNVGEFEKEMKHHLKHIRKCSLDMLSEIDKWALFTVPGATAEYQIAVNDGSLSGLQESAVFDIALGGLQDTLHEFRQIISGVREREKIDELRDETQACAEQTSQMRADLQYLTAARTEEHVFWAEGNHEKKWTKLCGVPLDISELLAQIWERCGGGIVFTSATLATQGSMEYVSRAIGLDRFTDRTESIILPSPYGADQTLFCAFRECPEPDAAEFPRFAAEAIAAIHAKLGKNVLALFTSNAMLNNVYAQLKERPEVDRNNILAQGYAGSRNAMWISSRRRAP

SEQ ID NO: 91015 - protein, 536 aa, Unknown
  Obtained from environmental sample
  DOMAIN (162)...(318): Exonuclease
  misc_feature (1)..(536): Xaa is any amino acid
MPKFFDLLSDDAKKGLAAEAKKVAGGGKGARGADKKSAPSGGSSQHIDKKTSTGGRPHADKNVLAGEIQYGRRSVPAGGNPFGGDNKGVPVNSHSHDKQGVSLGSNRRVNRDAPVDGRPHINNKNLPSGDNHPAKKDVPPGNDRPHAKKNAPAPHTMDIPDFVALDVETTGLDFKHDRVIEVGAVRFVNGKPEAEFSTFVNAGVPIPDHITRLTHITNDDIRPAPPFSDIAIQLLEFIGTLPLCGHQTDFDLTFVNEELKRAGFPEAAPQIIDTVLLSRILLQHVGRYSLKHACDALSVTLDNAHRALHDARASGELAVRLIPMLCELPLAVRQALAAFAPGSMFKTLAIKSLFGARYGVNLAAGEQLPGDLQQVGAPEEIAPIDISEIKSLFSDEEKTGRVIAGFHARSAQQEMALRVTHALNNRGILVAEAGTGTGKSLAYLVPAAFHALNNNCRVIVSTHTRNLQDQLITKDLPNVAALCGGKLRYSKLKGRGNYLCRNRFYKMLKGEIGAFSQRERNAALPLIVWSQYTESG

SEQ ID NO: 91016 - protein, 248 aa, Unknown
  Obtained from environmental sample
  DOMAIN (31)...(158): Polysaccharide deacetylase
  misc_feature (1)..(248): Xaa is any amino acid
MKNKYTKLFTPLFALILFSSCMSINRNRAELNIPPSVVYLSFDDGPNAKDDTTALLLDVLNKYQIKGIFCLLGGNVEHNPKLVKRIYDEGHCIVNHGYSDKWASRMNKDEFKNNLLRGEAAISSALGRDMSPKLYRPQGGFYTAAQEKIIHDEGYTLVLNNVRVYDAVIDGTKQSKVVRDIVEKVEKQDGGIILLHDARDSFVQAEARLAKKPNGVFDRSWIPDTVERVITVLLDKGFILNNSDNYPY

SEQ ID NO: 91017 - protein, 65 aa, Unknown
  Obtained from environmental sample
  misc_feature (1)..(65): Xaa is any amino acid
VNRDAIFEKLKEIMISEFQIPADSISPEKRLHDDFQLDSLDMVDIILHLSDYIGKKIDPTRSRKP

SEQ ID NO: 91018 - protein, 246 aa, Unknown
  Obtained from environmental sample
  misc_feature (1)..(246): Xaa is any amino acid
VERDLAYDMDAEKASAGGVIAATISGASASAAGEQFEFTIKNPVSVARQMSAMLPLTDASVEARKLLIFSGSGPVNRNQNPRLGAELTNTSGIKLPAGPITVYDGGTYAGDALIEFWNESEKRLISYGEDLSVIGSATNSNSAAFSSVTISDGVMTITRSQEFLKTYTFKNNAAQEKILIIEHPKNQGFSLASPKADEETPALYRFTVTLTARGEFTVPVRESRPIMERVTLTQLRPGAFLSFVSS

SEQ ID NO: 91019 - protein, 244 aa, Unknown
  Obtained from environmental sample
  misc_feature (1)..(244): Xaa is any amino acid
MNTTPSTFNKNIAGYTTIGGRERKNSAVNADGDTVDTMVNGIHTGGIHTEMCAVILNRHGQNPHRSFFQELEKTGFDNVISIESSTPNYNIEELSRRFPFVRFIIPEKEINLGEQINLAASEIDSPLFFVLQSDMKIIAGGTARRMAERLSVIQKEADDKPITFKRLCTVPVLVNSNYESIPTIITPLTRNKKMSTGIMEPHNEGELSLYPFIGIGIYDRLKFINIGGFDPSIKNKHWQFMDFG

SEQ ID NO: 91020 - protein, 206 aa, Unknown
  Obtained from environmental sample
  DOMAIN (1)...(196): Cytidylyltransferase
  misc_feature (1)..(206): Xaa is any amino acid
MLPLDGMPLIFRVMEALNLVPADLRILACPQDSLSSFKPLAAKAGFEIFAGPKDDVLERYCQVIRLFKIKHVIRATGDNPFVFTDAAAAINAEAMALNTDYAGFSGLPPGAGVESVSACALLRAGSEASTPYDREHVCPYLYTHPELFRVHRPYAPLRWQGSDIRLTVDTREDFDRALVLYDALKNEPLRYYGFTIIKKYGEVFKK

SEQ ID NO: 91021 - protein, 448 aa, Unknown
  Obtained from environmental sample
  misc_feature (1)..(448): Xaa is any amino acid
MKEAVLIVPCCEKGRGGGHLTRCVKLTNELRSSGKEAYLYIPADINVIKFLQTAQFDKSFVISEYAVNKKNWELVIMDRYQTPQNELARWKKLAPVVGIDEGGPYRDYFDILVDILIPENFKKPSANITSCGLLDLPKKTKTARNEINKKVKILISFGQEDAAGLAIRTVKKLTKKYFSGTEITLIKGMLNRSKYKIPDSVKVLDSTPNFADQLYEYDLVITHYGITAYEALYAGTTVLLDHPTPYHRKIAKAAGFTDIKKIKPVLKSIAKQQKKKQQFTLVRVVRGKFQTYLTEPGSWSKNNETTLAKLISSFSPQINHSCPVCENEGNNRHGNMSIARFPDRTYRYCSKCGVMYMDTTCPPSVTYEREYFFDSYKKQYGKTYLEDFPNLIAMAKRRLKIISRIFSQKKEEPQTEDARDKVKTLLDIGCAYGPFLSAAKEKGYSPWD

SEQ ID NO: 91022 - protein, 468 aa, Unknown
  Obtained from environmental sample
  DOMAIN (242)...(311): HAMP domain
  misc_feature (1)..(468): Xaa is any amino acid
LNIILDTIKQTLIEKHIAIAKTIVEILDNTPGQMSSESLLRIAEPLDIIELSVANSNGIIIASSVPKYIGFDYKLYEATKVYMKLIDGSLTVLSEEPRASVLNDDVGDIILGDINHYTGVARKNGGFIQIGFNASVIGRLQEEINIYKTIKETKIGQNGFGMVLSNGFITAHPYKDTPVNNLSDVSGEDWYKTVSYGNGYAWLNIDGKQYYVGYKNENGNTVVALVPEQDYHRERNSLLLDSVMFLLITVVIITAVIYLVVGGLLRRVNHLVKGIEKIAEGNLEARIEGSYNDEFDIIKNAVNSMAADIKTYMEEKLKTERKLNESRISILLSQIQPHFLYNALAVISRLCDKDPAKAKKATINFSNYLRANMNLLESAEPIPFQNELNHTISFLNLENAMYGEALKVIYDIQAQYFRIPALTVQPIVENAIRHGIGKKEGGGTVTISTKETEEHYLVIITDDGAGFD

SEQ ID NO: 91023 - protein, 521 aa, Unknown
  Obtained from environmental sample
  DOMAIN (496)...(519): 4Fe-4S binding domain
  misc_feature (1)..(521): Xaa is any amino acid
SRQGSAAASFKGDGEKKDKIAVEDIQFYQKQVRVALRNCGFIDPANIDEYVAREGYSGLEKVLFEWSPEQIIEQMKTSGLRGRGGAGFPTWLKWDLARKAQGDAKYVICNADEGDPGAYMDRSIIEGDPHSVIEGMITAGKAIGANHGFVYIRAEYPLAIERLKIALAQAQEYGLLGKNILGSGFDFDIEIRLGAGAFVCGEETALIKSVEGNRGMPVPKPPFPANKGLWQKPTIINNVESLANVPVITAKGGAWLAKIGTEKSKGTKVFALTGKVKYSGLVEVPMGTTLRELVYDVGGGIKDDKKFKGVQSGGPSGGILTDKSLDVPIDFESLVANGSMMGSGGMIVMDEDDCVVDVSRFYMEFCVDESCGKCSPCRIGTTQILKILEKIAEGKGKDEDLLKLESIGLAMTKASLCMLGCTAANPTISTLKNFRDEYIEHIHDKKCRSGKCRKLVKYSIDTEKCIGCGACAKKCPANCIIAENASSYPDKKRPPFRINSAECIKCGECLVTCKFNAVIKA

SEQ ID NO: 91024 - protein, 389 aa, Unknown
  Obtained from environmental sample
  DOMAIN (182)...(205): 4Fe-4S binding domain
  misc_feature (1)..(389): Xaa is any amino acid
MINLTINGKALEVEPGTTILQAAQKVNIKIPTLCYNPDLTPWASCGICIVRLAGSPKMVRACCTACEPNMNIITHDPEIIAVRRTVLELILSNHPNDCLKCPRNQACELQELAAEFGIREAPFLKIKNELPVDDSNPAIVLCPEKCIRCGRCVKVCQDVQNVWALEFLGRGIEGKIASAADAPLGESPCIKCGQCAAHCPVGAIYERDETVKVWEALHDQEKHAVVQIAPAVRVALAEEFGLEPGTVFTKKIYAALRRLGFKTVFDTNFSADLTIMEEGSELVKRLTEKGSVIPLITSCCPAWVDYMEKYYNDMIPNFSTAKSPQQMMGAMIKAYWAEKAGVNADKIYSVSVMPCTAKKWETRRNDDMKSAGHGYDVDIVLTSRELARM

SEQ ID NO: 91025 - protein, 121 aa, Unknown
  Obtained from environmental sample
  misc_feature (1)..(121): Xaa is any amino acid
MSQEKPHYQGHRQRLRERLLRDSSSLADYEILELAIGLAQLRKDTKPLAKELLRRFGSVRGALDAREEELLRVPGFSSGALALWKLLRECMSRYAAAPLHKREAIENPRQIAEMARVRLAG

SEQ ID NO: 91026 - protein, 523 aa, Unknown
  Obtained from environmental sample
  DOMAIN (2)...(143): ATP-dependent protease La (LON) domain
  misc_feature (1)..(523): Xaa is any amino acid
DPSPDELYGVGSVVQLLRLLKTSDGRIKALVQGVSRAKICAFYENEHYLCARIEPLLEPSVPVPPVEQEALLRTAREQCEKILGLRGIPTAEIMGVLSNVDESGRMADLIAANLRLKITDAQEILECLNPIARLRLVIAHLSRESEVASMQARIQHSAREGMDKAQKDYYLREQLKAIRRELSDGQDGDDDMDELSQALDKACLPPDVRKEADKQLKRLSAMHNDSAEATVARTYLDWLAELPWKKTTRDRLNIKRAKEILDEDHFGLDKIKDRILEYLSVRKLNPDAKGSILCFVGPPGVGKTSLGRSIARTLGRNFQRLSLGGMRDEAEIRGHRRTYIGAMPGRIIQAVKQAGARNPVIVLDEIDKIGSDFRGDPSSALLEVLDPEQNNSFSDHYLNVPFDLSRVLFICTANHLETIPDPLRDRLEVIRLPGYTMQEKLVIARRYLFPKQRQENGLKESELDLPDAAIERIIREYTREAGLRNVEREIGAVCRKCARRKAEGKKPPFKVSGARLSKLLGAP

SEQ ID NO: 91027 - protein, 219 aa, Unknown
  Obtained from environmental sample
  misc_feature (1)..(219): Xaa is any amino acid
AREHGGVAGTRTLKEVYPGWESSFFVQAAKKIQDAEDAIYAHDYGSNGVGGYHDHIDIASFIDWQIAMEMSLNFEVISLNGEYMYYDPSVRKLKMGIVWDLDKSWSTQNVTSGFIHKMPFWYKELLGWELTASSASNALAGTARTDRKDPYYVSRLKTRWVQVKGQFHTELDPYIDAQNERFSRINSYSNPLATNGSRTGLKNTITTVINSLDTVFNSY

SEQ ID NO: 91028 - protein, 358 aa, Unknown
  Obtained from environmental sample
  DOMAIN (95)...(277): Anticodon-binding domain
  misc_feature (1)..(358): Xaa is any amino acid
MSSTEYLNYENGKFSKSRGVGVFGTDVKETGIPADVWRFYVFYNRPEKSDAMFTWSDFKEKVNGELIGNLGNLVNRTLSFVMRYYDGIIPEGKSEGAFWAEVVRLESSITEKLDRAELRDAFREIFELSSFANKYFQDNEPWRLRNDDPEKAKSVIRDLTYIVRDLSVLIEPYMPQAAEKIASFLGLNLRSNLSYKDIGKTDGIGNIKIKSEILFNKLEDELIETLRVRFSGSQKERQESDNVQATAAKPFSSVVDLRVAKIEKIEKHPKADKLYIEQLEVGEGVTGTREERTIVSGLVPFYKEEELLGKKIIVVYNLKPAKLRGIESRGMLLAAGDKDGIGPDGQPVERVEVLTPET

SEQ ID NO: 91029 - protein, 444 aa, Unknown
  Obtained from environmental sample
  DOMAIN (1)...(65): His Kinase A (phosphoacceptor) domain
  misc_feature (1)..(444): Xaa is any amino acid
KSDFLAKMSHEIRTPMNAITGMAELLLRGNLPEKAHSYAQDIKQAGNNLVSIINDILDLSKIEAGKLEIVPAKYMLSSLINDTANIIRTRLKEKPIRFFTNIDGNIPNSLIGDEVRMRQILLNLLSNAVKYTEKGHIGLSITVDKQDDKQVLLRIDVTDTGKGIKPEHLANLFDEFVRVDIKKNQGIEGTGLGLAITKRLCTAMGGSITMESEYGKGSTFTVYVPQEIDSEIPLAVVEDAENKRVLVYESRPGYAQSLCWSLENMKVPHTLVKDPETFREALFREEWSFVFSDYDLYEDIRLLTDRPNEDFPGGKKPPLALMVEWGTETFIPNVRFISLPVQSLSVANILNGQADAKGYFDKSRNTRGIRFTLPQVRLLVVDDLVTNLKVAEGLLALYNATVDTCLNGAEAVELVKRREYDIVFMDHMMPDMDGIEATVAIRAW

SEQ ID NO: 91030 - protein, 130 aa, Unknown
  Obtained from environmental sample
  misc_feature (1)..(130): Xaa is any amino acid
MADRKLAYIATISQIDKIPDKDRIVYASLKDLGWQVIVESTLNVGDKVVYVEIDSILPIKPEYEFLRKRCFSEKWNGFVIKGMKMAGLVSYGLVLPADHYAEMPDGYDMTEILEIRKKEDDVPDLPEHCR

SEQ ID NO: 91031 - protein, 224 aa, Unknown
  Obtained from environmental sample
  DOMAIN (43)...(224): ABC transporter
  misc_feature (1)..(224): Xaa is any amino acid
MDNTTLLSVQDVSCAYISRNFALFGKKQIKPVLDHINIELKTGEILGLTGKSGCGKTTLAKCILGIIDYEGKILIDGKEIKNKSMQVQMVFQDPSASLNPVKKIGWLLEEPLIIHRLGTAAERSRKVDEMLERVGLDPSYKTRRVHELSGGQKQRACIARALMLDSKILITDEAISSLDISVGIQILNLFRELRESLGLTILFISHNISAVEYLCDRMVVMADS

SEQ ID NO: 91032 - protein, 201 aa, Unknown
  Obtained from environmental sample
  misc_feature (1)..(201): Xaa is any amino acid
MGDFVTNRDGKFLSEIIKSILPNAQNASFLVGYFYFSGFAEIYQGLKDKNLRVLVGLEIEQDMVNRVREVEYHTAIKKTRGELKSSFYDSLVDLFNETDYFDSDEKKEAFTLFFNKIKDGSLEIRKTRESNHAKMYLFQNTPELDQGGTYPGTLITGSSNLSLSGLKGRLELNAILRTKSDYEESKLIFEELWGTAIILAD

SEQ ID NO: 91033 - protein, 467 aa, Unknown
  Obtained from environmental sample
  misc_feature (1)..(467): Xaa is any amino acid
LLRSFRNETPAKTDKQNLPFFDDCILAALLSFVSQNEAFFIKEGKIRQKVLNMAASLFPALRLEPVIGGLQVLGLFFANGDTLHPDFTRFAAFGKLDRLERIEYCAAGILCYCDSPAGELSPWLFRSKLRKYAAFIHNFYISLDPKQQYPLVTLRRLVFILNNEINCDMLIKAMEQTGLLISNSNKRWQKPPHFSEDSMTKKNSSGDAVVIAVDSPFTLLMYPEIAYNDAVELASISHVTGTGLNISFEIDKDAAVSAFNRGISAAAAIELLQRLTGNRIDENAAFTLLDWEKRHKEIALSKGLVLSLSPERRYLAETKPLSKYISAELAPGIYMLPENMEEKVYTALKKAGITIFAKPNGVGASNGAGQADDGNILSGPDSRIFFPRVTPHIEKTRQFKTEIKEEGVNNNTSSSVPASSVPATSVPAAATLIEGFHSIMNKMRLGAEQRDELTARINRRLVLCESQ

SEQ ID NO: 91034 - protein, 154 aa, Unknown
  Obtained from environmental sample
  misc_feature (1)..(154): Xaa is any amino acid
MQIFQKSNLNERRTSIKRKFIVFSSVLFLAIVLLGSGAFLLSMRQIVRNSTAVDLSQEVEIERIKLESSVNAEIAIALKMADSPLIQEYFINPGDPNIEKIAFREIAGYRRAFAANSVFWVNDQDKRFYSDDSFVYVVDTSDPHNYWYLMTLNE

SEQ ID NO: 91035 - protein, 345 aa, Unknown
  Obtained from environmental sample
  misc_feature (1)..(345): Xaa is any amino acid
LKRTFALFTALTVLGMIGISCSKNTLHIYNWSYYTPPSVIEKFEKEFGVRVIIDEYASNEEMYTKLKTGGSGYDIVFPSQDYVSIMIHQGMFEKIDRSLIPNLSNIDPAVLRKTDYDPSMDYSVPYYWGAAGVLVNTAKVPNFEKSWSIFARSDLRNRMTMLDDMREVMGDALVYLGYSVNSKNPAEIEAAKNLVNSQWKPNLTKFDAEAFGKGYANGEFWVVQGYPEGVYEEIADNPQLIKDTFFFIPKEGGPAYLDSMCILKGSKNIDLAYKFINFIHRPEIYAEFVDSFKFPATANIPARQFVKEDSMYSAEDLVNTELKDDLGEALDLYNDAWFNSIRVGE

SEQ ID NO: 91036 - protein, 377 aa, Unknown
  Obtained from environmental sample
  DOMAIN (144)...(224): DnaJ central domain (4 repeats)
  misc_feature (1)..(377): Xaa is any amino acid
VAKRDYYEVLGVQKNSSTDDIKKAYRKLALQYHPDKNPGDKAAEEKFKEATEAYEVLGDDKKRQAYDQFGFAGVEGMGGSTPHDFSQTFHGFEDIFENLGGFSNIFDTMFGGGTRRSSGGHGGARHGANLRYDIEISFKDAVFGTKVEIQYNRNDSCPVCKGSGAASGTSRKVCPTCKGAGQIRQSAGFFQMATPCPSCGGQGEIIEKPCQECGGAGTQKKRQKIMVTIPPGVENGKRVLIPRQGDAGVAGGSTGDLYVFIRVKPHEFFEREGEDLYCAIPISITQAALGAEIQVATLEGKSIKVKVPPGIQNGKLLRIRDEGVPVSGRRGNLYIKMMVQVPAKLSKRGRELMEELSRVEGENSNPKPIPLSDLSDH

SEQ ID NO: 91037 - protein, 350 aa, Unknown
  Obtained from environmental sample
  DOMAIN (1)...(101): UDP-glucose/GDP-mannose dehydrogenase family, NAD binding domain
  misc_feature (1)..(350): Xaa is any amino acid
GADLVHVEEAARKIGSLIEKYTVIVNKSTVPVGTGRKVIKWVGDEIAKRGLSAEFDVVSNPEFLREGDAVYDFTHPDRIVIGSESERACNIMKDVYRSLYLNETPFIETNLESAEMIKYASNAFLAVKITFINEIANLCEKTGADVQDVARAMGKDGRIGSKFLHPGPGYGGSCFPKDTSALIKIGRDNKEILHIVETTIETNEKQKLRAAQKIESVLGTLKNKTLCLLGLSFKPNTDDIRKSPAITICEYLVSKGAFLRLYDPAAMKEAKKKFKKTEKSMYFASDEYDAASGADALVIITEWNQFRNLDLFKLKKLLSSPFFFDLRNIYKKQEAQSAGLTYFGIGNGKE

SEQ ID NO: 91038 - protein, 440 aa, Unknown
  Obtained from environmental sample
  DOMAIN (321)...(385): DHHA1 domain
  misc_feature (1)..(440): Xaa is any amino acid
VSALRFAQNSGLYGQPMCLLNTRPLNEAWIVEAVKMRNLVVIATLSETIIPGMLHIGDTRLPAFLEGQQILVWDAPLQKRVTVKLFGNGVEIGMLDVAPEIGREIPSVAGKSLIRIKELSAVAKYSDKEIGELDVFASLFRSYARKKENQESAEAIYETQLAALGTIGDIMPLLDENRIIVRSGVRSLMPSAGGRTSGTGPKPGISELLDKLELSGSHFDVKDIAWKLCPAINAGRRMGSPEKAAALFFEKNASLRARLADELVAMNRQRKQLEEEIWAKLEPMAYKSLSEFNEKIALVYGEEINKGVTGLIAQRAVRRFKVPSVAVCFGEDVYTGSIRSARAFNIGSLLEQCGDLFIDAGGHEFAGGFSLKPENWDSFYERLKTAALSMELAEEAEEGIFIDAELPPEYLGPDILKLVDRFAPYGNDDEPLVFLAKKLF

SEQ ID NO: 91039 - protein, 249 aa, Unknown
  Obtained from environmental sample
  DOMAIN (4)...(219): CobQ/CobB/MinD/ParA nucleotide binding domain
  misc_feature (1)..(249): Xaa is any amino acid
LTYSIALAGKGGTGKTTVCGLILDHLVKAGKGPILAVDADANSNLNEVLGVAKPVSLGEIREDVAHSETPGMSKQEYMDFRFDDALTEKENYDLLVMGRTQGVGCYCFVNDVLKEQIRKYYKNYRYLIVDNEAGLEHVSRGILPPVELILLVSDCSRRGIQAAGRIAAMIIELDIKAQKVGLIVNRAPDGQLAEGIKEEIALQKLNLIGVLPNDPLVFEYDTEGTPLVNLPLESPVRQALEKIIQSLEL

SEQ ID NO: 91040 - protein, 69 aa, Unknown
  Obtained from environmental sample
  misc_feature (1)..(69): Xaa is any amino acid
MSALTDLIYKGANAVAGLTEAAVKKAIEQYGADKKISFPDTAYFFPTILSATGVKVDKLGVLNACVGVM

SEQ ID NO: 91041 - protein, 455 aa, Unknown
  Obtained from environmental sample
  misc_feature (1)..(455): Xaa is any amino acid
MTLTLTDPANSANNINVTGYKDSIRGRGNSTWAGDKKPYRIHFDEAKSMFGSKHKHKSWALLANWYDQTFALNAVGFELGKRMKIPGTPNQWLVDFYLNNEYKGIYQITDIAHVNKGRLNIDEKEGWLVEFDYHCPSKPDEVDFATDYPNSPSGSKLHTFIKSPEDLPKLSDYDFVKKDVNGLMNAMFNKSGFPENGYRDLIDLESVAKYLMLEQFLDNYDFNNKSQNVGFPASNFFHKDVDKKITAGPIWDLDLTGGIDNSSFPTHYTTYRTPLMPRHAFYKKFFDDPVFKAKFKKSWIKYKPDIQAMPAFIDSIANVVQGSVVKNFELQLGSNKTCNDNNTNTCKRGAGGFSGMAPIVLGNLQAYNNEITKLKTWWDNRITFFEQELNSMNIDTTKDIPDYKSPTPTAPSVPQPSKYKAGVTVIKNGVTVNAVTNADVAIFSLNGNVLRKQTF

SEQ ID NO: 91042 - protein, 322 aa, Unknown
  Obtained from environmental sample
  DOMAIN (23)...(321): Omptin family
  misc_feature (1)..(322): Xaa is any amino acid
MSNIGKITAFVIFIFVLLHPVFAEEKLSDFEFFFTPSFGMLYGQAKEIVYKDSPRNDMIESELQWNMEMLLYAGLAADFAPVNYFARHGFVGNISFKMGIPQRAGIMEDRDWLYENSGALTNYSRHDSFSERVILADLSLGYSFPLLNLIALGINLDFSYKYFYWIARDGYYQYLDSDSSGNILPGQTWTEQIPKVPLNGKVLEYTQNWLIFSPGLFFKVRLGSYFSLNGNFNYSPFIYCADRDDHLLINKTYLDYLYYGQYIKGSGGITFLPMNNFDLTLFLSYSSITDLRGDTYINSVKYPGIAGVGYSAFEVGLAARMR

SEQ ID NO: 91043 - protein, 100 aa, Unknown
  Obtained from environmental sample
  misc_feature (1)..(100): Xaa is any amino acid
MFLLIDNYDSFTYNLVQAFMQLGRQPLVVKNDDPDLPDLAKKPELAMVCISPGPGHPAAAAGRCLDFLRALPAHVPVLGVCLGHQMLGHLAGARVEVGPE

SEQ ID NO: 91044 - protein, 477 aa, Unknown
  Obtained from environmental sample
  DOMAIN (133)...(292): short chain dehydrogenase
  misc_feature (1)..(477): Xaa is any amino acid
GFAGRTLANEITTKAIFGEVVAFLDDDPEKIGKRIDGIPVLGPIRDVALLLKTNPADEAIIAIPSASKEYLKELYSILKKANFQKIRILPGISQIVEGDAHFIQTRSIHLQDLLGRNPVTIKLKQSLSYVRGKRVLVTGAGGSIGSELCRQLLSGGVSRLYLLGHGENSIYLIDKELRLLQDEGVGEKAAIVPVIGDLKDSDFVDYILSHLKADAIFHTAAYKHVPMMEENPVAAIENNVLGTENLINAAIKYGVKRFVHISTDKAVDPVSVYGASKLICEQLVMEAAAVSSNFMVVRFGNVLGSRGSIVPLFQKQIEKGGPVTITHPDMHRWFMTIPEACSLVLKAGGVGENGKLYLLDMGEPVRIRDLAEQMIRFYGFEPETDIKIEYTGLRPGERLDERLWSDNEIPQITEYNRILRVDRKTSGGMDLALLMEELKPICRFDPNQPQKYRDSGLLRLVLERAIPGIKKNEQLAA

SEQ ID NO: 91045 - protein, 203 aa, Unknown
  Obtained from environmental sample
  DOMAIN (3)...(201): Mechanosensitive ion channel
  misc_feature (1)..(203): Xaa is any amino acid
SCTQGDWIEISKHGADGEIIDISLTTIRVQNWDKTIVSIPAYEFVSSSFKNWRGMSESGGRRIKRSMRFKISTIHILTDEEIERLRKIKLLAPYMEKKQAEMSKFNAEEFSDSDMTVLANGERLTNIGLFRAYCNVYLHKHPGINQSMTIIVRHLEPTETGLPLELYMFTSDTRWEEYENVQADIFDHLLSLVPVFGLEIYQR

SEQ ID NO: 91046 - protein, 278 aa, Unknown
  Obtained from environmental sample
  DOMAIN (1)...(278): Histidinol dehydrogenase
  misc_feature (1)..(278): Xaa is any amino acid
DLRIAKAEIKKAASKIDSDLKNALKQAIENVKAFHQKQTEKSWTFKGKDGEVLGQKIRPLKRVGLYVPSGAGVYPSTLIMNAVPALVAGVKELVVVSPIKNGLHSSVAYVLLELGIKEVYHIGGAQAIGLLAYGAKGIAPVDKIVGPGNVFAAFAKKEVFGTVDIDMIAGPSEIAVLADSTANPEWVAADMLSQAEHGSGFEASICATDSLAFAKKLAICIENQVKASPKREILEKSLSAYGRIFLAKNMKEAVDIVNRIAPEHLEIVAKNQDDLEKM

SEQ ID NO: 91047 - protein, 315 aa, Unknown
  Obtained from environmental sample
  misc_feature (1)..(315): Xaa is any amino acid
MYPDTPGIRALFFLVVVGTLTLCGGLTAYGTPPQTEARIHVEYFRQDHTTPALIRLELPAGSHIYAHEPGAAVKPAALVLRDEQGRQLPVLYPAGKEIHSPGVNGPVRAYVSGDALFVPLDAPAGSIFTGELSFALCTAENCIFSATDIRLRIPEGTLPELSAGPQAQAYAAARPGRIASDAGPLPPVPESLPILSLPGQTAPGVSLRAPPPPPDVWQFQPQVFQASLEVSGLASALLLGLLAGLLLNAMPCVLPVLALKAGALLQAGGADQAGRMRRMREHMLLFAAGILSWFWLLAPLLGGSGLIWGQLFNTA

SEQ ID NO: 91048 - protein, 193 aa, Unknown
  Obtained from environmental sample
  misc_feature (1)..(193): Xaa is any amino acid
LLPANSFPRSVKITARGEAEGIQPILAEDIEAYIDLGRYVNEGVYRVPIQIRKKGTALGVEPLEVSVVPVDIHLLLEQKITRNVSVFPVLRGSVAEGYELTSQSLTPASIIVEGPRSIIDNHIEFNTEAIELDRRNEDFSVMVNIKNDNPLLFIHGSNFLEFHGSISRIARGVHENITHQAIIEEEHLPSEEE

SEQ ID NO: 91049 - protein, 238 aa, Unknown
  Obtained from environmental sample
  DOMAIN (137)...(238): tRNA pseudouridine synthase
  misc_feature (1)..(238): Xaa is any amino acid
TIAYDGTDFCGWQRQENERTVQGVIEDALEKLHSHPVSLTGSGRTDSGVHAAGQVANFYTDIDSIPPDRFAPALNSSLPHEVRVLESGETDKEFHARFSAKARTYRYQFICRPLLPHESRYNLQLRRFPRVEILNEYGRLLLGETDCSIFASAGDTSASKNRYVYRAYFYMAGNTLIFEICANAFLRSMVRSVAGTFLHYEEADTPPEKLREIIASGERALAGPTLPPQGLFLWQVEY

SEQ ID NO: 91050 - protein, 289 aa, Unknown
  Obtained from environmental sample
  misc_feature (1)..(289): Xaa is any amino acid
MHTLKKMASNGKTVILFTHSTFNLKLCDKIVFVGAGGNLCFYGNYLDALRFFGTDDPIDIYQMMDNDPAIWKSKYQALDKGSKNQYQYSEASDDAASESDEVTKFSNRKWLKQVFILSKRYMHVLLNDRNRLLLLLVQAPILAMLITITARTNNYPKEPTLQISMILYLILSCSGFWMGISNSIQEICKERNILKREYMAGLRLNAYVLSKIIVIAIIAAAQSLMIASIFAWGIQIKGGGLFFVPFFEIVVTTFLTTFAASTMGIFVSSLFSESAKAMAVAPLLMIPQL

SEQ ID NO: 91051 - protein, 135 aa, Unknown
  Obtained from environmental sample
  misc_feature (1)..(135): Xaa is any amino acid
MIKRKSYSSNEFRLELPDLLEMQKVSYERFLQAGIPAKDRRNEGLERVFRDAFPTSDAKGLLVLRYSHYTLSMPRYSVRECRERGVTYSRPLIVHLELQTFKEDGEEKKLQDQVANDVFFCDLPIMTENGTFIIN

SEQ ID NO: 91052 - protein, 321 aa, Unknown
  Obtained from environmental sample
  misc_feature (1)..(321): Xaa is any amino acid
TMNPSVKRREDEKEAAHPGKTGEKPPVNNTAGGLIKVSPTPSKPESKTRRVAKFLILIGSERASKILGELDSKQVEDISKEIASIKGVDKEEAESIITEFKSLLSGSYKYLGPSFGGVDTARHMLHAALGEEKGEALLQKTLLGLPQNIFGFLEEFTPEQIVFLLKDESPVTSALVLARLSPEISAKTLAKFPPALKPEILMKIARQGEVMPEVLEQVAGAMRERARHLGSSGKDDIEIDGMQALTAILKQGDYTFGDQIIKELETDNPDISKKLKDRLYTLDDVLEAFDKPLAEKLGTMTEQDIAILLKGRSPEFCEKIL

SEQ ID NO: 91053 - protein, 70 aa, Unknown
  Obtained from environmental sample
  DOMAIN (2)...(56): Nitrogen regulatory protein P-II
  misc_feature (1)..(70): Xaa is any amino acid
YRGNSAIAKRFFTLIIDDKDVDKAVKVIIGANQTGNPGDGRIFVLPILETYSVRTGEGGLHISPEEGDEE

SEQ ID NO: 91054 - protein, 281 aa, Unknown
  Obtained from environmental sample
  DOMAIN (15)...(281): Nitrogenase component 1 type Oxidoreductase
  misc_feature (1)..(281): Xaa is any amino acid
MLDLTPKEVKERSALRINPCKTCQPVGAMYAALGVAKCMPHSHGSQGCCSYHRMVLSRHFKEPAVASSSSFTEGASVFGGKTNITTSVKNIFEMYNPDIIAVHTTCLSETIGDDLTSFIIDLQIPEGKKVVHCNTPSYVGSHINGFFNMMMGFMNYLTGKTGTPNGKTAIFPGWVNPGDIRELKRFAKAMKVNTIFFPDQTGVLDAPMNGKYEMYPEGGTSIEEIKSLGDSNTLIALGEITCIEPAELLEKKWKVPFTLLPLPVGVAYTDQYVMALQEQSK

SEQ ID NO: 91055 - protein, 450 aa, Unknown
  Obtained from environmental sample
  misc_feature (1)..(450): Xaa is any amino acid
GNYNRYAAATMFSLFFGGKIFAPGLSIDGENVQDWLQGRYIAAFRHCYRRLKTCAAIAGWGVMNEPHNGFIGHGNLSRAENPVLPAGPRPSPWDTIRAASGYATVAPIYNELNRKTSKSELLNPGAHSLFREGFSCPWKQAGVWADEGGKPILLSKDHFAWFEGRQTNFMQDFHKPFTLRFIETMKEADENTFFFIEGMPPSANTAIHPVWNKDDPPNTINAFHWYDGFALFTKTFQPWFTVDPDTSKFIVGRKKVGAFFAQCLARATAWTKEKMGNMPCLLGEFGLAFDLNKRRGFASGDYSVHEQALSMYYDAVDANLLHSTIWNYTADNTNEYGDGWNDEDLSIFSEGKERAVAGWKRPYPMATPGEPLSINWDRKRRLFRYRFRADGAIAAPGMIYLPAEYFGPSPRVETKSGNGSLRWEYNHEEQQLLIYTDGYSGEADINARPG

SEQ ID NO: 91056 - protein, 740 aa, Unknown
  Obtained from environmental sample
  DOMAIN (101)...(235): MutS domain II
  misc_feature (1)..(740): Xaa is any amino acid
GSHILFFRVGDFYEMFAQDAVEVSALLNLTLTSRNGLPMCGVPYHAAKNYIARLLKLGKKVAICEQLTPPGKQKVIERDVVEIITPGTTVDEDFLDKGSSNYLCCLARCDTYLSFSYIDLSTGDFFSTSFSDNEEEILRQELERLSIREMLIQESLLEEEKKIAAAVYDRSGLVLNRWADWLFDKTQAKERLEKQFGLANLKGFGLNENSAEIISAGALLDYLDTTSKSALLHIRTLKIYKDNEYLGIDESSQRNLELLYNQRDGEPRFSLLEVMDETKSSMGRRLLKRRILHPLRNVEKINKRLDMVEDLYRDQGRLSKLRELLGKTSDLERLCSRLAMDKAHARDMLAIKNAIFCFFAVKEILNTEFDGRKICFECDEQESINNFDSLLQLQDLLEKGIKEEPSVFLNEGNLIKDSFNKELDDLRSMRDNSRQILEQYLEEEKQETGITSLKIRYNRLIGYFFEVKKNSLDKVPKHFIRRQGMADGERYTTDHLAKLESEINGADDKVVELEKKLFLEIREEAKKYLNLLSVCARRLAEVDAAQSLAKAASIRNWTRPALNESSNLEIHEGRHPVVEAHIGRGEYIPNDILLSTESSGISFAMITGPNMAGKSTYLRSAALITIMAQAGSFVPASQASIGICDRIYCRVGASDNLARGESTFLVEMNETAFILNTATEKSLVIMDEVGRGTGTNDGLSIAWAVSEELLNRIGCRTLFATHFHELSLLSHPHLANYSME

SEQ ID NO: 91057 - protein, 389 aa, Unknown
  Obtained from environmental sample
  DOMAIN (23)...(377): N-acylglucosamine 2-epimerase (GlcNAc 2-epimerase)
  misc_feature (1)..(389): Xaa is any amino acid
TAIHEIRNNILPFWQNLIDEKNGGFHGATDFYGNIYRNAAKGCILNSRILWAFSAAYRMFGDPAYKDCAQHAHNFLTANFLDKTRGGLYWLADHTGYALDTKKHFYNIAFGIYALSEHYAAVKNKTSLDLAMALFEMTEKYGLDPSAGGYIEACDCDWRNVEDFRLSEKDLNCPKSMNTNLHVLEAYTNLTRVSEDKHVRKALEKLLRIMLDKIVSRDWHFNLFFDMNWNSLTKDISYGHDIEGSWLLYEAALAVDDEKIISKIKQTALEIAEVIYTAAIDRKNGGLLSGCDEQGHNHAKKEWWPQAEAVVGFYNAYELSGDQKYFDAADNIWSYIQKHFVDHTHGEWHNELNLDNTPDTSMPKAGFWKCPYHNARACLEVARRAEGLN

SEQ ID NO: 91058 - protein, 540 aa, Unknown
  Obtained from environmental sample
  misc_feature (1)..(540): Xaa is any amino acid
TVITTNTGLAVSAINGVVINNVNAVITNVSGAASTAAAPSAVVYSVKGKIAVVNVDSIWANAQATALLTVEPGQGVTVLSGKVKSRTGFAINSAGSVEVDKRTVTETNFGTLGNKRGSIVVSTGASGVAFSAIYTNVANSNVKIGCAEVSATNASGGASAINAIEASVQTDSVTSKVTSASGTAIKVSGRPVTINAGEITSSAASGNFAAVWVDNGNVTIGNGDTEHSNGGGEGGLVFGTVARPMDTKITSNGAYAVYADGAGKYKVEVKDDATFSIRGTTASAGAIYALREVEVYFAGEIIVNDPTKEPFAIRSALGDITVTGNARIKSGTAKGAVKSVGGNIYVGNMPAADVFPDKYPRIEGVGGILIHAAGATTPVLQRAGIVKVGKILDDGEEIDAGYALIHNTVGTAIRGDDKVFVSGTSERSTEYTEPGAWDESFTTVTVRTDTDTAITTGTATAAGEVSVEAYARVWAAGNHNKSAPVAVVSRRVYQTGGLIEANTARSSMDNWEMYENAKATGILLRTGGGEGLLQIEGGRI

SEQ ID NO: 91059 - protein, 283 aa, Unknown
  Obtained from environmental sample
  DOMAIN (1)...(133): ABC transporter
  misc_feature (1)..(283): Xaa is any amino acid
GKLLEKAKDGDSSTGSLIEEHHNLQEQIESSGYYRREAAISSVLSGLGFSASDINRDTGEFSGGWQMRIALAKVLLEQPDILLLDEPTNYLDIEARTWLEKWLETFCGGYLLVSHDRYFLDVCVNEVFELFQGNLKRYAGNYTAYEKVRKTELASLVKRYEEQQEEIIKTEALIRRFRYKASKAAFAQELIKRLEKMERVEIPESLKKINISFPPTPHSGNIALTLEGIGKSYGDHRVLSGVDLCLETGERLVVARPNGAGKSTLLRIIAGEDKNFEGNVKYG

SEQ ID NO: 91060 - protein, 447 aa, Unknown
  Obtained from environmental sample
  misc_feature (1)..(447): Xaa is any amino acid
NKEKVVISTATITLQQQLYEKDIPLVASAMGDAKIKAVIMKGRGNYLCLRRLDEALLEPPLIIDEDDSEYDEIRRIHEWAQNTKTGTRSELSFQPAETVWGSVCSESDLCLGIHCPWRENCFVFALRKEASNAHIIVVNHHLLFADLAARFQGAGYENAVVLPPFNRLVIDEAHTIENAATSFFSSEFGRTGIFRQLGRLYHKKKKSKRGLLVRLCAMLPPRSKHLNSMVKQADKIRDCAQALDNSALELCSEAGVFRLSPDMHEAPLKENLLPCLKALRKDILALTSMIREITEELDDTQAADPSVWEIKAIVRRLEEIAEICDSFCKYQKLENEVLWMGKQFFSGANPWTIFTKTPLDLSPKLKDSVFAPNKTVVCVSATLAINGNFSYWASRCGILGMENKPVLSGCFPSPFPYSSAVLLAVPADAPLPDEEGWQDFMIKRQAA

SEQ ID NO: 91061 - protein, 501 aa, Unknown
  Obtained from environmental sample
  misc_feature (1)..(501): Xaa is any amino acid
MGTVDLPKSVKTVRPQARGADLPKTGENRQVSLDRIIREQAGIFSGQLGAKLPADALQRLDEKLYNYISQNYRVISGSFPLSLQSHNEIANAINGKVIKNTAAEITAMLENEGYQFNTGEIEKSHSSKQWGIDDLEAHTNNMLRQKGGIGSVVDSQKANLVAACVFKDNAKKPKTVTDLRLSVNIPEKELIDSETRFKAEAAYLIREVICKRLSESIDREINTEGNDSDDFLDRLLNQRLEIKPSDLEQYLQNIDGNDEIEAIRGNGFSVTANMIVSILNTVNLECGFLENLKEKREILIREYEDTDEAVLPDEHYQIRLRYFSKARLSEEREVYDKRLKILGGETQRLWDLLEVIYQDSKSVFKVNDYEDLARKNKGRISDLLKNRTAAYDPQKPAETPVDAARGEKEKIRVLLVKMEERIKNISDNMYPVERRISEERLLALKSEFSSLENDIDPNSLQPGILVDIELSSIKRKRTTLDSMAAALGRFLNSVATCFRDM

SEQ ID NO: 91062 - protein, 64 aa, Unknown
  Obtained from environmental sample
  DOMAIN (3)...(34): KOW motif
  misc_feature (1)..(64): Xaa is any amino acid
MGIRKGDQVVVIAGKDKGKKGKVLLVEEDRVTVGGVNVGIRHKKARSAQQKSERKREEHPIDIS

SEQ ID NO: 91063 - protein, 87 aa, Unknown
  Obtained from environmental sample
  DOMAIN (14)...(82): Ribosomal protein S17
  misc_feature (1)..(87): Xaa is any amino acid
MSDTRTTQRKELEGIVVSNKMEKTIVVAVTTQVAHPLYGKVVTRTKKYKVHDENNECRVGDKVLIIETRPLSRDKYFRLGRVIEKVK

SEQ ID NO: 91064 - protein, 531 aa, Unknown
  Obtained from environmental sample
  misc_feature (1)..(531): Xaa is any amino acid
EAASDDASDIENIDIDIDITPNANETTDANLALDDLPDLSDVGASTEDSSLATDDFADLSDTGAATEDVPTDDFALPEGDTTIEDASLTADDLPDLSETDTATEDTALATDDLPDLSEGDTVIEDPLVMDDLPDLAETDTITEDTALATDELPDLSEIDTGINTTLDADSFPDLSEGDTAIEDTALAADDLPGLPEGDTAIEEPLVMDDFPDLAETDTITEDTALATDDLPDLSEGDTAIDEPIVMDDLPDLSEGGEDTSLAIDDFADLSNDEITIDEGPKDDELQILREEGAPIPITETPENSSYLEEGGDIDLSDAVIDEPELSAEGINDELSEPSLDGDDFNLDSLDDLSIDSELDLDDDLSSAGDIESIEEETAQPEQEPPEAAELDAESLDEEVDNVISESNFEDELEEPVVFDDFQDFSADNFDSVLEEEPPAKAAPVKQPAAPKAPAAPPVQQQAVATPQPAPQPAVQPIIMQAPAQPQAQPGGGGNQFSIPSGLRSELRNILSYMDQLLESLPEEKIEEFAKS

SEQ ID NO: 91065 - protein, 293 aa, Unknown
  Obtained from environmental sample
  DOMAIN (1)...(148): Protein of unknown function DUF115
  misc_feature (1)..(293): Xaa is any amino acid
MEIPIIITGSGPSLEQALPIIQKVLNNCLIIAASSSVLALSSIGITADIIIATDGGNWALQHIYPFYRNYKNVNTDALAVNLCAALPSQCADTAQLIINDGSFWQSIVLHELNLPSVIIPQRGTVTATAIELAILLSSGNIYLAGLDFSVNDIRTHARPYGFENLFYGRANRFIPFYSQSHSRASLLHKGGSMNIYESWFKEQLTKWPKRIFSFGGNKIFENGEPAAGNNIKNTEKFFSVVSHEDSNNFCEKGVQALLNAIKHPQYSQNLKQELNSLLFPGENKVTQDEWKRQ

SEQ ID NO: 91066 - protein, 459 aa, Unknown
  Obtained from environmental sample
  DOMAIN (350)...(457): ABC transporter
  misc_feature (1)..(459): Xaa is any amino acid
MLSVALVDVLLPLILGYTIRHNIQPRSAQDVWKPLAAAFILMTAQGINVRFFIALGIKAEMGITIALRNAVFFHLQKLGISYYNKTPVGYMMARTHSDTGRIGDLVAWGLIDFSWSVFYCIGVVIAMFIVHWKMAILVSTTIIPLALLTWFFQKRILSVNRIMRKLNSKMTGAMNEGITGSRTVKVLVAEEQCLTEYSGITNEYRGHANRMARLKAVFFPTVFFIGSAATAMVLGYGGWEIAVMGADLAILAIFLQYAGGFFDPVQNIANILTEFVSAQANVERVCGLLEQSPSITEKPEVVEKYGDTFKAKKENWEPLTGDVEFKDVTFKYPDGTENVLEHFNLHVPRGTYAAIVGETGAGKSTLVNLVCRFFEPNEGEILVDGIDYRERSQLWLHSNLGYVLQTPHLFTGTIRDNIRYGRLDASDEEVEAAAKSVHADKVIAKLEKGFDTEVGEGGD

SEQ ID NO: 91067 - protein, 262 aa, Unknown
  Obtained from environmental sample
  misc_feature (1)..(262): Xaa is any amino acid
MIMFSMDIFMSLVSLVLIPFIVAFSILYFRKVSVEFNRADIAEGQVQAAAQENYTGVRVVRAFGRESYEMERFSVKTKKYQDIWVYIGKMLGLFWGAGDFLSGLQLVIIVGFGVWRSVQGQLSPGTFLAFYTYCNWMIWPVRQLGRMLADLSKTLVAAGRIREILAEEPETDPPDALTPDLKGEICFNNVTFNYGEKEPILKNISFTLKPGESMAILGATGSGKSTLVHLISRLYDLNENSSHNAGSITINGVDIHRVARPW

SEQ ID NO: 91068 - protein, 260 aa, Unknown
  Obtained from environmental sample
  DOMAIN (7)...(219): Amidohydrolase family
  misc_feature (1)..(260): Xaa is any amino acid
MEYAEWLGLPVAVHEEDKNLAGEGCMNEGATSAAIGCHGIPAAAEEVMVLRDIALAKYAKSHVHFQHVSTKGSIEAIRRAKSEGLAVTCEAAPHHFALTDKEMARFDSNYKMNPPLRSQADVEAILEALADGTIDAIATDHAPHTFDDKEVELANAPFGIIGLETALPLVIELLVNKNVIGLSRAIELLTIGPAKTFRLDKMGLGSLKVGSPADFTIFDPTAAIRVDRTFIKSKSFNTPFKDWELRGKVLATYVAGKKVF

SEQ ID NO: 91069 - protein, 232 aa, Unknown
  Obtained from environmental sample
  DOMAIN (1)...(229): Rhodopirellula transposase
  misc_feature (1)..(232): Xaa is any amino acid
SAKFLKRKCPVISVDTKKKELIGNFKQNGSVWRPKGEPELVKVHDFIDKELGKATPYGVYDLKQNVGWVNVGIDHDTAEFAVESIRRWWKHLGQELYKNAKHLYITADSGGSNGNRNRLWRYCLQEFSDESGLTIHVSHFPPGTSKWNKIEHRLFNHISMNWKGQPLISMEVIINLIGHTTSQTGLKVYAMEDRNKYPTKRKISDEEMKNLNISQYEVLGKWNYKILPRKFS

SEQ ID NO: 91070 - protein, 65 aa, Unknown
  Obtained from environmental sample
  DOMAIN (19)...(52): Tetratricopeptide repeat
  misc_feature (1)..(65): Xaa is any amino acid
VGRTIIDYGLAMKIYPNDACLYNNRGYAYELIGDKQRAYIDYQSAVQLDPNDTMYRDNLKRIMGL

SEQ ID NO: 91071 - protein, 300 aa, Unknown
  Obtained from environmental sample
  DOMAIN (128)...(248): HD domain
  misc_feature (1)..(300): Xaa is any amino acid
DVRTVVAAGTDARLAADQAGKELNANCRIIEREDFFKFTEKVCGYSIEKCIHEFGSSYADAEGLIPGLLVLKLFLERTGAANVAVPYVTIRDGYLVDLASGVDASLQDDFFSQIIASAVNLGRKFHFDEAHSRYVARCCMTLFDALAKEHGMNRRHRIMLEIAAILHDIGTYIKTSGHQKHGQYIVANSEIFGLHNDELNIIANVINYHRGDPPSQSDIEYVKLQREERVLVLKMASILRVADALDRGHSQQIKNITVERRRETMVLHVDRTYDLSLELMGIEEKGGMFQDVFGYKVIIG

SEQ ID NO: 91072 - protein, 796 aa, Unknown
  Obtained from environmental sample
  DOMAIN (267)...(678): Alpha amylase, catalytic domain
  misc_feature (1)..(796): Xaa is any amino acid
MKQTRELAAKFNAKQDPAHPERFIKAGHLYAMGLIDEILHFVVALYREEVQGDVFETALDRLDSNLGEKQTSGLLKTFSDQFPPRPVYKGEKKVDEYLKSKEEGESCRALSIEETMLLSLANLNPAFKPFKFLFDDKDLEKKTVYPDAIEELKAHLKEMPVFGPDGMNLWDFLRSPAVVCPDSLFGQLEYMRKHWGLLISKFMARLLMALDVINEEEKPSFFGPGPSEVLTFAGLDEYERFSPDQDWMPKTVLMAKSTLVWLFQLSQKYKRDITRLDQIPDEELDELSRRGFTGLWLIGLWERSQASKTIKQWTGNPEAAASAYSLHDYDIAGELGGWGALTNLRERCMHRGIRLGSDMVPNHTGIDSRWMIEHPDRFLQLPYPPFPTYNYNCGNLSGRDDITVQIEEHYFSRNDAAVVFKRIDNRTGDTRYIYHGNDGTSMPWNDTAQIDFLNPEAREAVIRTIIGVCQQFSIVRFDAAMTLAKRHIQRLWYPVPGSGGAIASRAEHSISTEEFNKRIPNEFWREVVDRCAAEAPHTLLLAEAFWMMEGYFVRTLGMHRVYNSAFMNMLKNEENAKYRATIKNTMEFDPEILKRFVNFMNNPDEETAVAQFGKGDKYFGICTLLVTMPGLPMFGHGQIEGFEEKYGMEYRRSYRDEQPDGYMVERHERDIFPLMKRRYLFSGSENFRLYDLYCDGSVNESVFAYSNRVKNGLGDERALVFYNNSYYETSGWIKTSDPAIPCHGGTKRDSLSEALLIHGESRYFTLLREQKSNLWYIRSSKAISENGFFVGLKGYE

SEQ ID NO: 91073 - protein, 593 aa, Unknown
  Obtained from environmental sample
  misc_feature (1)..(593): Xaa is any amino acid
MKRRAAFSGSANFRIYDLYCNGSVNENVFAYSNRAWINGHEEKALIFYNNSYYETSGWIKVSDPAVPCEGGTRRDNLSEALAIHGESQYFTLLREQKSNLWYIRSSKSICESGFFVGLKGYETQVYLDVHEVEDDAKGRWARLNNDLNGGGVSDPLAAIKDIFLGELYYRFMEILKPEIIVEMNDSLEKKTYADSFKKPVETFIKTAAHFIGGANGSYDEWTAKDKADGKIKFTAVKPTVIEEEFSSFINRLKKLKDALKASAVGKSKSPLFTRITECNTKGQLLYSVALSYGLLSLLRMIIGKEADGSHAASLAFDHWDLGRKMRDVYRNFGATDAQAWRITDIARAVLSRTGLNISSSKSAPFRKEGAFEAADFAALIFAENYQSEDFRRILGINIFNDVAWFNKEGFEDALFYTSLFFMVEGSVNILMEERINRIVKIYDVLKKAEEKSGYRFDNLLEYLVSISAKTKPVKTKSAGKPVPVAEKVKTPAKTKPLKAESDKIKPAAKTAGKKSEKPAEKPKAKSAAKAVKKTGAVVKAKPTKSAKPVKAKADKAKSAKPKPKVKAVKTKAKPEKAKSGKSKTTSKTKGKKK

SEQ ID NO: 91074 - protein, 86 aa, Unknown
  Obtained from environmental sample
  misc_feature (1)..(86): Xaa is any amino acid
TGISRHTLDNYLNVRENIPTADVAVKIAKVLGVTVEYLVTGEENQTEKFMQGAKTRALIQNFNLLSEKDQKMIIAITQLVKNQDRD

SEQ ID NO: 91075 - protein, 229 aa, Unknown
  Obtained from environmental sample
  DOMAIN (20)...(229): Putative modulator of DNA gyrase
  misc_feature (1)..(229): Xaa is any amino acid
MNMQEAVEYLNEIAKKSGAEQFDIFAGKSDSKSISVFNKALQNTEISNSCGIGIRIFKDQKPGYASTEKFSKESLEQTLADSLSNSKFTEILNVELPSIAIEKEALPTYNQELENVDITRLLNTCLSIEERILAEKEIKNVPDLGAEISSSTTIFANSNGVFFTDKRNAFGVGAGAVAERNGVVKMGWYSKGGRDFGTVSVEQIADKVIARAKELLSPRHIRSGEMPVV

SEQ ID NO: 91076 - protein, 157 aa, Unknown
  Obtained from environmental sample
  misc_feature (1)..(157): Xaa is any amino acid
EKDAYTWLLRWKWIKASSRDNARTPMQWDGGNNAGFTAAKPWLGINANYKYINYESQKNNPSSVLNFYKALIALRQKSDCLRNGEFVPIFADTHLMCYQRKLGDEAYNVALNFSSRKRRLPKKIVLHGTPVISNSGRAELGGCLLPWEGVLLKAATS

SEQ ID NO: 91077 - protein, 478 aa, Unknown
  Obtained from environmental sample
  DOMAIN (323)...(478): Beta-galactosidase trimerisation domain
  misc_feature (1)..(478): Xaa is any amino acid
KICLATGTAAHPAWMARKYPEVLRVNTDGSKRKFGDRQNSCPNSPIYRLYSTRLARKLAERYGKLDNLIAWHISNEYGGYCYCGNCEKAFRKWLERKYGTIAALNEAWNTAFWGHTYYEWDDIAVPGYLGGEWPVNRSSCQIQSIDFRRFNSDSLLECCLAEAAVLREITPNVLITTNMMGTFWDLDYFKWGKSMDIISWDNYPSPGTPYTRTAMSHALMRGCGDGKPFSLMEQTPSVTNWQPYNALKRPGIMRLWSYQALAHGSDTVMFFQMRRSRGCCEKFHGAVIDHYATENTRVFREVAFMGEELKKLGDVFLDSVLVSEAAVLYDWDNWWATQLSAGPTIDMNYPEEVYRYYDAVAKQNISVDIIGIDTPLEKYKVLFAPVLYMIKPGYAEKLKAFVSNGGVLVTTYFSGMTDERDLVTQNGYPGELRSLCGIWVEETDALTPGKTNGFVINKAPWDKPPLPEHGRRKCSAIL

SEQ ID NO: 91078 - protein, 216 aa, Unknown
  Obtained from environmental sample
  DOMAIN (3)...(149): Carbamoyl-phosphate synthase small chain, CPSase domain
  misc_feature (1)..(216): Xaa is any amino acid
MPKTAYLVLENGMTFEGKYFGAQGEITGEVVFATSMTGYLETLTDPSYYGQIVLQTFPLIGNYGVIPSDFESANIGAKAYIVKHPCQNPSNFRSEGNLDAFLKERDIIGLYGIDTRVLTRSIRENGVMNGKIIAAPPTEADIAEAKAYSIRDAVAAVSSRSVTKTENGRRRVALMDFGAKQGITEALTKRGCEVWSFPYNTDAQEILKMKPEGIML

SEQ ID NO: 91079 - protein, 465 aa, Unknown
  Obtained from environmental sample
  misc_feature (1)..(465): Xaa is any amino acid
DYLIGPFLREFLRIGDTFHLISFSGTPKLEISRRIEGIGDVETIIARLLLMYPLDPESNLSGALSFAESFASSLPSRSKKIVLISDGNAENTQNLLNDSSARLRGLGADLQYIKVPVTGENPGSGRVTATQPAQTPSTQPTQPTQTAQGTQPTQPTQTAQGTQPTQPTQTAQSTQPTQPTQTAQGTQSIQPAQTAQGQGTQPTQPTQTAQSTQPTQPTQTAQGSGTPAQIQPPAQVTGQTKAAQTSSGVNIPLPLIIGLALLLLLILILIIIFKSRKLDKSPNRVISKAASPASPKTKAETMPDRFTETRKTSQVLEYPPPRMKPLPKDKVYDENILPNDGNPVLLNLFVADQNTAIGKRNIHSVKPGYSYTIGGGKSDFLIFLVPVPPRIAEVRHDGRNCSFIPVKPQYFPDIGSQTVPNCIGKTFRVISDKKYELHIRLEKYEDPLHALNKMLRSIKVPGPVM

SEQ ID NO: 91080 - protein, 416 aa, Unknown
  Obtained from environmental sample
  misc_feature (1)..(416): Xaa is any amino acid
MFLKKKLINEDPYKQESKISDLEIPDTGPFNEAKRREQISIRLANYDSQMDFLVNFYQFGVDFLNVERIRRIVGLVRYIDWINLTPDSQSPNTKVVAEIVSNAKSGGDALTLSIIGESLTKLPKCTNTIMGILRDLSIYHKETYKLNVRKAITGMQAQEANAANIKKKMGSAMPGSVFYQEYVDELIKEDYSKDGPALREAVLKALMVTEEKTKATKPKIDYKAMVLSGIIAIGNAATVMNEIIQKIDENEEVLADQKKGFWEKLRQLIRAMMHAEPEEVFYDLMFVDQSTGVQKKETTNLHQFRGDLERKTRILAGMNANGAVMAKLKNMNEEQCTAYLERTIRDVQNYHRILAALDDYFKSNIPQSERSRIKGIKPELASVKNCIVRANQLRAEYTAAKEEEEQMKRLGLNPGA

SEQ ID NO: 91081 - protein, 275 aa, Unknown
  Obtained from environmental sample
  misc_feature (1)..(275): Xaa is any amino acid
VSLLQADSLPYPLWNAIEFVAETENFNKPSYVAKGVYGGFAAKYETMPFYEKIHKYVDDEKRDLFIYPIRISNTELVKFKDTLNSWKAKKDSYKFFTNNCVDGIYNLLKNTLDSVQEAPVLLTPQNLIRLLNESGKIEKPILLRFSGDKKEEGNFIAQKDMQIPHKYSRLDIGLLFFEKFYANLRFRLFLHDVSDYGGYYSNFINLEVLYLNLYFNNNSKVNLKELWPVRIRSETPSRSFISGWSWLLESGLEEFKITNVGLGKTYMIFNDYCSV

SEQ ID NO: 91082 - protein, 1094 aa, Unknown
  Obtained from environmental sample
  DOMAIN (14)...(39): The GLUG motif
  misc_feature (1)..(1094): Xaa is any amino acid
GTVINSRNSATVSGKSQFGGITGRNEGTIDNSYNTGAINGKRYIAGIAGVNTNLGKYIKNSYNTGNITATEATQSSMAGGIAGLNQSGATIDACYNTGNVTASTNAAGGITGSNSSTVQNCVSLGARVTGTGDFGRITGANSGTLGNNYARSDIKIGASGAEEAVSPAGANTLNGGNISITSGASLTVVFSGWDTALWNISGTLAIGGNLATLKTNTQSPAPTLPAAYSPLGSADNPFLVTNETDLRNVGKETTAGGWTLSAHYKQTADITLTSAFTGIVYTSSKFNGSYDGGGYTITGLNITATSSNLGLFGYIGSGTVKNVNASGTVTGTGSVAGIGGIAGANEGTIENCSFSGTINGSATTNDEVGGIVGRNTTTGTVKNSKNNATVTGRNQTGGIAGWNYGKIENSCNTGAVTGNTQVGGITGLNNGEIDNSYNTGAVTGSQYIGGIAGRNANNGKYIKNCYNTGNVTATAASDSRAGGIAGDNQSSATVEYCYNTGNVTGSTAVGGIVGSSDNSTVQYCVSLGAKVTGGTNTCRVVGVMSGTATLTTNRARADMIIGTSGSEAIPTINIGANEREGADVSLGTAQNSVFSSFFTTTIWTLGSTLTVGGNLPILQMNTQSPAPTLPGSNPTLGTAANPFLVTNEADLRKVGTETTAGGWTLSAHYKQTANITMTGAFTGIVYTSSKFNGSYDGGGYTITGLNITATSSNLGLFGYIGSGTVKNVNASGTVTGTGSVAGIGGIAGANEGTIENCSFSGTVTGSTTSLQVGGIVGRNTGTVKNSRSSATVSGNDQVGGIAGRNEGKIEASYNTGAVSASNQYVGGIAGTNTGSGNYIKNSYNTGNITATTSSAACYIGGIAGVNQTSATVEFCYNSGYISATNNVTGGIVGQNNAGTVRNCVSLSARITGTNNIGRVAGLNSGSGNLSDNTARADLKIGRNNAEAVPTTDLGATAINGASVTVGAAQSSFYLSWDSAVWNMGGNMTVGVNLATLKANTQSPAPTLPAVYFPLGSAENPFLVANQTDLRKVGTETTAGGWTLSAYYKQTADIAMNGAFGRIGDNTDRFSGSYDGSGYTITNLNMGPAASYVGL

SEQ ID NO: 91083 - protein, 302 aa, Unknown
  Obtained from environmental sample
  DOMAIN (130)...(250): HD domain
  misc_feature (1)..(302): Xaa is any amino acid
LAYVRTFVVAGSDARLASDHAGSELNEHCRVIARNDFIAFAEKVQKYNAEECVQKLGISYAEAEGFIPGILLIKLFLEQTGAAQVVVPLVSIREGYLIDLALGVDSEQQEEFYSQIIASAVNLGRKFHFDEAHARHVANLCMTLFDALAKEHGMDSRQRMMLKTAAILHDIGAFIKTSGHNRHGQYIVSNSEIFGLPRDELDIIANVIRYHQGREPTQADIEYISLQREERIIVLKMASILRVADALDRGHTQQLKNLSVERRAETIALHAQGVYDISQELIALEEKANYFQAVFGYKIVLN

SEQ ID NO: 91084 - protein, 266 aa, Unknown
  Obtained from environmental sample
  misc_feature (1)..(266): Xaa is any amino acid
VTKLDFPKIHFYDQDFVDIYDKTWAWLQDCWNSATEKGGIEGKFFSYPGSRAVYQADAIYSSFFLVYSNRIYQATPSLDLFYERQEANGAIRAAYDINTGKPVIERDNSECLGIPLFAWAEYNIYHKSANKKRVKDVLAVLDKYTAWIDKTFKKSNGLYRVPLAVTGITNSPREGAYYSLDFNAMMAINALYLSAMADILNDKDSSFQYKKHYFALKTRINALMWDPQDGFYHDIDKNEKRLPVKTIAGYWPLLAEIPNDEEAEKI

SEQ ID NO: 91085 - protein, 316 aa, Unknown
  Obtained from environmental sample
  DOMAIN (34)...(312): Succinylglutamate desuccinylase / Aspartoacylase family
  misc_feature (1)..(316): Xaa is any amino acid
LGALMIKHVSVAALPVAENFIIQKNRIENNTDKANKRVCIVTGTHGDELEGQYVCARLAKILNEKKQKLSGIVDIYPAVNPLGIDSVTRGFPMFDLDMNRIFPGSSSGSLAEAAAYDVIRDIDGADMCIDIHSSNIFLREIPQARVSEQNEAALLPYAVMLNVDLVWIHASATVLESTLAHSLNMRDVKTLVIEMGVGMRITESFCAQIVDGILNLLSELGMWKGKAGRTRPPLVSKDRGVGFLNSDAAGIFIPRAAHGSHVNAGDCIGIVIDPLTGAVVEETLAPCDGLLFTLREYPVVFGGSLLARIMEDSKNG

SEQ ID NO: 91086 - protein, 353 aa, Unknown
  Obtained from environmental sample
  DOMAIN (1)...(154): 3,4-dihydroxy-2-butanone 4-phosphate synthase
  misc_feature (1)..(353): Xaa is any amino acid
MVTHGRGLVCAPITEQRAEQLNLQMMASRNTSRFETAFTVSVEAKEGTTTGISAVERALTCRTLANFSKRANDFVCPGHIFPLKARNGGCLEREGHTEAVIDLCKLAKLPQVGVLCEVLNSDGTMARMPQLKAIAKKHNITLVTVQDIIDFRLANEILVERIAQPFVPTKFGNFKTIAYKNKINGEEYVAFIASKVPKNPCNVRVHSECLTGDIFHSLKCDCGAQLEYSMKYIAAQGGVFIYMLGHEGRGIGLANKLKAYELQEKGLDTVEANIKLGFKADHRNYAYAAHILKELGVKSVNLLTNNPRKIEGLEMCGIKISKRIPVETEPNSFNKKYLKAKKEKMGHKFTTLL

SEQ ID NO: 91087 - protein, 180 aa, Unknown
  Obtained from environmental sample
  DOMAIN (1)...(68): YGGT family
  misc_feature (1)..(180): Xaa is any amino acid
MLIIFLRIILTWFPGFGNGGIIDFLSGITDPYLNWFRRFSFLRLGFLDLSPIVALGVLSLVNRVLGMLASYGRISIGIVLALALQAVWGAVSFILGFLILLLILRLIAFLFGQSGANPFWNVIETISRPVLYRINRIFFRGRIVKHITVLLVSIASLIIVYMALRLLFALISITLVSLPF

SEQ ID NO: 91088 - protein, 323 aa, Unknown
  Obtained from environmental sample
  DOMAIN (7)...(321): Glucokinase
  misc_feature (1)..(323): Xaa is any amino acid
MGTKKAIGIDLGGTAIKGAVIDEGGICGGVTRVPTEAHEGGRRIMENIMSLIDKLASGGGGPEAFIGVGIRTPGFVDRNGVILNGGANMPGWTGMPVYQPIKERFGLRASAANDVTSVALAELMFGAGRGVQNMVCFALGTGVGGGIVTNGRLYKGSHGMAGEIGHIVVETDGELCPCGQRGCVERYASAPGIVKAAVDAVTLGVGWTTELAKIVRENPGDVTSKTVYEYVAKGDALALHVHEKACDMLGRAVGIIINTFSPDRVVLGGGVMMAGSVVLEAVKKYAALHCWPEIFKLCEIVPAQMGEDSGVLGAGALALEEFG

SEQ ID NO: 91089 - protein, 292 aa, Unknown
  Obtained from environmental sample
  DOMAIN (134)...(251): CBS domain pair
  misc_feature (1)..(292): Xaa is any amino acid
MLKELLTPEIIQLIRERQWADMRDALVIWPPAEVADLIGSIDEPTRVLLLRFLPRPYEAEVFSELTPGMQNDLLKELTNREVRGLLSELSPDDRTALIDEMPAEVTRRLLGLLSPGDLAETRQLLGYPEGSIGRVMTPCFVDIRAGMTAAEALEHIREHGSESETVNVVYVVDADGKLLDEISLRHLVLAPPEKSVESIMDGNFVTLTGYTDQEEAVAIIKKYNYLALPVVDSAGVLIGIVTIDDLMDVAEAEVTEDFQKLGAVSVQVDGEGPIESIREAAVSILFRSRIGW

SEQ ID NO: 91090 - protein, 604 aa, Unknown
  Obtained from environmental sample
  DOMAIN (3)...(77): PAS fold
  misc_feature (1)..(604): Xaa is any amino acid
VLSSWSSLLHPDDKEATLDAFARHMLDNTGKTPYDVEYRLLRKTGEYAYYRASGESIRDKDGNAIRVAGALMDITETKNMLLNKERQKTEAEAASRAKSTFLATMSHEIRTPMNAIIGMTTIGKSAPSIERKDYCFTKIEDASNHLLGVINDILDMSKIEANKFELAPAEFELEKTLRRVVNVVNFRIDEKHQKFFVHVDRSIPRTLIGDDQRIAQVITNLLGNAVKFTPEHGAISLTVRLAQRVDDVCTIEFSVSDSGIGMTPEQQMKIFNSFEQAESSTTRKYGGTGLGLAISKSIVEMMGGKIWVQSEPGKGSVFAFTIQAQRGTEEKHELLSADVNLSNVRIMVVDDDQDILTYFTDIAQRFGVACDVAISGEKALELIDQKGDYHIYFIDWKMPGMDGIELVSKIKNRVPENSIVIMISAAEWGAIAKEAKAAGVDKFLSKPIFPSTIAEVINECLGVKQQTEKTQTADINGIFARRRILLAEDVEINREIVLTLLEPTQLEIDCAENGAEAVRMFTEAPDKYDMIFMDIQMPEMDGYEATRRIRELDNPKAKTIPIIAMTANVFKEDIEKCLASGMNNHVGKPLDFEEVMNRLRSYLG

SEQ ID NO: 91091 - protein, 175 aa, Unknown
  Obtained from environmental sample
  misc_feature (1)..(175): Xaa is any amino acid
MKKTVPYILILIMVYTSCVYKYNNESDFQISLLADGKSAEITDYTGGKQIVSIPPVIQGMTVTGIGNDAFKKKEILGVIIPGSVTSIGNRAFAYNPLTSITIPAGVTEIGESAFAFCNNLNTDITIPSSVMSIGRYAFFHCRNLPSITIPSSVKVFGEMAFYDWNILQTVNIMGL

SEQ ID NO: 91092 - protein, 238 aa, Unknown
  Obtained from environmental sample
  DOMAIN (109)...(176): Elongation factor Tu domain 2
  misc_feature (1)..(238): Xaa is any amino acid
LIDDLSGVSEIITDKYLTGEEIEPSLIRAELRKAVLKREILPLFAGASRRNMGVQPVIDAVVDYLPSPDEAVQAVAHHQKKEEDITIPCDPKGQPLGLVFKIQNDREAGSLCYVRMYSGSIKSGNVVYNTGKKKRERANRILRMHSNKSEPMDSLDAGDIGVIIGMKLAQTGDTIGVENWPVILEKMQFPEPVISISIEPKTISDQDKLKDILAILSKEDPTFTVRENEETGQLIISG

SEQ ID NO: 91093 - protein, 274 aa, Unknown
  Obtained from environmental sample
  DOMAIN (1)...(265): Homocysteine S-methyltransferase
  misc_feature (1)..(274): Xaa is any amino acid
MQRGYENVLADKLNTDAPEIITQIHREYAQAGADIVETNTFNSGLLKLQELGLAECLAEFNQAAVRNARASGARYVAGSLGPTGKLLEPLGEVSFDEAYGSYRAQAEALEQGGADAYIIETISDIQEMRAALLAVKDVSVKPVICSLTYNEQGKTLTGTDIFTAGVTLREMGADVLAINCSIGPEGVVGLYKKYYKDLGELGLPLMVMPNAGMPELINDKLTYTMTPERFAEIMAELTRYGVQIYGGCCGTTPVHIAALAKAVKKRSVKYHKCA

SEQ ID NO: 91094 - protein, 288 aa, Unknown
  Obtained from environmental sample
  DOMAIN (93)...(175): B12 binding domain
  misc_feature (1)..(288): Xaa is any amino acid
TEKITKLGWQTSLGVSNVSFGLPQRKNINNVFLKLLEKAGLKAAILNAATYRDVGRYTREEGLAEAVILNQDPGAKKYISQIADPAAPKAADKKNTASIYTAVVDGNESIILDLVKQELAKAAPRDILDKQLLPALQKVGEYYSAGQYYLPQMLASANAMKKAFAYLKPLMPKETAADVQTAIICTVEGDIHDIGKNIVAMLLENNGFRVVDLGKDVPADRIVEAAAEYHADIVLLSALLTTTMLKMKEVKAKLLAKNIDIPVMVGGAVVTPEFAANLERITLRTLRA

SEQ ID NO: 91095 - protein, 100 aa, Unknown
  Obtained from environmental sample
  misc_feature (1)..(100): Xaa is any amino acid
MNSDVKVLPRKINGVVRAIPSKSQAHRALICAALADKQTTIECESGSDDITATAECLSALGAKIERESDVYIVHPLKREENNAATLPCGESGSTFRFMLP

SEQ ID NO: 91096 - protein, 276 aa, Unknown
  Obtained from environmental sample
  DOMAIN (9)...(276): Chorismate synthase
  misc_feature (1)..(276): Xaa is any amino acid
MSSQYGKKLRISIFGQSHSPAIGVSIDGLTAGIKIDIDELGAFLKRRAPGQNDISTARSEDDAPEILSGLADGVTCGAPLAIIIRNKDARSADYRELRDIPRPSHADFAAHIKYGGFQDVAGGGHFSGRLTAPLCAAGGICLQILRGLGVSIGAHILRIGGAEDDPFDPVAVSDAEFEPIQKNPLPVLKREAGEAMRQQIWKRRKKAIRSGALSRLRQSVCLLGWAIRYSTALRTVSPGLSLAYRARRALNSEAASPLPGAGVRKTTTAILWTEKR

SEQ ID NO: 91097 - protein, 285 aa, Unknown
  Obtained from environmental sample
  DOMAIN (206)...(285): Phosphoglucomutase/phosphomannomutase, C-terminal domain
  misc_feature (1)..(285): Xaa is any amino acid
MLNNPQCLTSLRTETDPLFGGIAPEPSSKNLEGVKQFLNASKSRFRLGAILDPDGDRIRFYDGSREIDMNSFGAIAFHYMVTWRKEEGVLAKSVATSNFANIIAAKLGIPVMETPVGFKNFRPWLKRNANPKALIAFEESDGITGLNNTLEKDAMFGLLIALEIMAVTGKNLGEYLDLLYTEYGRLYPERSGFEVEKSMVGDPLLAKVAEIAKSAQPGTQISIGKKSKVVRELLTIDGVKIIFNDDSWMLIRPSGTEPKVRIYAECRDSEEKEDMFTAAKDLFFK

SEQ ID NO: 91098 - protein, 331 aa, Unknown
  Obtained from environmental sample
  DOMAIN (90)...(285): von Willebrand factor type A domain
  misc_feature (1)..(331): Xaa is any amino acid
VTLERPVLAIAALLIFPLAIVLAKRLGSPFTASVPLEPPGGAPFKAPYSLAGIIKTLYTLEYLGVFLLFIGASGPVMQISETVWLNRGADILFVLDTSPSMAAIDMDGSNRFNAARRLLKDFSERRPSDGIGLIAVGNDAALLIPPTTDRDILAARLENLHIGEMGNGTALGMGLAIAAYHLEKSKAPRRAAVLISDGENNAGAIHPETAAAMLKEVNASLWVIGVGSGGEVPIDYVDPYTRMRRTGLIDSRYDRDALARISAAGGGTWIHAPSADAFTAAFARVDDQEMLVRRSSSFLRKRPFHQLFILAALVLIAVSRFVRRFFLGAWL

SEQ ID NO: 91099 - protein, 301 aa, Unknown
  Obtained from environmental sample
  misc_feature (1)..(301): Xaa is any amino acid
MDTRELLGRITRLPIVADTLAEEMLSGNFSSVFKGQGMEFEEARHYQWGDDAKSIDWNASARLGTPFIKVFREERELTILLLLDASASMRSGFAKLWGNQQGLNPYEQALITAALIAFSSERSGQRVGAFIFDSKIDRVFPPRKGRRNILAFVSGALHYHSPQAGAEKSSNLGAALAGAGRMLKRRSMVVLMSDFLSADWEKELCDLSRRHDVIAVRIYDPKNMDLPKLGLLDARDPETGLQIVVPSNSASFRNAWAEWHKNHADHWLKLCRRAGASHLEISVDEDPAKILSRFFTGRGGQ

SEQ ID NO: 91100 - protein, 154 aa, Unknown
  Obtained from environmental sample
  misc_feature (1)..(154): Xaa is any amino acid
SVFAPLEPLSPILDKAAIAQLRSAADMIHMDEKITEYIVSIVTATRPAQTGARHAGASKAASSSASAKFAGAKIADGLYRYVSFGASPRASIALYRCSRILALFSGRDFVSPDDVKAAAYPALRHRIVLSYEAEADGLDADTVITRILSHVPIP

SEQ ID NO: 91101 - protein, 199 aa, Unknown
  Obtained from environmental sample
  DOMAIN (3)...(196): NmrA-like family
  misc_feature (1)..(199): Xaa is any amino acid
VNITVFGGAGFLGSHVCDKLTEAGHQVTIVDLVASPWLKRGQIMRQGSLLDEAFVAEAVAGADVVFNYAGIADIGEANRRPVETVRVNVLGNVTLLEACRLAGIQRYVFASSLYVYGASGGFYRCSKQACELYIENYEAMHGLKYTILRYGSLYGPRADRRNAIHRFVAEALETGGVVYYGAPTALREYVHVEDAADCT

SEQ ID NO: 91102 - protein, 80 aa, Unknown
  Obtained from environmental sample
  misc_feature (1)..(80): Xaa is any amino acid
MCKQVCIIPFRRDYLPHFNEMPESPLEIYESVDMMRILEHGEKVRMVPIAERTVSVDTPADLLHAEKLMQDDQLRRLYSK

SEQ ID NO: 91103 - protein, 281 aa, Unknown
  Obtained from environmental sample
  DOMAIN (136)...(281): DNA gyrase B
  misc_feature (1)..(281): Xaa is any amino acid
MTRLHAGGKFDKKSYKVSGGLHGVGVSVVNALSQWCEAFVHMDGRVHTQSYKTGIPDGPVHEITIDKLPYSADLNRHGTVIRWKADASIFETTTHNFDALSNRLRELAFLNKGLKITIRDERLSTPKIHEFKFEGGVKSFVEYLNENKTVLYKEPIFLDGVRDDGLGGSVEIECAIQYNDGFNEIMYSFVNDINTREGGTHLMGFKSALTRTLNEYLKKSKHAKKLDETLSGDDVREGLTAVLSVKVPEPQFEGQTKGKLGNPEVKGVVEAMINEQLELFL

SEQ ID NO: 91104 - protein, 270 aa, Unknown
  Obtained from environmental sample
  DOMAIN (1)...(247): DNA methylase
  misc_feature (1)..(270): Xaa is any amino acid
MRKRLILAKEIISDDGSIFVHLDQRKVHYIKAIIDEIFGEYNFKNQIIWKRTSAHNDAGKFGINIDFILYYTNSSSYTWRQLFSVYTEKHLKRFRYRDEDGRQWTDSPLTAKGLKGKGYYYTYKGINGYWRCPIETMKRFDTEKKLHFTKNGGIRIKKYLEELEGTPLQALWDDIDPINSQSDERSGYPTQKPEELLERIIMTSTNENDIVLDFFAGSGTTATVAEKLNRRWITCDIGKYSYYIIQKRLLTIQNSKNLENPNKKYNKPAH

SEQ ID NO: 91105 - protein, 266 aa, Unknown
  Obtained from environmental sample
  DOMAIN (160)...(266): PAS fold
  misc_feature (1)..(266): Xaa is any amino acid
MISRKAGTQLEVLVRERTNDLAFQTSKLEAILDSIPDLMYCKDKDLKYTQCNKYYSQYLGMTETDLFGKTNTDGKWLPPEELEMIRVTESTVMEEDRIITIEENIRLPITGIKGVFEAVRSPIRQDGAVVGLIAIIRDITQRKKTEKELSFKTSQLKMIIDSIPDSMFCKDTDLKYIQCNKVFENFMGVSEEHLMGKSDKDGNWLSPDDIERIYRLERAVIDEDRTFTLEETVHSPVTGKESVFETIKAPIKQDGAVVGLIAIIRD

SEQ ID NO: 91106 - protein, 575 aa, Unknown
  Obtained from environmental sample
  DOMAIN (279)...(346): His Kinase A (phosphoacceptor) domain
  misc_feature (1)..(575): Xaa is any amino acid
EIRRQEYENTLHAIFEDMPEFVRMFTIWKPDAIDNMDSRFIGRAGMTETGQFALSLTRENGRIEKVTSAVVQQAMAHMNGPNSKTVEMSDPIIFKIQGKDTWCLRIMVPIENKRLNETVGVVGCIFNIDLMQPLVEQTINNYEEVTSMAIYTNTGFILANYLPEMIGRQLVEVETQYGEHLDLVAEAVQNAWEWEAASFDPELKTTMYMSIAPIPLAASPTTWSVMIGSTEAYILKDINAMTNFTVMLMIIVVFAAATLVSVLIRVDAARTKSDVESRHKSMFLANMSHELRTPLNVVIGLTELILEDDGRLDKHTTENLVKISNAGSTLLSIVNDILDFSKIESGKLELSPVEYYVSSLLNDIITLVITRLGEKPIQFHLKINDDLPNKLFGDDLRVKQILTNLLTNAVKYTRQGSIELDVRCMREGDAMWLDAAVSDTGMGIPKEDIPNLFLDYYQVSAKSNRNIEGTGLGLPITKRLVEMMDGKIGVESEHGKGSTFSFRVKQGYVNDAVLGQDVSDKLRNFCYSDDKRVVAKKLARVNLSYARVLVVDDMETNLDVASGILHRYNMHVDCL

SEQ ID NO: 91107 - protein, 302 aa, Unknown
  Obtained from environmental sample
  misc_feature (1)..(302): Xaa is any amino acid
MIGVPITEISANLYGGEPMLQKRALIHFSDGFKNIAEKYQCKVAISMTSNMTLLDDDMIEFIKKYQITIQVSIDGTKEQHDKRRVFADGSGSYDVILKNLLRLRDAGLKKLVTIRINIDKNNLDEAESIFKAVCEFSDDVYFGFLDTFKGYNDSFSGQCIYGLIYPNIETETFNTIYQKYGQPLTTLFGKKAPCAMVCENSYLIDPLLNVYKCDLLLNRPEYSVGYIDCNGQFIKNAEFYKQMNRVPEIFSECLACKFLPICACGCAGKAAINDGTMNKPFCMYSEEKLTIFLKDYIKRLSA

SEQ ID NO: 91108 - protein, 192 aa, Unknown
  Obtained from environmental sample
  misc_feature (1)..(192): Xaa is any amino acid
MEEKMAIEIVKTYKEHLPTVRFVGKMYTDEDRVDNPKGGFNVYWTEWHKNGWMNTLRKLPQIEGIDNSPIGLMGIENKDGTHCNFQYWIGIMLPENTNVPDGFSYVDIPESDVMVCWVYGSDKTGEIYDCHELCMEKMFGTEDGWWNKIRNDLKGKDRDWCWWFERYNDKRMSNEDEKGNVILDYGMYVKSE

SEQ ID NO: 91109 - protein, 250 aa, Unknown
  Obtained from environmental sample
  DOMAIN (145)...(202): Bacterial regulatory proteins, luxR family
  misc_feature (1)..(250): Xaa is any amino acid
LEGGTLFISRNINVFSWLESAFIDCGFFDVTPISLERDALSSKLNELKPKYVFINSEFYSCVTPFMIGLLHDKFPDININIVNFGIFPDSLAVRFIFHGAKSYLDVNDGTKEFKKGLSIIKTGEVYYSPGVYKLIIELDEIKNLRSYTTDREWQVLFLVCNGFTNEGIAFWLSVSDKTVETHINSLYKIFDVGKRVNLLRKADKLGWINKKELVFNGNDVKIPKNPSKKRNKKNPPAHGGGRLIRRFAVG

SEQ ID NO: 91110 - protein, 111 aa, Unknown
  Obtained from environmental sample
  DOMAIN (18)...(72): Helix-turn-helix
  misc_feature (1)..(111): Xaa is any amino acid
MANIIDEQYIYKLISSNIKRLRSLQNISQLGLAINTGLTHNFINDIENCKKGISAKTLAKLSMALNAEPYQLFLPEGTANNEIISYVKDFNDSLQKVVNELTHHYISGGKK

SEQ ID NO: 91111 - protein, 150 aa, Unknown
  Obtained from environmental sample
  misc_feature (1)..(150): Xaa is any amino acid
KTIRFLGKSVTVHYLILENLSLVEEQILAAAKVNPQVQSWINSVNSLEGWSWRNIADTQSRSYHSYGLAVDIMPKSYGGKETYWLWASNRRSDWWNISYNERYHPPAAVIKAFETYGFIWGGKWLYFDTMHFEYRPEILILSGMPPNTRR

SEQ ID NO: 91112 - protein, 124 aa, Unknown
  Obtained from environmental sample
  misc_feature (1)..(124): Xaa is any amino acid
IAEEGLAMAIGHEGQNIRLASKMLGREIDVFGDDEFSNLSEEQRAEVLSETPEKKEPEPAVEGNSVAEPVVDDDTESTDAVAAVDNNNAEDEESIQGEIINKAVETLSETAVDSAAAIESTSAS

SEQ ID NO: 91113 - protein, 427 aa, Unknown
  Obtained from environmental sample
  misc_feature (1)..(427): Xaa is any amino acid
MNITAQLSAELNLNEPQVKNVLALFDEGATVPFIARYRKERTGSLDELQIRELLHRYEYYKELDERRQAILDSIREQGKLTPDLERKINGALSKTTLEDLYLPYKPERATRAAKAKEAGLEPLADWLLALTAERCDVPARAAEFVNAEKGVDTPEKALSGAKDILAERLSDDADTRRRLRESAAEKGFIVSAVKKEFAGKKSKFEMYYDYREKASAIPSHRFLAMLRGEHEKVLRLSLELPTEGVTERLCSALVKHPRSAAAPYLREAALDALDRLLLPAVKTALRTEMRERADAEAIKVFGENLAALLLAAPAGRKTVIGLDPGFRSGCKLAVVDDTGKFIETATIYPHEPQKDRERARTVFLSLAQRHKPRLIAIGNGTAGRESDEFVRAALKDIPAEERPLCVTVSEAGASVYSASDAAIKEFP

SEQ ID NO: 91114 - protein, 215 aa, Unknown
  Obtained from environmental sample
  misc_feature (1)..(215): Xaa is any amino acid
LLYAQSSPTGGIAGSDLDTVQAREEFRIGVQAYYRFSYNEAIRSFERALSFWPGEPLILDWLGKSYYRSGIENTAFRVWQAAAEGYGISSGQGMLISSRMETLRNRRLLLPVADDEVRYVESGRYPGKNNEMVYFRQPTSVLALNDGSAWVVAYGSNEILRIDPNGIIRERKRGPLTVLTDLTIWLRVLKETFTFPNSGATGSPFFPRQETGSIT

SEQ ID NO: 91115 - protein, 391 aa, Unknown
  Obtained from environmental sample
  misc_feature (1)..(391): Xaa is any amino acid
DVLVTTVNAASPIITAQPIDGVVDVGTAYTFSVAASVSDDGALTYQWYTDGAAAADVAISGATGATYTAQTSTIGTQYYYVVVTNAIPNNGDGGKKSVSQKSKIVSLTAKPVPPTITAQPANQIVAPGDAAKFSIEAASNGAGALTYQWQVNTSGSLAPAPRDVTVDMWDYTGDGWNGGSLRISVNGADLQTNPTINSGSDGTYKFKVNSGDLVAFYWNISNYNSECAFAAYYADTPPSPEFDPDPATGALNDTSALLVYRQYGGLISSGGAQLGSFRAASSNADFFSGVSNGTGGASASYTTPATTEAMTGYRYRCIVTNGYAQSDTSEYAIITVSPDAVMSFNRTIPIPSGNDKSAVLAPAAALTAEFTAGPNPAARQGGAVNFFRQGP

SEQ ID NO: 91116 - protein, 288 aa, Unknown
  Obtained from environmental sample
  misc_feature (1)..(288): Xaa is any amino acid
MLKSEKNVAHIEKGAFRRNELANITIPNSVVQFGNVAFWENKLKNINIPNKVVYIGSGAFWDNQLQNINIPNKVTIIEGMAFYNNKLVSINIPNSVTTIENYAFSKNQLKEVTLPNSVTSIGKAAFSYNLLKNINIPNNVSRIEDETFYENQFVSIYIPDSVTHIGENAFSYNQLIKVNIPDIVTYIGAAAFRRNQLKDINIPNSVTDIKYFTFAENELTSINIPNNITHIDRGAFKDNQLKSVNFSNRVTSIKDGTFYEDQLTSVIKIGTGAFENNPLTKITIGENI

SEQ ID NO: 91117 - protein, 201 aa, Unknown
  Obtained from environmental sample
  DOMAIN (1)...(173): haloacid dehalogenase-like hydrolase
  misc_feature (1)..(201): Xaa is any amino acid
MRLVCLDLEGVLTPEIWIAFSEATGIPEFRRTTRDEPDYDKLMRFRIDLLAKHNLKLADIQKAIGGMDVLEGAADFVRSLRERTQLIILSDTFEQFAKPLMAKLGYPTLFCNCIETAADGSVSGYALRQQGGKKCAVAAFKTLNFKVFAAGDSFNDLAMIAEADAGCLFRAPEKIRKDNSHLFCADTYGELLERIDVFLGE

SEQ ID NO: 91118 - protein, 428 aa, Unknown
  Obtained from environmental sample
  DOMAIN (1)...(400): Family 4 glycosyl hydrolase
  misc_feature (1)..(428): Xaa is any amino acid
VFARNLLGDCMSSEALRECEIALYDIDEKRLKESEKIISAINRGKGSYSRISSYAGINNLEKALAGANFAVNAIQVGGYDPATIADFEIPKKYGLRQTIGDTLGIGGIMRALRTIPVMEQFARTMEKVCPDVWLLNYTNPMSMLTGFMQRYTGVKTVGLCHSVQGCSYWLLKELGMEDKMDGRRELIAGINHMGWLLNIYDRNNVDLYPEIRKKAKAKNAAEKHSDMVRYDYIDKLGFYCTESSEHNAEYNPFYIKSKYPQLIGEFNIPLDEYPRRCVEQIKGWKAEYESLAKKDIIEHERSHEYASYIMESIVTGNTYKIGGNVLNTGLSIENLPAQACVEVPCLVDGSGIRACHAGKLPVQLAAMNMTHVNVHLIVIEAAVTKKREHIYHAAMLEPHTAAELSLDHIRSMTDELLEAHKPWMPEYK

SEQ ID NO: 91119 - protein, 594 aa, Unknown
  Obtained from environmental sample
  misc_feature (1)..(594): Xaa is any amino acid
IVQKINNTWTIVKSSHPIFTAVLMILFCAMLLVLTLAGVLTLIDEKIKYSEALKTIFTYHTGTASANNPDNAVFTVRLIAIISGTLLFSGTIISIMTTLIRNYITNRDGAKGRLRISNHLLILCYNKEVPAILADLMYNPSHKTVLLLSDAKKQQVFDELDATIAALDEKPKYKINLIVRQGSPASLSELKDVGIESASAILIMNTNASVSDELCGADYLGSLDLVLKLGNFNLRPKVPIGVETSTEEASDIMRSLHKDILGLKDKQIQYFAHDKKIGQFMALAVSNPDLCNVLLELLSYRGCEFYPIDKISREEYLQSHCAGIPTVAFGEKMYCLADDESAARHKRAHPYKTERRLQRSREGLIKRPLTLFVIGKNRKFKYLIEALKITNPDTVINHFKTNDIHNFVDTVMKQGDRNSVAVVLSDDTVPPKNYDANVFWTIIELSRVASINERPFKIFAEIIDPKNQKSLENLNIQNFVVSTQVVSTFSNKLLNDANSVDFYEDLLTPSGSFDIEVSLAKEVFDITEAQTFSSYAEFVHAGYYGTRESDAAVIPFGIYTDAKNYVLFCVELDKKRDFVVKPSDKIIYASIKTG

SEQ ID NO: 91120 - protein, 284 aa, Unknown
  Obtained from environmental sample
  DOMAIN (90)...(208): DNA mismatch repair protein, C-terminal domain
  misc_feature (1)..(284): Xaa is any amino acid
ELCVGPGEKNLPNLEQSLRAKGTSVRAIGLYDTIPARKRFLKRPGSEGTACRQIFNEKALAFPGIAFRYSQDESLKCFLPPASSLKERFSQIFLEERESVFLHEISAPGNGFSVTVVAGGHELSRNDRRFQFVYANNRRIQDFSLLQALEYGLQGWFPNGAHPIGAVFVTIDPALADCNIHPAKREVRFADPGAIHHALSSTLRDFCRHTNMVEKASITDLNRRLDLQPNTGFVGADTFLVAEEIVPYSATYSAPEIRPVPYSAPHSVPSPENNRTRYLGRIFD

SEQ ID NO: 91121 - protein, 289 aa, Unknown
  Obtained from environmental sample
  DOMAIN (82)...(287): Carbamoyl-phosphate synthase L chain, ATP binding domain
  misc_feature (1)..(289): Xaa is any amino acid
GRINDDTWNNPNDCVKAIISPDRETHGVLIFDNNSTRSIRLDAAMPVLHGKNGEDGTVQGLLELAGIPIVGCNTLSSALCMDKDRAHKIAHMIGVRIPGSVVLENEMTVETVWEQIANMGYPIFVKPVRAGSSYGITKVLNKDELPAAIKLAYEHDDRVIIEENISGFEVGCAILGNDKLVVGELGEIELSGGFFDYKEKYTPETYSYHVPARISPQKTEEIKTIAKKIYRALGCTGFARVDMFLTPAGEVFFNEVNTIPGFTDHSHYPHMLKAVGMTFEQIINTAIGQ

SEQ ID NO: 91122 - protein, 138 aa, Unknown
  Obtained from environmental sample
  DOMAIN (50)...(138): CDP-alcohol phosphatidyltransferase
  misc_feature (1)..(138): Xaa is any amino acid
MPEATAPHPETQKRVHKGVYILPNLLTTASLFSGFLGMLWALDGDFDGAALAILFAALMDGLDGKVARLTNTASEFGVQYDSLSDLAAFGVAPALILWQWHLHVFGRLGIAVAFMFAACGALRLARFNVSANQATAGK

SEQ ID NO: 91123 - protein, 492 aa, Unknown
  Obtained from environmental sample
  misc_feature (1)..(492): Xaa is any amino acid
EELKAYLDSQPANSPDKPIKVTINANEAMLSEIAVVLRDTDKYVSLNLSGNTLKSIPNNAFYTYKEEYDDDGYEVYSYDDDEEYSYSYEEDEYYYEYEYGEKKSLVSLVSITIPNSVTVIGEGAFSACKNLTSITIPNSVTTIGKNAFTGTAWLNNQPNGLVYAGKVAYTYKGDMPANTSITLLNGTKGIAGYAFYGRTNLTSITIPNSVTTIGGYGYAFGGCTSLTSITIPNSVTFIGYTAFSDCTSLVSITIPNSVTIIGGNAFNGTAWLNNQPNGLVYAGKVAYTYKGGMPANTSITLLNGTKGIAYGAFKECTSLTSITIPDSVTSIGGSAFSYCTSLTSVTFQGKITSNNLGEGDGMNYLQPFDGDLCDKYLAGGIGTYTRPDGRSRTWTKQSDSSNKSVSGLKSSGSVSAFPGRWQLIEGRGDAKDVELFKDGTGTADGNGITWKIENGRFHILHPFYTFSAYYNVTGSTVTFTQEDGKVIKYQKK

SEQ ID NO: 91124 - protein, 48 aa, Unknown
  Obtained from environmental sample
  misc_feature (1)..(48): Xaa is any amino acid
ADTLREAQKHPEEYTNLIVRVAGYSDYFNDLGEVLQNEIINRTEHKGF

SEQ ID NO: 91125 - protein, 262 aa, Unknown
  Obtained from environmental sample
  misc_feature (1)..(262): Xaa is any amino acid
MTLSGILDEHLSPVLDKLVSKGQVQTNSMEIRNSELFGTMANMTKNESWRKPSLTNLDIRYEVKNGQLMVEPIVMNILQNKLELSGSQGLDMTLNYKVNATVPVSAIGSGATDLLSKIPGGSNIREIKITGLIGGMATSPVVSLGVADMVSSVVTSVTEVVREQVRDEIDKQKAAIMAEAEKQAVNIRSVAKQSANRIRAEANAAADKLENEAKNPIQKLAAKTAADALRREGETNAVKVEQEAERQVTAAMDAARRRADSL

SEQ ID NO: 91126 - protein, 139 aa, Unknown
  Obtained from environmental sample
  DOMAIN (21)...(135): Response regulator receiver domain
  misc_feature (1)..(139): Xaa is any amino acid
DFEDLKKESTKFKVETGSEKKTVIVIDDDEPIRVMTQGMLSAAYDVTTVGSGKEALGLFFKGYVPNLVLLDLSMPEMGGWDTFIRIRDISKLHKTPIAIFTSSNDPRDRVKAQELGAVDYIQKPIKKEEMLNRVAKLVR

SEQ ID NO: 91127 - protein, 629 aa, Unknown
  Obtained from environmental sample
  DOMAIN (289)...(629): Glycosyl hydrolases family 8
  misc_feature (1)..(629): Xaa is any amino acid
TGTTAPSSGWTDSTTISGLTANTSYYLFARSKANDNYNAGTAARTSSTTKTDAASAAVSTVINFESDALNKTYDYTEGDNKPTSVKVVNDPINSGKKSLEISSNGPNDKGYNQAAVIPVKLPYTVKDYESFSFKFSLVSGNTGTNLDSKQIQVYIARDKATFKKWGFGNGSSESNQFAANLIGAAPSSAVNFGDTYKNKWTDYTITITSPGDAIKDLTGDLYIAIGINCKTNAVYLFDDITFTPKSGFTPPPPPPEPPSTAPNPPSTGAVSSKNYRNMFREWGYSETEITNKVNTAWNKLFVNGVESGDNAERIYVETGSDMAYIHTFDSNDVRSEGMSYGMMMCVQMNDKTRFNKLWKWARTYMYNETDAGSNSRGYFSWQCSTSGSKMDKGPAPDGEEYFITALLFAHARWGSSPSGINNYAQQARQVIYDLTRRKPGNGDPYGEPSMFNTDNYMVRFATLGNSAKFTDPSYHLPAFYEVWALELQSDYDNNKLYGIWADKADLKKDIDFFKQAASVSREFFAKTTHATTGLGPDYAEFDGSPRNEGDHKHFEYDAWRIAMNIGMDYAWWAADPWQITFANRIQAFFVSKGVTTYGNRWTLDGTQRGADHSPGLVGCNSVASLAATH

SEQ ID NO: 91128 - protein, 196 aa, Unknown
  Obtained from environmental sample
  DOMAIN (97)...(196): STAS domain
  misc_feature (1)..(196): Xaa is any amino acid
DQSTAVLTLNGRLDTANAPLLERKIRQWGNEITELILDFSGLEYISSMGLRVLLQAKKTLKAENRNMTIKNMGDSIREIFEMTGFLNLMMQEERFVVIRKLEQDDIVLMLNGQMHSENVAIISKELSEIKEHETKADKSVTVILDMEKLTHISSSAIKQLKQVIEDTAWKKRKLKIQNASTDIKAALRENGLGEIV

SEQ ID NO: 91129 - protein, 297 aa, Unknown
  Obtained from environmental sample
  DOMAIN (22)...(207): DEAD/DEAH box helicase
  misc_feature (1)..(297): Xaa is any amino acid
MLSLPFHPLINAWFLETYGKPTAVQEEAWPLIAAGENVLAIAPTGSGKTLTGFLSAISRFAEGTYSVGKLSVLYVSPLKALNEDIKRNLLLPLEGIQKRFEKAGEAFPAIRVETRSGDTPQAERRRFLSLPPSILALTPESLGIILLNPRGRQVLSTVRCVILDEIHAALGSKRGCYLSCQIDRLSLVAGNFQRIALSATVKPPEAAANLALGSDIHIRGSDKMSDPRQGIHIVSPTEKKEIQFKVLYESDSPESEGETYSGESGVERYGRRYTELIKFILGRIRAHDKKATILVFT

SEQ ID NO: 91130 - protein, 166 aa, Unknown
  Obtained from environmental sample
  DOMAIN (69)...(166): Glycosyl hydrolase family 67 C-terminus
  misc_feature (1)..(166): Xaa is any amino acid
MELQITQEYTGHQIDLCFLPWMWEDIMRYDSAHGEKSSIRELAEKRRESQDGIEGFSAVVNVGLDENWTGHTLAQANLYGYGRMAWNPAVTAKEIAGEWSVLSFTEGEAAHKTENILLKSYPAYEKYNAPFGVCFMVTPNTHYGPNIEGYEFSRWGTYHRADANSI

SEQ ID NO: 91131 - protein, 377 aa, Unknown
  Obtained from environmental sample
  DOMAIN (7)...(121): Glycosyl hydrolase family 67 N-terminus
  misc_feature (1)..(377): Xaa is any amino acid
MLKEYDCWMQKRKISTGVKVPNTVFAGKGGEVFEQAVKEFAGGIERLLGFTPNVSRKADANKSAVFLGLVGVKGGVPFCCEEDGADSCKLTENGFVIKVTDNKIFITGNDESGLLYGVFRFLSLLALGQIKEGFKLCDSPVSVLRMINHWDNFDGTVERGYAGNSLFYKNGQFDFDKQRIEDYARLLASVGINRVSINNVNVRANAKLLITDEYLKEAAKLAGIFRRFGIRLFISINFGAPWSLGKLPSADPLDESVAAWWKKRAALIYKYIPDLAGFLVKADSEGEPGPFQYSRTHADGANMLAKAVKPFGGVIVWRCFVYNSAQDWRDKNTDRARAAYDHFMPQDGAFDGNVILQIKHGPYDFQVREPVSPLSAP

SEQ ID NO: 91132 - protein, 374 aa, Unknown
  Obtained from environmental sample
  misc_feature (1)..(374): Xaa is any amino acid
GQHASDSKNLVGIVKSLDNRPVTCALSPHANPRSLVGSPVDELVKITKKLAKDVDVLGLNYHEPLYQAYTAAINKPILGTECYEFYSSVGTNFEDVSAKNPWRFVLENNNVIGQFIWAGIDYLGESPWPVKGWTASILDICGFMKPNAFFRKSIWSNEPFVYLAFYDQERKPDYARGRWSFPSMASHLNFDHFHGRNVKAAVFTNCEEVELWVNGKKMGRRMLADFENGIIEWPLEYKSGNMEIKGFNKGKEVCSYVLKTAGLPQKIKLMPDKTKLRAGEIAHIEINITDKDGLPYPNDEFLVEFSLTGDGEIMGACSGDLSQNLGFTLPKVFTFDGRALAVIRAGDSSGDLVLRAYSEKLEKAELRFITEGER

SEQ ID NO: 91133 - protein, 280 aa, Unknown
  Obtained from environmental sample
  DOMAIN (149)...(253): Glycosyl hydrolases family 2, immunoglobulin-like beta-sandwich domain
  misc_feature (1)..(280): Xaa is any amino acid
MLGDAKNAHAPDFCDSTWKNVNLPHDWIISQPFNRGEQGGWTAQNMQGFFEWEGVCWYRKEFSLSRVGGKAVYVCFDGAYRNSKVYLNGKEAGGRASGYSSFEIDITEFVKEGKNLIAVRLDNGCEAPDRWYSGSGLYRNVLLKVLPVTHIKTWGVHADVKQNDVIVTATIVNRAKSAKGNIITQILKPDGSTAAKSTVPFDMNGKNEIAVKQKLIVKNPHFWSSENPNLYRAVVNLETGNEGMSTVVKFGFRTVKIEYKKGMTVNGKKIKLKGVCLHHD

SEQ ID NO: 91134 - protein, 517 aa, Unknown
  Obtained from environmental sample
  DOMAIN (195)...(300): Glycosyl hydrolases family 2, immunoglobulin-like beta-sandwich domain
  misc_feature (1)..(517): Xaa is any amino acid
DIHNEDYESEYLTSRLDASSLINIAGRETESLNGRWNFAADLYDTCRRAHWYRDERFDKDGREMPLDYDWEGWDRITVPASWNMEKPELHYFEGSGVYTRTFRYIPKISGERLILRFEGVAYRATVFLNGKIIGTHDGASTPFNADISDAVKTENRIVVVADASRNHARIPMENTDWFNYGGIYRDVYLVRLPPVFIKDWFVRLAPDGTYSNILADVTVVSAVNDREMVNGTVFSNGTAFVEIPELSIKQEIAIKDGKGEAKIPAKPELWSTDNPKLYDVSVSFGSGDVVDTVNDRIGFREIKANGHEITLNGKKIFLSGVCVHEDHFVLGKTTTEEIIRQTIRDLKTMNGVYFRLAHYPHDARFARIADEEGVLLWEEVPVYWSVAFDNPDTYADAENQLSELVLRDRNRASVIIWSVGNENADIDSRLAFMSKLAQKAKAMDSSRLVSAACLINHEKLLIQDRLTDFLDVIGINEYYGWYSPNFDHLPKIFANSNPGKPVLICEFGADARLDSGE

SEQ ID NO: 91135 - protein, 387 aa, Unknown
  Obtained from environmental sample
  misc_feature (1)..(387): Xaa is any amino acid
MKRKLISSALPYVNNVPHLGNLIQVLSADVFARFCRLRGYETLYVCGTDEYGTATETKAAEEGISPRELCDRYFKIHNDIYRWFHIAFDRFGRTSTSVHTEVTQAIFNKLDAAGFIVEREIEQLYCSSCGRFLADRYVRGVCPACGSANARGDQCEDCGKLLDPTELKDPKCSSCGNVPKIEKTKHLYIDLPKIKDLLEEWLKTASIDGFWANNAIQMTQAWIRDGLRERAITRDLKWGIPVPKSGYEKKVFYVWFDAPIGYISITGNIGEERGGDWRSFVNYWWKSPGETELFQFIGKDNIPFHTVIFPSSLLGSGEKWTMLHHMSSTEYLNYESGKFSKSRGVGVFGTDVMETGIPADVWRFYIFYNRPEKSDTLFTWKDFQEKV

SEQ ID NO: 91136 - protein, 605 aa, Unknown
  Obtained from environmental sample
  misc_feature (1)..(605): Xaa is any amino acid
MKKSKYISFFIIFFIFAGGLCLSCKAKKSLPDPEYIVAVSSGILNKNSPVIIEFKFGQDTSAPLASNAIVLSPKVKGTVSWQDEYTLVFTPSESYKQGQQYNVNVNIGTIPSFSFTFSAALPVFFVELEPIQLGDDDYVVVAGKVNADEDAEISKIEQTVSSKELGKISWTHTDGVHRFVFEPAKRGEASRTVEVTWKGKPLGTDVDGFTTVMIPGLDIFQMLDIQFNNNIIEVSFSKNLKSNQDLRGFISLANNTDVRYSLEGNIVKIFGNNSGGIPAGAELVIQDLVDVDGKRLSTPVQYTIPDSWELPEIRFAGNGAILPTSQGAQLVIETRNVTGILVEAFQIYNQNMIQFLQVNNLAGTSQLDRVGEPVWTKAYDFQWAAADQNRWVRRGLDMAELSKKFPGGMFHIRISFRQRHVKYVCTQNHKNFSGLNFPNDSFSPYSTTENSESSYWDNYENSDDYEWYNYRRDPCHPAFYVNMSGHNITMSRNVLVSDLGLLAKRSLDGSWVIATTNFITARAAPNTDYKVLTYQGRVLHQGKTNATGIATIPASSDTASGSRLFVYAESNLGRAYLRINDSLALSVSHFDISGGTPSSGVRRLI

SEQ ID NO: 91137 - protein, 289 aa, Unknown
  Obtained from environmental sample
  DOMAIN (1)...(85): Fibronectin type III domain
  misc_feature (1)..(289): Xaa is any amino acid
SPPLITVRGGDTKITVTWAQVHGVKEYKLYYNTTDTFSNSTLSAGSPVLSAAPENTAEITGLSNGVTYYVWVVSSNGAGSDSDPSPSASALTAAKPPIDFNNTRFVLGNSAAEFAFAQDLPVSAFWPEGRPGTDRLTRVQETALGNLFADGAAWYLRNKQNKTIDFVFINGGYIDNALLKGSVTVGNLMGIVYPGSRSEDKFVILTIKGADLKKFFYNPAREVSLAAWNETEDVAGVSHTGRGSANTGFFGVVSKEVRYTLEYPQAPPPGTVLNDDSSQPYYHGRIKPG

SEQ ID NO: 91138 - protein, 395 aa, Unknown
  Obtained from environmental sample
  DOMAIN (44)...(147): TonB-dependent Receptor Plug Domain
  misc_feature (1)..(395): Xaa is any amino acid
MRCFFPVGLFCFLFIFSFSIYAQTNSGEGENDEAIILPEVEVSATKDTPETVTREEMDRAGTRDLWESVRDVPGVFLSDGGRRNDSNFTVRGYGADSVPLYVDGVPVANPFRGEGDSARILTGDLESIEIKKGYSSQLLGANALGGAVLMRIAKPKKPLELLLRTTVDLDGLLNYGGISTTAGVGSKQNTFYAMGTLQYRNTDHFRLPEKFEPYPGSIQGKGNRLWSDAQDLKITCMAGLTPMPELDIWTTYICQDADKGVSPPDTGGSYSIWKWPFWRRHTVSLNSTYTADKLSLSGLVYFDKYDNRLEEYLNKKAFELGIHTPWSDYDDYSLGGRFTGEYIFAEAHILAAALTWKLDDHRGLRGTLLNTDMREVMHAREIIPSGGIEYAGKPF

SEQ ID NO: 91139 - protein, 760 aa, Unknown
  Obtained from environmental sample
  DOMAIN (419)...(454): UvrB/uvrC motif
  misc_feature (1)..(760): Xaa is any amino acid
MNGMFTDRVKKVMQIAREESVRLGNDYVGTEHLLLGLIKEGDGVAVAVMRGMGIDLEDLSANIEKTITSVGGMMLAGQMLPFTPRAKKVLEIAANEARSMSHKYIGTEHLLLALMKDTESAAAGALAAAGLEYDHVKEEIGRVLKGGEVSGTPATSKEKSKTPMLDHFGRDLTAMAREGKLDPVIGREKEIERVVQILSRRKKNNPVLIGEPGIGKTAIVEGLAQKIIEKSIPQVLENKRVVNLDMASMVAGTKYRGQFEERLKALMLELQKNDNVVIFIDELHTIVGAGGSEGSLDASNIFKPALSRGEIQCVGATTLDEYRKYIEKDGALARRFQTIMVDPPNVNETIQILAGLRHNYEEHHKVTYSEKAIAMAVKLSERYISDRFLPDKAIDVIDEAGARKRLSSMEIPTEIREIEKEIAEVLREKETAIEHQDFESAAKLRDMQEKLNGALLEAKALWRRAKAEERLLVDESTITEVIATMTGIPLARLAEEEAKKVLHLEDELRQRVIGQDEALSAVARSIRRSRAGLHNTRRPIASFIFLGPTGVGKTELAKAVAKALFDTEDALVRIDMSEYMEKFAVSRLVGAPPGYVGYEEGGQLTEKIRKKPYSVILLDEIEKAHPDVFNLLLQILDDGLLTDSYGRHVNFKNTIIIMTSNAGSRDVKKMGTVGFGRNSADTDYEAMRGKVMDEMKRIFNPEFINRIDETIVFAPLGKDEIAKIVDIQLNEVQERLVDRNIKLIFTPEMKKLLVDKGYDP

SEQ ID NO: 91140 - protein, 425 aa, Unknown
  Obtained from environmental sample
  DOMAIN (236)...(425): Adenylate and Guanylate cyclase catalytic domain
  misc_feature (1)..(425): Xaa is any amino acid
YCITKFPVETIELKAGAYLALPLSEEEIIRIPIDNQGRTLIPYVETYKDNNRRIPLHTVVSAKTDEDVFDTVVTSLNNRIALMAEISTEQKDFGPTPFERLFPLSGTHTAVISGILKGLEKRSFIGVVPPFYKILTLLLFLVCAFLICGVKKDARFHLGFFVVLLAFSALTFILWQAAAIYPWYALPVIMLLLFWAGSFLLRLVGRYQEQLLLQNALSRYFPSALAQRIMRERKTELIPSYKDLTILFSDISGFTKWSSDKNPELVHSFLNDYLETMAGIIFANGGTVDKFMGDGIMAFFGDPFTMPDHCERCLRAAIEMQRRIRLLAEKWKPIADIDLKVRIGINIGKVIVGNLGSKTRIEYTVIGADVNLAQRMESNAPVGGILVTAAVYEKLKDKFAFTEKRAVTVKGYAEPIEAYVAAVSG

SEQ ID NO: 91141 - protein, 76 aa, Unknown
  Obtained from environmental sample
  DOMAIN (44)...(67): 4Fe-4S binding domain
  misc_feature (1)..(76): Xaa is any amino acid
VAKRGKVIIDRELCKGCLLCIRACPVKILEADTELNSSGSYPSKVVNTEKCIACGNCFEVCPDICIEVYELEGAEA

SEQ ID NO: 91142 - protein, 259 aa, Unknown
  Obtained from environmental sample
  DOMAIN (15)...(241): Pyruvate flavodoxin/ferredoxin oxidoreductase, thiamine diP-binding domain
  misc_feature (1)..(259): Xaa is any amino acid
MSEKVLMKGNDAIAEAAIRAGCGAYFGYPITPQNELIAYMAKHMLDRGRVFIQAESEVAAINMVYGASCAGARAMTSSSSPGVSLKQEGMSYAAGADVPLVMVNVVRGGPGLGNIAPAQSDYFQATRGGGHGDYRCIVLAPKSVQECADHTYMAFDLADKYRVPVIVLADGMIGQMIEGVVLPPEKEAPKRDWIVGNMAATHREARHITSIHLVPDKLESITKERFTRYETIKAAEIRYEDNNCAGADLVMVAYGTCAR

SEQ ID NO: 91143 - protein, 186 aa, Unknown
  Obtained from environmental sample
  misc_feature (1)..(186): Xaa is any amino acid
GIDIREPLRNWHTGSVYVKELPPAKNKVDTVIIVFDDDHDDLYPNRSTWYAEHKEESTLSFYSTNPFDDLIGPGVARSVYGGLALLFPPRDVPNIFRCAEASGVTGCSLQLTVGSMMFARERNVAFIAAKAPSLQMRTLAARFKKHLVWIPLSTFSTETLTRMRRFHVLNGKHVRAWASRFIGDEL

SEQ ID NO: 91144 - protein, 426 aa, Unknown
  Obtained from environmental sample
  misc_feature (1)..(426): Xaa is any amino acid
MRICPKLEMIPVIHGAEMFAREVRRLCSERRYDCVAVDIPALFQDDLAEAVDELPLISALIARGDSIIGGIDNPFGSFGIDYDPYGSGESPFSVGGVDEDGVDQNPYQGGVPLPGDIDYDDYDDDVYGYDDLPFCYYVPVDPCDAMIEGVRQARQRRIPFYCVGSPELRPPIPLASMPDEYAIKKIGFDAYTLLCRMAVGEMFREGGGAAAGDKSDTRHSLRGDILALYGETVREEAERIAAAIDGLRSRYSSVLAIVHISRFDAVVKRLSDEFPRREDTGGCVHESHTVLKRYINPDHLYFALSELPFVVAKSQIERQNPFAAPMDPTDAVKDLFIDTRENYYDRREQVVHLSPVRIQAALTYLRNLTVMSGRLIPTLFDIVEAAKGVGGNAYALRVLKNAKYYPFLPMADDDAVVNVGIDKISM

SEQ ID NO: 91145 - protein, 440 aa, Unknown
  Obtained from environmental sample
  DOMAIN (4)...(440): Hsp70 protein
  misc_feature (1)..(440): Xaa is any amino acid
MSKIIGIDLGTTNSCVAIMEGGDPKVITNTEGNRTTPSIVAFTDSGERLVGQVAKRQAITNPEATIFAVKRLIGRKFNSAEVKRDLDIVPYKIVKADNDDAAVEVRGKGYSPAEISAMVLTKMKQTAENYLGETVTDAVITVPAYFNDSQRQATKDAGRIAGLNVLRIVNEPTAAALAYGLDKGKNGIVAVYDLGGGTFDISILEIIDGVFEVKSTNGDTALGGADFDARVLHYLIDEFKKTSGIDLSGDKLALQRLKEAAEKAKIELSSKNMTDINLPFITADASGPKHLNIQLSQARLESLVEDLIERSIEPCRKALRDAGIDKSQIGEVILVGGQTRMPKVQKAVKEFFGREPHKGVNPDEVVAMGAAIQGGVLKGDVKDVLLLDVTPLSLGIATAGNIFTRLIDRNTTIPTKKSQVFSTYEDDQTAVTIQVYQGER

SEQ ID NO: 91146 - protein, 62 aa, Unknown
  Obtained from environmental sample
  misc_feature (1)..(62): Xaa is any amino acid
GLRAVSAERGQIFDPNLHEAIGQEAETELPPGTISREVQAGYTLYERLIRPAKVFVATAAPS

SEQ ID NO: 91147 - protein, 147 aa, Unknown
  Obtained from environmental sample
  DOMAIN (1)...(135): DNA methylase
  misc_feature (1)..(147): Xaa is any amino acid
LLKELDFWIINDIIWFKRNATPLLSKNRLAPSTELIWLASKTKNYFFDYETAKEINGGKQMKNLWEIPAERHITEHPTEKPETLLERIILLGSKIGDTILDPFMGSGTTGAVSKKLARNFIGIEIDNNYFNIAKKRIEKMPIENSLF

SEQ ID NO: 91148 - protein, 211 aa, Unknown
  Obtained from environmental sample
  DOMAIN (77)...(158): Cache domain
  misc_feature (1)..(211): Xaa is any amino acid
MILRGIYDNSIPSFMSSTNNFILNHLSHEGIIGIHGIFLSFDDIYIPNNNITLQNSYSPKETEWYNLAVSAKGKVAISEPYIFPYSSLSIQTFSRAIYDDDDGRLLGVICLDLDFKKITDIVLNFIFTENSYGFLLNKKLEIIAYTYYIPVDQLNSDDNELSFLFSDMKQGLNFSPYNSKNYMYEKSVVFFKVIYLGWHLGIVIPKNEYYI

SEQ ID NO: 91149 - protein, 474 aa, Unknown
  Obtained from environmental sample
  DOMAIN (32)...(304): Penicillin binding protein transpeptidase domain
  misc_feature (1)..(474): Xaa is any amino acid
MHLSIDLALQRYIEGLIAGNVDRYYSSRLTNGAAIVIDNDNGEILAWVGSADFNNSEAAGQIDGVLALNQPGSGMKPFLYAMALENGFMPTDVIADIPVNFGESELYIPRNFNSRFNGPILFRAALASSLNIPAVYLLYRLSVQNYSSLLFSLGFDSLEQSAQDAGLGLALGNAPVSLMELVRAFSVFPRDGVYIPLTWELDGERRKKRIMEKRIFSADTARLICSFLSDSSARVMAFGRARNFQTQFPSMFKTGTANQYQSIVALGATPKYTAGVWMGNFTGETVIGRTGSSIPAAIARDALVFLQSRQRGAAPDFSAPENWRMRRVCALSGMTPGDACLSVINEYQYHGEEGEPCTWHRMVNGRSEVVYPAEYQAWFTASVREGSLDYRSRPLEIVSPREGFVYLSSPGIGRDEIPVEVIGGNSDELRVTFNGQIFSVGRPFVFSLPRIPGSYTLLVQNGGEEEEVNFTVEP

SEQ ID NO: 91150 - protein, 211 aa, Unknown
  Obtained from environmental sample
  DOMAIN (1)...(97): Transglycosylase
  misc_feature (1)..(211): Xaa is any amino acid
MQLARLISDNAQQTGGGGLGRKIVETVNALRLEARFSKNEILEMYLNSLPFGFNTEGAASAARNFFSGELSMLSPAQIFCLAVIPRRPSLYNPLENPETCVKAAEELQAAFSKNKKLKDAWPLLAEINGEDWKYAASSARRFAYPFALPHLIRYINAGLTPDRKNPRGEIHLSIDLALQRYIEGLIAGNVDRYYNSRLTNGASIVIDDDNG

SEQ ID NO: 91151 - protein, 356 aa, Unknown
  Obtained from environmental sample
  DOMAIN (37)...(287): 7TM-HD extracellular
  misc_feature (1)..(356): Xaa is any amino acid
MGRVPGIICVCSFFASVIVIITNLNLNSDGLGDIRNFEVGKVADRDVIAEHSLSYIDNDATLMRVKAQENMVPAVFRYSENPGVEAIDSWNKFCDLADKLVTEGSSRSSRQLAIQAEYRDYFTNDTLNSLFNAPDRLAFRTYGLKVLDSVLEKGVFTMGYVDLGGYNPDLAELLVTRGDRVERERVSYSGITTIANAADAIIQAAESEQLPANFKAIAVPLLLPFIRENVFFSIEDSKLRVAQAMERVPAVMKHIEKGKRVIRKGFVITNEDIKDLQALNDAHQKKDPRSIIGLVLLLGLLYVLFLLLQEKLVMGREFSGNEKSLLFILVFLYLAGAGIVKNIAPAMNDVPLSLLL

SEQ ID NO: 91152 - protein, 159 aa, Unknown
  Obtained from environmental sample
  DOMAIN (43)...(142): Uncharacterized protein family UPF0054
  misc_feature (1)..(159): Xaa is any amino acid
MNRVMVYAAEIPLPEWIKSLKLFVLKVLLLLKKDKWDLSILLCGDKMIKDLNKIYRGKDEATDVLSFPLDESADFPSKEKRHSNRHMPGDIVISLDTLRENARRFQVEEDEELRRLLIHGILHLDGMNHKTNDEAEPMLQLQEHILAKLSKKQILGRSA

SEQ ID NO: 91153 - protein, 497 aa, Unknown
  Obtained from environmental sample
  DOMAIN (124)...(299): Integrase core domain
  misc_feature (1)..(497): Xaa is any amino acid
MEKAKEILRLSLNMGLSQRDVASGTGCSLGMVNAVLARVKEAGVADPLSLDTKELGSIIYPPEHGGVKEEPDFPYIDREMKKKGVTLFLLWEEYKVRHPEGCMYSQFCAKYREYRKQNTVYMRKVYKAGEQMLVDWAGLTMKYSEKDGTEKTAYVFAAILPASSMLYAQTLADMKMESWIEGHVNAFGYFGGVPRLLVPDNTKTAVTKANRYEAELNKTYKEMADHYGCAIVPARPYSATDKAPVETAVQIVERRIIAKLRHTKFFSLEELGEAFRAELEALNDRPFQKQTGSRRSVFLSTEQHELMKLPARRYEYARFKQAKAGFDYHVAWDKEHYYSVPYQFAGKEVLIRSTSRTVEVFCEGERIACHVRSADPRKRFITEPSHMPENHRAVADWSPDRFISWAAKTGDKTKAYITWLLERKEHPQQAFRTCAGILRIGATVTPQRMEEACALALERNVYSYSHFTKLLENRKPGTPLIHENLRGKDYFNGGGHV

SEQ ID NO: 91154 - protein, 378 aa, Unknown
  Obtained from environmental sample
  DOMAIN (1)...(160): Glucose inhibited division protein A
  misc_feature (1)..(378): Xaa is any amino acid
MPCWITYTNLKTHEIIRSNIHRSPLYGGKITGTGARYCPSIEDKVVRFPQRERHHIFIEPEGLSTNEMYMNGASSSLPEDVQREFIRTIPGLEDARIVRPAYAVEYDYIDPLDLYPSLESKRISGFYSAGQTNGSSGYEEAAAQGLIAGINAAMKMLNRPPMILGRAEAYIGVLVDDLTTLGTKEPYRMFTSRAEHRLMLRHDTADTRLCPKGRDIGLVDDERWDIFQKKTEALDAIGELLSQRKFSPSVDKTGNEALLSHAGESLERCLTDTRLELADILPFAPELSAYPAEWLERARLDIRYAGYIEKENRAAAKAAKMDAIKLDPALNYAALTGLSSEAREKLKTVRPITVGQAARIPGVRQGDIALLMVLAAKK

SEQ ID NO: 91155 - protein, 435 aa, Unknown
  Obtained from environmental sample
  DOMAIN (1)...(59): Heavy-metal-associated domain
  misc_feature (1)..(435): Xaa is any amino acid
MHCAACSARVEKAIAKLRGVESASVNIATEKATVAFDPAVIRLSAIKETITGVGFTPLDASKEAAGADKIRREREIRILRTKFIVATVFGLPLLYIAMAPMIPWFTLPLPKTLSMMRYPLVYGLVQLILVIPIVAAGYKFYTVGFKNLAARSPNMDSLIAVGTSAAIFYSVYNLYRVVTGDFKAAESFYFETAGVIIALILLGKSLEAVSKGRTSEAIKKLMGLAPKTAITVENGEEKEIPIKEVMPGDIIVVKPGAKIPVDGMVTAGQSAVDESMLTGESMPVDKKPGDPVYAATINSNGVIRFKAEKVGGETALAQIIKLVEDAQSSKAPIAQMADIVAGYFVPLVCAVALAAGIAWFIAASIGVVDLPHGKTVTEFALTIFISVLVIACPCALGLATPTAIMVGTGKGAEYGILIKGGEALGTAHKIQTIVF

SEQ ID NO: 91156 - protein, 96 aa, Unknown
  Obtained from environmental sample
  misc_feature (1)..(96): Xaa is any amino acid
MNDLFRSLPAVDACLDALAGLPACRTAPRPLARRLVNDYLDLQRRRIREGAPLDPARLALPGCLPALKDFVSEGLRPRLRSVLNGTGVVIHTNMGR

SEQ ID NO: 91157 - protein, 95 aa, Unknown
  Obtained from environmental sample
  DOMAIN (19)...(90): Glu-tRNAGln amidotransferase C subunit
  misc_feature (1)..(95): Xaa is any amino acid
MQIDDKLLSYLEDLSCLTLSVNEKTRLTKDLQEILDYMAHLGEIDTNGVIERSHPFDNVNDFRDDEARPSFDRALILQNAPVRNDETIIAPKTVE

SEQ ID NO: 91158 - protein, 490 aa, Unknown
  Obtained from environmental sample
  DOMAIN (22)...(468): Amidase
  misc_feature (1)..(490): Xaa is any amino acid
MFELSALEISALIKTKKLSVAETVSAYIDTIEKNDKGYNAFLSVSKDKSLARAKEVQSQIDAANAAGEALSPLAGVPIAIKDNISTEGIETTCASKMLEGYTPVFNAAVIEKLEKGGMIVVGKLNMDEYAMGGSSETGAFGAVHNPWDTVRVAGGSSGGSAAAVASREIPIALGSDTGGSIRQPCAFCGVTGIKPTYGSVSRYGLVAYASSLDQIGPIGQNINDCAALLSIISGPDKRDSTCVIEKPFEFGEAKSKLEGVKIGLPRNYFASGIDDEVKTAVLAVSKELESAGAIIEEFEMPFLDYVIPTYYIIACAEASSNLSRYDGLKYGYRSSNAQSLSEVYRLSRNEGFGLEIKRRIMLGSFVLSSGYYDAYYKKALQVRALIKDAYTKLLNKYDMILSPVAPTTAYRIGENSGDPMKMYMGDIYTVSINLAGLPAAALPCGFDSAGLPIGFQLIGDAFSENKLIGAARVYQSRTDYHLQKPKGIKA

SEQ ID NO: 91159 - protein, 143 aa, Unknown
  Obtained from environmental sample
  DOMAIN (1)...(142): PET112 family, N terminal region
  misc_feature (1)..(143): Xaa is any amino acid
MKWETVIGLEVHAELSTRSKIFCACTTAYGGEPNTHVCPVCAGMPGVLPVLNRSVVEYAIRLGLALDCTITKYCKFDRKNYFYPDLPKAYQVSQLYAPICRDGHLDIETGGQEKNNQHTRNTHGRRRWKASTRRKGRWYVYGL

SEQ ID NO: 91160 - protein, 357 aa, Unknown
  Obtained from environmental sample
  DOMAIN (1)...(117): PET112 family, N terminal region
  misc_feature (1)..(357): Xaa is any amino acid
MEEDAGKLVHDAKGAGTFMDFNRCGVPLLEIVSQPDFRSAAEVIAYLEKLRETLLYLDVCDCKMQEGSIRADVNLSVRLEGAELGTRTETKNMNSFKAIARAIEYETARQIEILEDGGQIVQETRRWDDEKLESYGMRSKENAQDYRYFPEPDLLPMEIDDQWLAHVKANLPELAYQKRERYCRDFKIPESEAMILTVHKKICDLFETIARQSGQPVETAHLLTGEIMRLMNNANVLPEDLSIDANKLSTLISLVTNGKINRSAYKETLEAVFTRDVDPELYIAEKGLMMINDDNAVIEAVHAVMLDNQDSVAEYRAGKEKVFGFLMGQVMKKLGGKGNPDMAKKTLTEILRKGNGA

SEQ ID NO: 91161 - protein, 73 aa, Unknown
  Obtained from environmental sample
  DOMAIN (42)...(72): Sel1 repeat
  misc_feature (1)..(73): Xaa is any amino acid
MAENQPNSEVIKMYNKGNAAGMLSNFVEAFECYLSAADQGYAPAQCNLAYCYEKGHGVALNYQKALEYYQKAA

SEQ ID NO: 91162 - protein, 555 aa, Unknown
  Obtained from environmental sample
  DOMAIN (72)...(137): His Kinase A (phosphoacceptor) domain
  misc_feature (1)..(555): Xaa is any amino acid
MHLETIYYSFFNLICVLVLSLIVIALLIILFLRRANEKKKLEKLVHFQTRELEKRLQETTTELEFTKSESRSKSAFYINISNEIMTILNSIVGFLVTALDGNTSQKTSDSLSNIRINTERLMQIVNDIMDISKIESGEMSLKKNPFDMHELFAGCRTLVMPKAVEKGLLLHFYAEPSVGKKPVGDIVRLRQIFVNLLSNAIKYTNIGMVKLVSDILSIDDKSITIHFEVKDSGVGMSPEQIAEIFKPFSQMEKAYKNGSTGLSLFITKSIIEMMGGKLSVDSTPGIGSRFSFDLTFDTIDVAVDETAENRIYSKQIGKPSFEGEILICEDNYMKQEVIREHLTNVGLKTEVAENGLIGIEMVKNRLNKGEKLYDLIFMDMHMPVMDGLEAAVEIVKMGIKIPIVALTANIMVDDLDMYKTHGIVDCVSKPFTSQELWRCLLKHMTPVNKSGAQTESDTEIQESLEKYFVKANINKYDEICKCMEEGDIKQAHRLVYTLKGNAGQVGKNRLQSAAAAVEHQLADGTNSVTPDQMAALKNELDSALTEFQSLIDETV

SEQ ID NO: 91163 - protein, 273 aa, Unknown
  Obtained from environmental sample
  misc_feature (1)..(273): Xaa is any amino acid
MTDAEISAYISNNSEDFDAMFPTITATVNDNTLTLGDTTYTKSGGSTGPGTKPGTGGSSGGWTTANVGNSFDFVESDGNTYKANINAIAYGKGKFVAGGWNGKMAYSSDNGVTWTAVSDSTFGTGSYSRINAIAFGNDKFVAGSNGGKMATSNDGVTWTAVTNSTFGTNSIAAIAFGNGKFVAVGSGGKMAWSTDGATWTAVSDSTFDESIKAIAYGNNVFVAGGYGEMAYSSDCITWTAVEDSTFGTFDSDINAIAYGNGSLSQVEIKVKGR

SEQ ID NO: 91164 - protein, 290 aa, Unknown
  Obtained from environmental sample
  DOMAIN (1)...(149): YjeF-related protein N-terminus
  misc_feature (1)..(290): Xaa is any amino acid
AKEGNKNVAVICGKGNNGGDGYVAARLLQEAGINVDCFSVCNTKDLSGEASLAFKDYTGMENSAIHIITSNDKLPYFNKYGLVIDAMLGIGANGEPRGLYADVIKAVNACNAFVLAVDTPSGLDCDNGKCTSLCIKADCTVAAGFLKLGQFFYPGRANVGELQVADLGYPANIVEEQSLGIFLPDIIFFNRILPARKENGSKINHGLALLVCGSRGMSGSAALASVAALRCGCGMVHLAVPESLVDTLSAKVTEPVLHPLPETASGACAASALTEVLSLCERMDALCVGS

SEQ ID NO: 91165 - protein, 464 aa, Unknown
  Obtained from environmental sample
  misc_feature (1)..(464): Xaa is any amino acid
INIFRYFHFRCINPFKTPVVQASPDIKVKEPRVSRFVLFIIWLLTRLYLFLYFGITKVVLKGGNILVDAFKRALAGESRCIIAFRHPNGGEPQILTTYFLFKLKHYAAKMGVHFNRRPHAVFAYGYDVLRWGGWVARYIMPNVGGMPVYHSKMDSKGISRLRKTIVDGPYPLAIAPEGQITYSADTVSRLEPGIFRIGFQAVQQIKDKNMNCPVEVLPVSIHFRFGIIGKRSKERLLRKIEGYCGLPKKTRKLPLAERLILCREHILEVNEKRYNIANDGSLSFNERLDRLVNAALETAERMLGIKGERDSFSRMHRIRQICWDRIYLPGVDKLNHLSYIQRNAADIGAGEAWYIARHQELADFCLSFRNEPPTEESSLHSKVEYIQNLWNFASRTMGGAVEDKNNIFIRKVIIQPGPAINLSEYLSDYNKDKKATVAAVMSKLEKAFLDCIDVADKTEKDRYQ

SEQ ID NO: 91166 - protein, 89 aa, Unknown
  Obtained from environmental sample
  misc_feature (1)..(89): Xaa is any amino acid
MGLSMQEKKALTREISKRYQKAEKKEKTKILDELVKTTSYNRKYILHVLANWGKTSIVRMDGKAVELKASPKKRRKGGGRKPKYTGNFM

SEQ ID NO: 91167 - protein, 360 aa, Unknown
  Obtained from environmental sample
  DOMAIN (2)...(299): Serine hydroxymethyltransferase
  misc_feature (1)..(360): Xaa is any amino acid
MAKWNETTFYNLTDDQWKELKASLGNQRLLGLDYYSGGHLTHGYRNNLSSRMFEVHGYSVSEKDGLLDYDDIEKQAMELRPLILLAGYSAYPRKIDFKRMREIADKAGSVFMVDMAHFAGLVAGKVFTGEFDPMPWAHVVTSTTHKTLRGPRAGIVLSTSEFAEALDKGCPLTMGGPLPHVIAAKAVAFREASQPEFKKYAQNIVDNCQALATSCIENGLNVLTGGTDNHLILINVHKNSLTGRQAESALHECHITLNRNSLPRDPNGPWYTSGIRLGTAAVTSLGMGKAEMKELGALIAEVIKGTTQPPDKKDPSKKSKAKYEINAGVKDKVIGRVKILLDRFPVYPELDLELLKKAFV

SEQ ID NO: 91168 - protein, 406 aa, Unknown
  Obtained from environmental sample
  DOMAIN (80)...(163): Helicase conserved C-terminal domain
  misc_feature (1)..(406): Xaa is any amino acid
MKDIKDINKYEKDIIEDINNLKNLLDELEKFSLAKDFKLKRLIEAVEEHILDADGSQKALIFTAYGDTAEYLFSCLRVYFGNRANVECVTADTKNTDDILKRFSPKTQKASEEQLKNPVNILIATDVLGEDRNLQDCDFVINYDIHWNPMRIVQRLGCVNRIGGKDKVVRCVNFWSSNNIDEYLEQPERIETRLAAMTIAGSEISVGVIDNNGKKDRAVALERERIKKNLRMMHDNIEDIEPENFGLSHLSLEVFRQDLTKESVERYKNQPHGIYSGFKAERQGVIALLQHRKSNDKKIVFINENGEEILSSQQEILQFLHENKNEQRHVPTLIEAGDSAEIDKLSQALRKWLESKISAEIKVVMDSLFAGGQAALDLSAKQKKYLEDTLAPDNWDLICWEVVGME

SEQ ID NO: 91169 - protein, 217 aa, Unknown
  Obtained from environmental sample
  misc_feature (1)..(217): Xaa is any amino acid
MTDGLKRKHSSGIFEQKELEEIVVFEEGNQKFIENILKTKIKLKGDDDEIYLMSEVDSRETALSKASSGQQETVFILMFLNMLGKYYYTQSNPRSVFIEEPEAHLFPSGQKDIVAFIAQKYNILKETKNDKKTPVRFFITTHSPYVLNVVNNMLKKGELVEKYSQYIEKINSEIDLPHLSEKELSVIFIKNDYTIRNMLDNDEHLISSDEINEISFS

SEQ ID NO: 91170 - protein, 341 aa, Unknown
  Obtained from environmental sample
  DOMAIN (261)...(331): TOBE domain
  misc_feature (1)..(341): Xaa is any amino acid
ANIVVEDKEFVVLVGPSGCGKSTTLRMVAGLEDITEGELIIDGEQMNDVPPKDRNIAMVFQNYALYPHMSVYENMAFGLRIKKVPKAEIDKRVNEAARILDIEKFLDRKPKALSGGQRQRVAVGRAIVRNPKVFLFDEPLSNLDAKLRVQMRAELSDLHLRLNATMIYVTHDQVEAMTMANKIVVMKDGKVQQIGSPLFLYNHPVNKFVAGFIGSPPMNFLTVKVQEEGNSIVLDESSFKIKADGAHIDYLRKYAGREVFFGIRPEDLIYTESSGGGIKSKVTVVEPLGADIRLWLTAGSHSLIALAEPRHFFSVGDTAEFIPKMEKARYFDKETESAIIP

SEQ ID NO: 91171 - protein, 96 aa, Unknown
  Obtained from environmental sample
  misc_feature (1)..(96): Xaa is any amino acid
MEYPENCIVKKGYFPETTKNLEDKFAFVSLDADLYQPMLEGLKYFYPRLEKGGYIFVHDFFNADFPGVKKAVEEYQNIEKLYYVPLGDNMSIAIVK

SEQ ID NO: 91172 - protein, 265 aa, Unknown
  Obtained from environmental sample
  misc_feature (1)..(265): Xaa is any amino acid
MQPAKYNKYAFRSRVSENKFRHLVKCFALDTDATRAAIHSGLSRVTVNRYYMAFRSAIYINLDRSRIESGAVELDESYFGAKRIRGKRGRGALKKTIVFGIFERGQKNKVQVDIVPDVTSESLVPIISERIAKNTIVYTDGFKTYYGLPELGYKRHYKVNHGADEFSRGKVHVNGIESFWAFAKRRLIKFCGVAERFFKLHLAECEFRFNLGSWENIYKRLLQMFLDDPLFTVSKPKKFVPKNPMTFSRFRKVINITKKRTQFLR

SEQ ID NO: 91173 - protein, 148 aa, Unknown
  Obtained from environmental sample
  DOMAIN (10)...(142): MgtC family
  misc_feature (1)..(148): Xaa is any amino acid
MTEIDFVIRLCLAFAAGGIIGIERSSRRQVAGLRTHILIAIGSCCLMMLSIWLPQQLSVGDPGRIAAQVVSGIGFLGAGAIIRLGSNIRGLTTAASLWLTAAIGLTVGAGMFVTALTAEILALVTLIVLHKVENKIFPDDWVNKEKEK

SEQ ID NO: 91174 - protein, 344 aa, Unknown
  Obtained from environmental sample
  DOMAIN (137)...(284): Exonuclease VII, large subunit
  misc_feature (1)..(344): Xaa is any amino acid
MFRNKLKSLTFEPKDGMLLRVRGALSVYAPRGTYSIVCEEMEIAGAGEILAMLEKRKQKLAAEGLFDTEKKRPLPRFPQTVGVVSSPTGAAVRDILNILSRRASGIKVIILPTPVQGDEAGTFIAARIKQANLWRLADVLIVGRGGGSLEDLLPFSDEKVVRAVAESKIPTVSAVGHEIDWALCDFSADLRAPTPSAAAELVSENYFAVRNFIQKITEGFTTVMRTRIERAKLLLKPFDPQDMEYRFRSILQPRLIRLDDAKEELINAVSDKCAIIRKKIELAAAILETASPLAVMERGFSVVTNSSGKIIKSSDNVKTGDKLHIRPLKGKINAIVESAEKTRS

SEQ ID NO: 91175 - protein, 93 aa, Unknown
  Obtained from environmental sample
  DOMAIN (18)...(81): Exonuclease VII small subunit
  misc_feature (1)..(93): Xaa is any amino acid
MAKKSARAISDAKSGGTKSFEEQLGRLEKLGEQIKRNDIPLDEALAAFEEGIRLARSLEKSLEKIENRIEILMNSTEALADDSPELELFNAGE

SEQ ID NO: 91176 - protein, 310 aa, Unknown
  Obtained from environmental sample
  misc_feature (1)..(310): Xaa is any amino acid
AVYVEIDPSLADFNIHPAKREVRFRDPGAIHQAISGGVKNFFHSLYLKNSINGELESEDKQSYRERRGYQNSGESCDGYSQKGEKEFSFTYNKNNSEIKRNTEEYEKFTDFVSASLRNRENSSSNVSAPAYGDMRYAGRIFDLFVLMEWGDKLYIIDQHAAHERILYNKFLEEPIPKQELLAPITFTTESDEEDAFLSANSGELSRLGVVIKKDADTWSIEALPADWRMGDSQTVKEILELRQAGENMAKRWAATCCCRAAIKDGDILGDETAFELGREALLLPDPRCPHGRPVWTEISREALFKAVRRE

SEQ ID NO: 91177 - protein, 293 aa, Unknown
  Obtained from environmental sample
  misc_feature (1)..(293): Xaa is any amino acid
MQAIVVPEMKELRQSSNSNISEIIRQDIDNFNKETAVYRRIKRIHISSEELPKTRLGKIQRFCLPSLMEQAKVKVKEDDTHRSKVYQLLKTFIASEIGETPSANDHFEIDLAMDSLCRVALLNYVEISFGVIIKEEQLDFLNTLEKLTEYVEQNSPEILAHKEVSWKEILSSKMPAIKIPRPGIIHFATDTLSKISFRLAYRFRGKGEENIPKTPCIIAANHRSGLDGLIITAFLKHKTARNTFFFAKEKHWRTGFARFIAGKNNVLLVDINSNVKESLQQISYVLQRGKNVI

SEQ ID NO: 91178 - protein, 578 aa, Unknown
  Obtained from environmental sample
  DOMAIN (17)...(295): Periplasmic binding proteins and sugar binding domain of the LacI family
  misc_feature (1)..(578): Xaa is any amino acid
MPDTNNLGNYGAAERKRLTVGFFVSELENAYAQTLCRGIMDAAAAADANVMIFPGKSPKVPYDYRYQYNSIYMLANKNTIDALILATGTMVNFLSDEEFKEFYGRYRDIPLVSISIPIEGVSSVLIDNKVGLRGVLEHLVADHGYGRVAFIGGPESNVEAKERYGVYQDVLRENGVPFDPELVAVGDFTKYSGVRAVGEFLDVRGVKFRALAAANDEMALSAMEELQRRGYRVPEDIAVVGFDNVESTHFSSPTLTTVAQPIYEQAYKAVELALGLIDGKSPTIVALPTSMVLRESCGCFSRSVTSVSAAQEDAALHVTAADGDEDTAKIEALLQKALGYAVAGKLDDAADLEILKEMNEVVGAVENHRQMNLRLWQNTLTNFRAKVGIKTHGLDTVVSIEDFFHKMRMLLLETYFKNDSRRWSIYINDIVGLRDVLSQLIRDVNNPNEALRSIVPNIRDMGISDFYVFLHYALERHSINTDWCFTSELYLAVTDDKRRPESVEIRGQSMPVASILDRGLYPKDRRYTFVVSALFYMDEHMGFVVCEPDFVDIHLIESLMVEISCSLKLINLIQARRT

SEQ ID NO: 91179 - protein, 324 aa, Unknown
  Obtained from environmental sample
  DOMAIN (17)...(322): tRNA synthetases class I (C) catalytic domain
  misc_feature (1)..(324): Xaa is any amino acid
MIKELYLYNTATAEKELFVPKNNPVAIYCCGPTVYNYAHIGNLRTYVFEDVLKRVLIWLGYGVRHVVNITDVGHLTSDADEGEDKMESGAAREGKSVWDIAALYTERFMADIVSLNILQPDLWPKATEHIPQMIALVKALEEKGFTYRTGDGIYFDTAKFPSYCDFARIDPSSLRAGERVDMGEKRSATDFALWKFSPAGGKRQMEWASPWGTGFPGWHIECSAMATARLPQPLDIHCGGMDHIRVHHTNEIAQTEAATGKKCARYWMHGEFLVLDKGKMAKSGGNFVTLSTLKEHGVSPLGYRMFCFTAHYRTPLTFSFEGVL

SEQ ID NO: 91180 - protein, 529 aa, Unknown
  Obtained from environmental sample
  DOMAIN (398)...(529): Beta-galactosidase trimerisation domain
  misc_feature (1)..(529): Xaa is any amino acid
MKLAGKTDKVLYGGDYNPEQWPKEIWKEDMRLLTLAGIDIVSINIFSWAALQPSEDEYNFSVLDGIVETVSVAGMKICFGTGTATHPAWMARKYPEVLRTNTDGSKRKFGDRQNSCPNSNIYRLYSSRLARKLAERYGKLENLAAWHVSNEYGGYCYCDNCQAAFRKWLIKRYKTLEALNEAWNTSFWGHTYHDWDDIVIPSHLGGEWERNRTSCQIQSIDYRRFYSDSLLECFLAEVNVLREVTPDIPITTNMMGTFWDLDYFKWGKHVDFIAWDNYPWTDCPYTRTAMNHALMRGCGNGKPFSLMEQTPSVTNWHPYNALKRPGIMRLWSYQAIAHGSDTVMFFQMRRSRGCCEKFHGAVIDHYATENTRVFREVAFMGEELKKLGDVFLDSVLVSEAAVLYDWDNWWATQLSAGPTIDMNYPEEVYRYYDAVAKQNISVDIIGVDTPLEKYKVLFAPVLYMIKPGYAEKLKAFVSNGGVLVTTYFSGMTDERDLVTQDGYPGELRSLCGIWVEETDALTPGKTNGF

SEQ ID NO: 91181 - protein, 682 aa, Unknown
  Obtained from environmental sample
  DOMAIN (2)...(458): Bacterial DNA polymerase III alpha subunit
  misc_feature (1)..(682): Xaa is any amino acid
IDVKDLPQYLPEFKIPEGFTEPNEYLRHLTAEGLEKRYAKVKENDLNKWEDIKKRADYELNTIISMGYTGYFLIVADFINYAKEQDIPVGPGRGSGAGSIVAYSLRITNIDPLKYGLIFERFLNPERISMPDFDIDFANEGREEVINYVTNKYGKERVAQIITFGTLGAKAVIKDVARVLGISISESEMITKLISFNPEITLEKAKEDEPRLKDMEKDPRFTELFAIADKLEGLNRHSSIHAAGIVIGKKPLIELVPLFQEREEKGGNIATQYSMNFLEECGLVKMDFLGLRNLDIIKYTQELIRKRGSKYLNFNIEDIPEDDKKTFKMLGEGKSNAVFQFASDGMQDILRQTKPTSIEDLTALNAMYRPGPMQFIPRFVEAKTGKAPITYPDPSLEKVLKETYGVIVYQEQVMEVARIIAGYSMGQADILRRAMGKKKKEIIDEEKIPFLEGAAKQGFTAQKAGAIYDILVPFAGYGFNKSHAAAYSVLAYQTAYLKANFPLEFMAACLTNEIHSADKDRLSECITEARRMGIEVDPPCVNNSDKVFTVVNGRIAYGFLGIKGLGESSAQEIVNGRKDGPYKSFMDFLDRADIKAVGKKVIELLVQTGAFDSFGITRETLAGNLERAVEFALKKKEDKLKGQTSLFEDSNEPEFGEFEFKEFPAKSREERLNLESSLLVFI

SEQ ID NO: 91182 - protein, 937 aa, Unknown
  Obtained from environmental sample
  DOMAIN (866)...(935): OB-fold nucleic acid binding domain
  misc_feature (1)..(937): Xaa is any amino acid
TGDEMAEIFAEYPQAIENTVKIARRCNADVPKIETKDLPQYLPEFKIPEGFNEPGEYLKHLTAEGLEKRYAKVKESDLNKWEEINKRADFELNTIISMGYTGYFLIVWDFIKYAKENNIPVGPGRGSGAGSIVAYSLRITDIDPLKYGLIFERFLNPDRISMPDFDIDFANEGREEVINYVTRAYGKERVAQIITFGTLGAKAVIKDVARVLGISIPESEMITKLISFDPEMTLDKAKEEEPRLRELENDPRFTELFAIAHKLEGLNRHSSIHAAGIVIGKKPLIELVPLFQEREEKGGNIATQYSMNFLEECGLVKMDFLGLKNLDILKHSQELIRRRGGKYSNFKIEDIPEDDKKTFKMLGEGKSHAVFQFASDGMQDILRQTKPTSIEDLTALNAMYRPGPMQFIPRFVECKNGKAPITYPDPSLEGILKETYGVIVYQEQVMEVARIIAGYSMGKADLLRRAMGKKIKKVLDEEKIPFLEGAVKQGYSAQKAGDIYDILVPFAGYGFNKSHSAGYAVLAYQTAYLKANFPAEYMAAALIVEIKSTDKLLSSIVEARKMGISVDPPNINYSDKLFTVVDGRIVYGFLGIKGVGDAPAEEIVRGRQNGHYKNFMDFLDRVDIKTVSKKVIELLIHTGAFDDFKVSRETLAGNMEKAIEYAQKGKEDRQLGQSNLFGDSTESGMPDFKFTEFPPVSKTDRLNREKDLIGFYFSGHPLDEYKEIWQDVVTVNLGQIDTYKTGGCVLVGIIKNIKQINTAKGGKMAFATLEDYNGEIEVTFFSGPWERCQNIIKDDSVVILKGKIDYQKDKDKYSFLADGVISKQEVTTVVKEVKELEEKNKLHKNTWLYMADLKSSYILQAKKGNYTVIGYLKSLRDFKDKKGNDMAFGTLQDFEGEIDLVFFSKVYAECRHLLKLDEMIALKGSIDPENELKPGKV

SEQ ID NO: 91183 - protein, 305 aa, Unknown
  Obtained from environmental sample
  DOMAIN (1)...(285): Amidohydrolase family
  misc_feature (1)..(305): Xaa is any amino acid
MSRLLAQYGVTAFNPTLYPMESERMLEAVKAAVSAIGREDGAQIMGLHLEGPFISRERLGVMKAGTVHNVDLAFMKRLWEAAGGRIVNMTVAPELKGMRELALFCLKKGIVLQAGHTEAEYDNMVEGMQAGILHSTHLFNAMSSMKHRNPNAVGAVLIHPEMSCEIIADGFHIHPDLYKLLLRDKPVDRIVLITDALKPTEQVKGPLLANGEEVIFQDGVFHRKADNVIAGSALTMIKGVQNLVNFGFSLEEAVKTASFNPAQVMRYRNKGAIIPGYDADLVVFSRNFKMMAVLARGVIKKNLFE

SEQ ID NO: 91184 - protein, 133 aa, Unknown
  Obtained from environmental sample
  DOMAIN (25)...(133): Glucosamine-6-phosphate isomerases/6-phosphogluconolactonase
  misc_feature (1)..(133): Xaa is any amino acid
MRLLIHKSYENTNPLAWDYENASSWVANYIIKRINAFAPGPGKPFVLGLPTGSSPLGIYRKLIAANRNGKVSFSNVITFNMDEYLGLPADHPQSYKRFMMDNFFNLIDIKGENIHILDGMTPDPEAECRAYEE

SEQ ID NO: 91185 - protein, 222 aa, Unknown
  Obtained from environmental sample
  DOMAIN (1)...(150): Glycosyl hydrolase family 67 middle domain
  misc_feature (1)..(222): Xaa is any amino acid
MLAIAVKPFGGVIVWRCFVYNCVQDWRDKNTDRARASYDHFMPQDGAFDVNVILQIKHGPYDFQVREPVSPLFGALKKTRHVMELQITQEYTGHQIDLCFLPWMWEDIMRYDSGHGEKNGIRELVEKRREGQNGIEGFSAVVNVGLDKNWTGHTLAQANLYGYGRMAWDPAVTAKEIAWEWSALSFGKVKRRKQRRKQQKISFLNHIPLMKNTTPPSAFASW

SEQ ID NO: 91186 - protein, 544 aa, Unknown
  Obtained from environmental sample
  DOMAIN (36)...(101): His Kinase A (phosphoacceptor) domain
  misc_feature (1)..(544): Xaa is any amino acid
MALTLSALGIVLAAVLIIVLINVDKAKNKSDSENRHKSAFLANMSHEIRTPMNAIIGMTTIGKSASDIEHKNYSFTKIEEAANHLLGVINDILDMSKIEANKFKLSPEEFNLEEMFRRVVNVINFRIEEKHQKLTVDIDPSIPRTLIGDSQRISQVITNLLGNAVKFTPTDGAIRLAAYPGGEENQQYTLQISVSDTGIGIKPEHKEKIFLSFEQAECSTTRKYGGTGLGLAISKSIVEMMGGKIWVKSESHKGSNFAFTVKARRGTAKEKGALLAPGIKLDNIRILVIDDDPDILAYFDDIMRESGISCDTASSGEEALKLVEKKGPYHIYFADLKMPVMDGIQLTRELKSRGPQNSVVIMISAVEWSAISEESKKAGVDKFLSKPLFPSTIFEAINECTGAEKEQEEEKQAAVSGSYNGRHILLVEDVEINREVVQVLLEPTQLGIDCAENGVQAVKMFKEAPEKYDLIFMDIQMPELDGYDATRRIRALDIPEAKTVPIIAMTANVFKEDIERCLKAGMNGHIGKPIDLNEVMEKLKTYLT

SEQ ID NO: 91187 - protein, 759 aa, Unknown
  Obtained from environmental sample
  DOMAIN (478)...(622): GAF domain
  misc_feature (1)..(759): Xaa is any amino acid
MMSLLRITKTVFKKYAQVFAVFLAFALMVIFSYSFTSKKERVNLQDKVKDAISKTEANIKAELKEPETLLAGVSETLRAMLFDNRDADTVQGFIDHIDNYVQSESDKRMFGVIGFYAVFDIFDGKFMTGSKTWEKPENFDPKSLPWYTEAVKADGDIAITQPVVDKSSGKVSLSFSRRISDDEGHPFGVIALDIYLDKIKQEAINTRFTKDGYGFLLDDETEVIVHPEPWMLGLLLNEVKSNISAYSDELQRTGSVSEAVTADYRGIQSIVFMQRLYNGWYMGLVTPRANYFQSTKHLAVILSAFGVVFAVLLGWMLLTISAGKAASDERIQLMSDCNPIGMSFWDSNLHIIDCNKTTLDMFGLSSKKEYYEMFEELSPERQPDGSISRIKCYELLREAMGTGFLCFEWVHKKPDGELIPCEMTLVRTKYKKDFTIMAYVRDLREQKRIMRMMEWHTHLLDMVNSAATILLSSNNAGSFESSMMRSFELVGHCLDVDRVQIWRNEMIEDEMHYVLRYEWLSEYGKKCKSVPIGLHFPYSMKKEWEELFLYGDHINTPLKDMSPEDQAFLGYYEMKSIVIIPMFLEGEFWGFFSIDDCRNERVLSGEEISILTSAGLMMSSAVNRNLQMNKMREADERMHIMIDAAPLCAIFWDKDLNPIDCNQETIKMFELSSKQEFIDKFGLLSPEYQLDGRYSREKSAELIRKTLEEGFSNFEWMHQKLNGEQIPSEITCIRVKYKDEYTVTGYVKDLREQKAKLAE

SEQ ID NO: 91188 - protein, 553 aa, Unknown
  Obtained from environmental sample
  DOMAIN (67)...(298): Glycosyl hydrolase family 3 C terminal domain
  misc_feature (1)..(553): Xaa is any amino acid
MPGLGDHNDKKIVEAVKSGAADESVLNKTALRLVELILKAQENRRENYQYDKAAHHALASKVALESAVLLKNDGDVLPVKQGQSLAVIGAFAKTPRYQGAGSSKIVPNKLDNACDAFNASGFSFDYAQGYVGINPDAALIEEAVSIAKGKDKVIIFAGLPDEYESEGFDRVSFDMPPSHNKLIEAVAAVNPNIAVVLQLGAPAALPWAGKVKGILSAYLCGQAGSGAIVDLLLGKSSPSGKLAETWPFSIEDTPCYHYYPGGFRSADYRESIFVGYRYYDHGEKPVAFPFGHGLSYTTFAYSNLKLSSASFFSGDRLEVSFDVKNTGNSSGAEIAQLYVAPKKTVIMRALKELKGFEKVFLQKGECRTVKISLDARSFAYYNVPKGTWAIEGGAYEILVGASSRNISLRGEVQVTGDGYETLLKDQRKNAPEYFNMGAKGLKISDASFEALYGQKLLSSKREAGQFDANSTLGDIKHTAIGKKLEAYIFQQIAEVFSGADDLRVMAERQFVEMPLRSLPMFSGGKVTPSMMEALVDVLNGKPCSDPGLAGFLG

SEQ ID NO: 91189 - protein, 678 aa, Unknown
  Obtained from environmental sample
  misc_feature (1)..(678): Xaa is any amino acid
VDFILDRTPPDIELSSHNVGDIITGSVTLKGAASDPNGIKIIEYSVDGEKYVSLSGKAKGSSTSLDFTLSINTKALPDGPVVYYFRTVDMTGVAAVKPYLFFVTNSGPELEVYSPVQGEDVFGTFFLSGRAYEKTGLSKLYYEWGAVKEDIEMRPGDPYWYVALQTGKDEAGKPRPPALKVIAVDKVGNSKSITCKLDDRRKVKVPVLVIDYPTDAMLKAMQKNGMPPDTAIYGHIAPGAEPLSVSVEGYGEVEALPSFRIDPHMMPPDKKAQILKLTPVDGASVRGMTVNLRYLKLSPSQKDESRITVVQPEKNSWKSGDAFTLQGSITGQAGMQIEFRLNPQDVWQPLRVDLQGGFNARIDMPERPQGPVHLELRTVQFGVDNFPIYHPFNWAASQPEIKIISPVGERSLVWGNKTVTGLIEHEVPIRNVAYSLDQKNYTEIPFVSRVGKAWFNYFCDFNTLGKTKNGQLSFRVTDASGISADIIPEYTIEPDPPVPTIIVNSPADEETITSHFEISGLAYDDVGIYGVYWRLLGPRLDSISKTPAGEDARRAAVVFATVRNVPFQELLTEQNFSIPIDFSVVTDGEYTIEIYAADIYGVRSETISRKIRVSTAPPQTDVVSPPITRYNRKAIMVKGYSSDANDIEEVLFSMDNGSTFQKVNLARDGNWDLALNTA

SEQ ID NO: 91190 - protein, 526 aa, Unknown
  Obtained from environmental sample
  DOMAIN (42)...(182): GAF domain
  misc_feature (1)..(526): Xaa is any amino acid
MARARDFAAAPKKNPAADGALRIDGAASSTDTISLLNVGGDGVNVQLKSMLFFMRYNFKGLTASAFIYDPAKKSLVLNCYDTKGGVLIEENAQIPFGAGVIGKAASDNKLFMSGDLSLYQGGELPYYAKNEGVCSMLAAPIVAESSKELIGVLAVDSINKNAFTEHDKELMRRFAIIAAALIVNIRMRVSLEHAAKTFNALYELSHNLSVALKPEEIFRAILDIVPKAASACSRLIIVVHDRERNSLRLQHIGGAAGELAEGMEFSTASGGIYAYAFNKGCPVNIGDLQAKRNYRFAPEEPENPQVRSLLVVPMIGGEERRCIGLFSAESATPELFRPELEQILNTMVENASVAVTRSMLYLKMEKLATTDGLTGLHNHRTFQEIAAREFERAKRHGRPLSMLLTDIDHFKNFNDTYGHPVGDLVLREIAGCIKSAVRTTDFPARYGGEEFAVVLPETAEQSAMAIAERIRQTVEARVIESGQNMLRVTISIGCVTFPTYGTTQQEIIDCADKALYASKKGGRNRV

SEQ ID NO: 91191 - protein, 146 aa, Unknown
  Obtained from environmental sample
  misc_feature (1)..(146): Xaa is any amino acid
DAASLAHALPIRYATLVKEHMFHYTDEWSDAAVRRFIARVGVENLTNVYRLRRADAYATAAIEPGSGFLLPLADRVEKILNEKQAFSLKDLAVNGRDLIEIGSRPGKTIGIILGELLEIVLNDPAQNTRETLLAIAERINNARSGE

SEQ ID NO: 91192 - protein, 271 aa, Unknown
  Obtained from environmental sample
  DOMAIN (5)...(96): Type I restriction enzyme R protein N terminus (HSDR_N)
  misc_feature (1)..(271): Xaa is any amino acid
GWDADNEAGLHESFKEVIHEDKLRIGETTKAPDYCVQVGGRKLFYIEAKKPSVKIIDDADAAFQVRRYGWTVQMPACLLTDFEEFSVYNTGIKPKNTDKSSTARFFYCRYDELGKKNPQYPEYENNWSFLESLFSKDAVIRGSLEKIKGRDKKGTQEVDKEFLKEIEDWREQLTNNLVLRNELTERELNFSVQKIIDRIIFLRICEDRGIETKNILHNIAKTNDIYSSLTKLFLTADDKYNSGLFHFHKEKNFEDTLDTLTLKLKIDDKPL

SEQ ID NO: 91193 - protein, 254 aa, Unknown
  Obtained from environmental sample
  misc_feature (1)..(254): Xaa is any amino acid
ASVTTSGGDSSSSAIGNGGSSSSVSVGSGSYTEKGNNIANYRTKQIVGQVWMAENLNYAVEGSRCHGEGGLVYNVETGDPDITLSDSEIQANCDKYGRLYDWATAMALPSKCNTVVSTSDADCAIATPNHRGICPSGWHIPSDADWNVLMKVANPSCSDNTNCEGAGKKLKATSGWNGESGNGTDDFGFAALPGGLGYSDGYFGSVGNGGYWWSASENDANYACYRFMGYFNEYVYWLYLNKGDYLFSVRCLQD

SEQ ID NO: 91194 - protein, 277 aa, Unknown
  Obtained from environmental sample
  DOMAIN (2)...(143): Domain of unknown function DUF21
  misc_feature (1)..(277): Xaa is any amino acid
MGKRVRLALKLLDVYDKILSTVVIGNNIVNIGSSALATAILIGIFGNMGVSIATVVMTVLVLIFCEISPKVLAKETPELTALRTAPILRFLVWFFTPLSYLAAEWKKFIIKIFSVNQDRSTTEDELLSFVGEVRQEGGININEEKMIRQVIGFDDLKASEIYTPRMDVEAVPVSSAVQEVDLKFTETGFSRLPVYQDSVDNILGIIHFKDFYREVIKGQKSLKEIISPVIFVAKTIKIGKLLRTLQEKQAHMAVVIDEHGGTLGIITIEDIVEESGR

SEQ ID NO: 91195 - protein, 265 aa, Unknown
  Obtained from environmental sample
  DOMAIN (191)...(258): His Kinase A (phosphoacceptor) domain
  misc_feature (1)..(265): Xaa is any amino acid
MQEPSILRLNWNDYFLRKMLNDILSVKSLSEGERKKIENLLGETKKLLRDLNTFNEHSDFLLALGNYASYSNDGYYFIKHNEDFFVTISYPELPIKNVMIVKIDSAYYSNRMSEAIEKTASEWDYIPYAISGEFPFGEWDILIEDNSTINKESQKKIIFLYLLLVFSLIIPIIGVVVVYIGFSRERQLRLMKDNFLSTVSHELKTPLTSIKMYSEMMHSGRVQKSEKIVSHSGVMLKEANRLENLIEDILSYTRMESGKKVFRME

SEQ ID NO: 91196 - protein, 461 aa, Unknown
  Obtained from environmental sample
  DOMAIN (4)...(460): Carbohydrate phosphorylase
  misc_feature (1)..(461): Xaa is any amino acid
MMEALNELGMNLEELRDVERDAGLGNGGLGRLAACFLDSMASLELPAMGMGLRYEFGMFNQKIEGGQQKEYPDEWLRYPNPWEFARTAGVMQVHFGGHVESYIENGETLHHWHAAESVEAMPYDTPIPGYKNNTVNTLRLWSAQSNQFNLQTFNEGRYVDAASKTEEWESITKVLYPNDSSVNGKQLRLKQQYFLCSASLQDIIRRYERGSDVQTAIEKLAKDNKVSSANLTLLSLEQGERRQLLIKLPKKIAIQLNDTHPAIAIPELMRLLVDIYKLSWSDAWSITTEIFAYTNHTLMPEALEKWSVHLFEELLPRHLQIIYEINARFLESVWAKWPGESDRVTRMSIIQEGDEKMVRMGYLSVIGSHSVNGVAALHSELLKTNLFKDFYELWPERFNNKTNGVTPRRWVAKANPAMTFAISKKIGDSWIGDLSKIKKIEEHLNDAEFHDSFVKPKKKTK

SEQ ID NO: 91197 - protein, 323 aa, Unknown
  Obtained from environmental sample
  DOMAIN (69)...(318): ABC 3 transport family
  misc_feature (1)..(323): Xaa is any amino acid
MAASSLGSSGISLRDTVLIILHKIFKLPLNADIDPKNVSIVWLLRLPRVLLAFFAGGCLAVSGAVCQSILRNPLASPYILGVSSGASLGAGIIIISGITLPFLGGFTLPLTGFVFGLATVFLVTAFSSRIDRTMSNNTIILCGMVLSLFLSAILTTISAVFSDDLRRIALWQMGSFAMRGWTYVYLLLPFFAAGCAGVFLYTKEMDILSFGDDHAKSAGVETGTLRIKLLALCAILTGAAVALCGVIGFTDLIAPHAARRIIGSQHRYLIPMSFILGGSLMVLTDLIARTVISPSELPVGAITALIGAPFFAWVYFKRRKVSR

SEQ ID NO: 91198 - protein, 298 aa, Unknown
  Obtained from environmental sample
  DOMAIN (39)...(273): Periplasmic binding protein
  misc_feature (1)..(298): Xaa is any amino acid
MNRKIFTIIFLIIISACGDNKGKEITDRSGRQVKLNGAINRVVSTAPSNTEIITDLGMAHKLAAIDVHSANVAGIPEGLPLLDFFFPDAEVIINLEPDIIIANGHNPTGTGEDPFRLLRETGIPVVYIPMSKSIDDIYKDIAFIANLLQAQKKGGEVINSMKAQIAEINQKASRPAAQRTVYFEISAAPDMMTFGKDSYINEMISVIGARNIFENENWLVMPGAESVIERNPDVILTNVNYIPDPINEIKSRPGFEHINAVKNDCVYQIDTDSSVRPSARIIFALRQMSRAVYPELYE

SEQ ID NO: 91199 - protein, 146 aa, Unknown
  Obtained from environmental sample
  DOMAIN (4)...(146): FAD binding domain in molybdopterin dehydrogenase
  misc_feature (1)..(146): Xaa is any amino acid
MIREGFEYEKPATVARLFELVKQDGAKVLAGGTDVVPLMREGRLAPRLIVDIKGIEEFKGVYSLGDGLFIGATEPVEAVVQHPLTRPYTAFVQGAGSLGCPEIRWRATVGGNICNGSPSADSVPGLLVYDADVILVSESGERTTPL

SEQ ID NO: 91200 - protein, 367 aa, Unknown
  Obtained from environmental sample
  DOMAIN (1)...(303): Aldehyde oxidase and xanthine dehydrogenase, molybdopterin binding domain
  misc_feature (1)..(367): Xaa is any amino acid
GIGQIMREDSGNISKCASILREKLFDPPKPSAGLNKIIGRGMAAYMKTPCMPTNAQSGAFIKLNADGGVTVSVGAVDMGQGLHTTMAQIAAEALDLPLDKVGVNFIVDTLISPYDWQTVASRTTWGSGNAVLLAAQDLLQQLREQAALAFGVDPQQVEITRGEVRCKGKTLAWGEFATGLRSAVGSALTRPVMGHGYFVPSGLQNPDAETGQGNAAADWTFGCAGAEVAVDIRTGEITVLRLINVIDAGTIINPKNAREQVIGGMIMAAGSALSEKVVFDSKTGAIRNMSLVDYKVPGIEDIPAEIEIIFVQTPDETGPYGAKGLGEHGAVGTAPALLNAIYDAVGLRFSALPVTPECITGRLGHDS

SEQ ID NO: 91201 - protein, 277 aa, Unknown
  Obtained from environmental sample
  DOMAIN (1)...(275): Amidohydrolase family
  misc_feature (1)..(277): Xaa is any amino acid
MTAIERAADFKASYDKSWILPNVRRACDLALHYGNTHIRAFADVDSKARLEGIKALLEARAEYSGRVELQVVAFPQDGVVRESEAAKYVEEALRLGADVVGGIPWIEFTQGDEQRHVDEMFGLAKKYGKDVSMLLDDVGDAGERTLEMCVQKAIEQGWQGRVTAQHCRAMALYEENYFRKIAALMRKANIGLVADPHTGPLHARVRDLAAAGVNVALGQDDIADAYYPYGRCNMQEIAFLASHLMWMTSFQDMELLYDMITTSAARVLGISGHVLEP

SEQ ID NO: 91202 - protein, 408 aa, Unknown
  Obtained from environmental sample
  misc_feature (1)..(408): Xaa is any amino acid
VTKPDKHHRADAGRCENGELVACFDVVLDKNGNLESYRSINEKDSATGLKLYAYAETALPSPWFNNQTYVNTLDKESIQEFIRITHDVYKERFGKDFGGIIPAIFTDEPQFTRMGTLNFAREEKDITLPWTFDIEDTFKAAYNGESLISALPELLWDFPEGRVSKVRYHYHDHVAERFTSAFADQCGDWCDKHGIMLTGHMMEEPTLESQTAALGDAMRSYRSFRLPGIDMLCDRREYTTAKQAQSAARQMGVPGTLSEIYGVTNWNFDFRGHKLQGDWQAALGVTVRAPHLSWVSMNGEAKRDYPSTFNYQSPWFEEYPYVENHFARVASVLTRGKAICRLGVIHPIESYWLHWGTREKTAAIREEMDEEFLHLCDWLLKGLIDFDYICESTLPKYCKLEGISEKGF

SEQ ID NO: 91203 - protein, 187 aa, Unknown
  Obtained from environmental sample
  DOMAIN (134)...(167): KOW motif
  misc_feature (1)..(187): Xaa is any amino acid
MATGWYVLHIYSGYENKIEKTIRNMLEMGELDKEVVRDIKIPAEEVTEVKDGKKRTITKKFLPGYILVEMDLPDVDMGWKEPCSKIKKIQGVTGFVGTPAGRKPQPLTGDEARAILQKSGEIKGERPVRSRHSFNQGEQVKIVDGPFETFTGTVDEVNQEKNKLKIMVGIFGRNVPVEVDFLQVEKI

SEQ ID NO: 91204 - protein, 59 aa, Unknown
  Obtained from environmental sample
  DOMAIN (3)...(59): SecE/Sec61-gamma subunits of protein translocation complex
  misc_feature (1)..(59): Xaa is any amino acid
MKKIVQFVKESYAELRKVIWPSKDDVISSVKVVIISTIIVAAVLGLVDVLLLFGIRAIF

SEQ ID NO: 91205 - protein, 70 aa, Unknown
  Obtained from environmental sample
  misc_feature (1)..(70): Xaa is any amino acid
TGLKFNFTDKNEARSWFHKLRQKFLDYNGSEWQGKHFKECEKDIEEAVKSQSNGVDKTAEKILAPEKAKA

SEQ ID NO: 91206 - protein, 149 aa, Unknown
  Obtained from environmental sample
  DOMAIN (15)...(144): Metallo-beta-lactamase superfamily
  misc_feature (1)..(149): Xaa is any amino acid
MPDKNITNLVVGAIETNCWIYPINEKEAVVIDPGDEADRIISVLKELGLVPGYILLTHGHFDHIAAVPQLIEKLSPAKPQIAIHRLDASSLGHDAYKVHTVSIKAAMGSSSFIDTFWHDLPSADILLEEGSVVGPLTVLHLPGHSPGSI

SEQ ID NO: 91207 - protein, 211 aa, Unknown
  Obtained from environmental sample
  misc_feature (1)..(211): Xaa is any amino acid
MPKFVLLLLVGLFVQIPIFSQEVTQDPVNEDTIVVQDTVIVEDPVIVEDPHKTAEQALTFGNESVLPVQKSGASVWAIIRMILVLALAAAAIYGIVYFIKRSSKQSSANDPFLKILASSHLGFNRYVHIASVGSKAWLLGASEGGVNLISEIEDKEIIDAMLLEDSKKDQETQSRFPDFLSILRRLGTPGQTRSSDGVDEIRKRRERLKGL

SEQ ID NO: 91208 - protein, 488 aa, Unknown
  Obtained from environmental sample
  misc_feature (1)..(488): Xaa is any amino acid
RWWTTRLSAITATFRTKRLNMRNIDIKGARVHNLKNIDVTIPRNSLTVITGLSGSGKSSLAFDTLYSESQRRYVESLSSYARQFLGLMEKPDVDRIDGLSPAISIEQKTSGHNPRSTVGTITEIHDYMRLLFARVGTPTCHKCGRVIARQSVQEITDRILSLDAGVKFQILAPVVSNRKGVHKDLLAKLQKSGYVRVRIDRTIYGIDDDIRIDPNKKHTIEVVVDRLVNSPTIASRLTESIETALSVSAEETVIVDVAGKEDLLFSQRLACPVCGISCEEPSPAMFSFNNPLGACEECHGLGFLMEVDPDLVAPDQTKTLLDGAIIPWNGAYIDGGWNNHMLHAVCKRYKIPMDKPYGALSQKHRDILLYGSDGEKVEVQFEGKDGKSHARFNRAFEGVAPNLLRRYRDTASEDIRRWIEGFMTQRGCPACKGTRYKKQPLAVLIDKKNIAEVSAMSIESALNFFKNYSPKGNAKEISKPVIREILQR

SEQ ID NO: 91209 - protein, 386 aa, Unknown
  Obtained from environmental sample
  DOMAIN (256)...(324): PET112 family, C terminal region
  misc_feature (1)..(386): Xaa is any amino acid
MSWEIVMGLEVHAELSTKSKIFCGCTTDFGGEPNTHVCPICSGMPGVLPKLNRNVVEYAMRLGIALNCAITRYGKFDRKNYFYPDLPKAYQVSQLYAPICTNGNMEIEIDGQKRPIRIREIHMEEDAGKLVHNPQNGNTYMDFNRCGVPLLEIVSQPDFRNSEEVIAYLEKLRETLLYLGICDCKMQEGSIRADVNLSVRQAGGELGVRTEMKNLNSFKAIARAIACESARQIGVLEGGGKIEQETRRWDDDKGISYAMRSKEDAHDYRYFPEPDLLPIKVDDAWLNSVEKSMPELAPQKRERYVRVLGISEYEASVLTVHKNISELFELISGKSGEPLESAHLITGEIMRLMNQTNTLPEELSLDGQKLSTLITLVLGGKITEIL

SEQ ID NO: 91210 - protein, 560 aa, Unknown
  Obtained from environmental sample
  misc_feature (1)..(560): Xaa is any amino acid
MYNHVTNNWDKEHLMQLDPMHCGARKYLLAWMDKWCAAHPRTNVVRFTSLFYNFVWIWGASEQNRHLFIDWASYDFTVSPRALNEFEKAYGYKICSEDFINKGILNSTHLPPGKTKIDWMDFISAFVAQLGREFVDIVHRYGKKAYVFYDDSWVGMEPYGKRFQSIGFDGIIKCVFSGFEVRLCAGVKAETHEIRLHPYLFPVGLGGLPTFKEGGNPAADAVKYWNSVRRALLREPVQRIGLGGYLHLAEGFSDFCDCIETIKDEFDEILSLHAKGKPFTLKTRVAILHAWGSLRSWTLSGHMHETGEHDLIHINEALSGLPFETVFISFEDMENGVPSGIDLIINAGLKGTAWSGGEKWRNEKVVESLTAWVYKGGVFIGVNEPSAIDGFDTAFRMAHVLGLDMENAGSHCHGKWQYAVDEVSGIVPCGADLGSKKVRLTDGRARVLAERGGCPAITVNSFGNGKGVYVSSMIPTEESRLANTRLLLNIILYSMGEALESDCVTDNPNTECAWFSQAEYMVLINNSAGPQRSGVKAGGQKFYAELGPYETKFFNTQETQ

SEQ ID NO: 91211 - protein, 156 aa, Unknown
  Obtained from environmental sample
  DOMAIN (52)...(154): Glycosyl hydrolases family 2, sugar binding domain
  misc_feature (1)..(156): Xaa is any amino acid
MKANLMPPIWENPEIQEINRLPMRSPLLPFPSAKDALADAIAGPEFRAPGRNEYYKSLDGVWRFKLLSNPMDDSADGLNVPEWAAPSYGAGDWAELSVPGTWTRQGFDKPHYTNVQMPFQAEPPHAPEANPTGLYRRGFTLPPFLEKIAGGASSGF

SEQ ID NO: 91212 - protein, 323 aa, Unknown
  Obtained from environmental sample
  DOMAIN (1)...(287): Branched-chain amino acid transport system / permease component
  misc_feature (1)..(323): Xaa is any amino acid
LRIFNLCGIYIILALSLNLINGFAGLFSLGHAGFIALGAYTSALLTMSPASKQMNFFFTPIAAPLAKISLSFIPALIAAGLLAGLAGFLIGAPALLRLRGEYLAVVTLSFSEIIRVVITNLQSVTNGVLGLKGLPNYSTTCMIWGVAFISVVFIIALMNSAFGRSCKAVRDNEIAARAMGINAVRIKIISFTIASFMAGIGGALLAHMLSAIDPRMFTFTITYNVLLIVVLGGSGSISGSIIAAIVVTISMEALRFLDGPLNLLFIRTQGLPGLRMVLFSFLLLLVIIFRPQGLMGNRELSWDMLANLMKKRKPPDTYDASLK

SEQ ID NO: 91213 - protein, 71 aa, Unknown
  Obtained from environmental sample
  misc_feature (1)..(71): Xaa is any amino acid
MIPGLKCFFAAVMGGIGNISGAVLGGLLLGLIEIMVIAAFPALTAYRDAFIFVLLIIVLLLKPSGLLGKTK

SEQ ID NO: 91214 - protein, 369 aa, Unknown
  Obtained from environmental sample
  DOMAIN (10)...(366): UvrD/REP helicase
  misc_feature (1)..(369): Xaa is any amino acid
LSVEDLLSGLDDEQIKAVTLETNGVVAAGAGSGKTKVLASRYAWLVMEKKLKPEEILTLTFTNKAVSEMYSRIYRYLLEQDDAEAAGALKNFHKARISTLDSFSANVARAAAARYGISPDFSSDDTALRDLAREAALRFVLDHRETPAIRQLLVDHKIKGLAEEIFAKVVLKYSLISSPLDLDKDLFAQKKEIARAWLKKVQEITNITGLMADELRTIAELKLKKNSKLVESLEKSLLANSPPPLPDINPLLETSVVAADSDLAAELPSSKTRLAIKKFFDYYSAVIAARIPGRYGDTYAPLVEYYTILKGTDEGGLYHELEAIANYALNFDLCAGIFALIKKFQDEFNAKKRETGFLSFDDIARLAVD

SEQ ID NO: 91215 - protein, 251 aa, Unknown
  Obtained from environmental sample
  DOMAIN (130)...(245): Response regulator receiver domain
  misc_feature (1)..(251): Xaa is any amino acid
MLLNRDEIITVVDKPEIKYNDRIIKLYYLSQILQIKTDVVGASDILFVVIIRSYEDIAAIAVNNIDSMRSVILKTMPTFMENMSIFSGIILNEDYEMVSVLHIPTVIKMAKRIKTLDIKKHAIEYEKLKKSILIVDDSLPIREIESEILSSEGYVVDTAADGAQALKAAKTKHYDLICTDLNLPVMDGFMLIENIKKNDALSKIPIIVISSMDNEEEQKRTFQLGASRYIVKNSFNNHNLLDAVNSLVGAG

SEQ ID NO: 91216 - protein, 153 aa, Unknown
  Obtained from environmental sample
  DOMAIN (7)...(108): Hpt domain
  misc_feature (1)..(153): Xaa is any amino acid
MAIDKDKFIKKYVDEGLEILSTVESLIFDIKDGVSVEDDLATLLRSLHTLKGTSRMLEFKRIEELSHSLESVFVAIREQRIGFSENALKLILSSLDLLKDGINVLQNTKDDNIETGEYVKNLTLLAAGEEYSLPKTEKPASIKKQSEDKDAAL

SEQ ID NO: 91217 - protein, 265 aa, Unknown
  Obtained from environmental sample
  misc_feature (1)..(265): Xaa is any amino acid
MEEAKTNRKHKDSVFTKLFGEKSNLLELYNAVSGKNYPENTEIEIITLSDVLYMEQLNDIAFVIDNRLVVLIEHQSTINENMPLRMLIYISREYEKITTSKNLYKERMIKIPTPEFIVLYNGKKEFPDFKEMKLSDSFELKNDTCFLELVVKAYNINKGRNIEIANRSPTLNGYETFIAEINENLKTMSLPAAIKTAIASCISKNILVYFLREHGSEVENMLLTGWNMKDALVVAREEGTEEGIEIGMKKGIGIGMEKGVCSFGG

SEQ ID NO: 91218 - protein, 288 aa, Unknown
  Obtained from environmental sample
  DOMAIN (181)...(276): Peptidase family M23
  misc_feature (1)..(288): Xaa is any amino acid
MGIPISGTLAAEELIHVVGKGDTIFSLSRFYHVTADELMKANGISDPSKLSVGKKLIIPVPADGSPLPGQNSGFTSSVIENPQMFAIYKAVKGDTLFSIARNNGITLQKLQEINGFSSDHVLKIGDAIKVPKKGSSFGTQGISPAANTAVIKPSTANKTAAPAGIYALRWPVTPKDISYMTGQMGVVVEGEKLESVRSLTQGNVVSAGPWRKFGRVVIVETSGGYYYMYGGCETITVNVGDRITPGMELGKLGINAVSVKPQLFFMVFRNDNPMDPALAPRAGNNQRT

SEQ ID NO: 91219 - protein, 161 aa, Unknown
  Obtained from environmental sample
  DOMAIN (7)...(129): Cytidine and deoxycytidylate deaminase zinc-binding region
  misc_feature (1)..(161): Xaa is any amino acid
MGEYKRPSWDEYFMEVCEAISKRATCDRGRSGCVIAKDKQLLVTGYVGAPAGLPHCDEVGHQIKKMIHEDGRETTHCVRTVHAEQNAICQAAKRGISIDGATIYCRMTPCRTCAMLIINCGIKRVVCQRHYHDNEDSLAMFEKAGVIIEHLHDETQKYDDQ

SEQ ID NO: 91220 - protein, 298 aa, Unknown
  Obtained from environmental sample
  DOMAIN (108)...(250): Phosphoribosyl transferase domain
  misc_feature (1)..(298): Xaa is any amino acid
MTGAALAAGLLRGAFSLAIVTSKNKLIAIRDPNGYRPLCIGKNGIGYAVASESCALDTSGFEFVRNVAPGEVIVFENGEITHEGIMLEKKEDNCGLCIFEYVYFARPDSVIDGLSVYEARYNMGLALAQEYPVDADVVCGVPDSGLDAAYGYSAKSKIPLVTGFVKSRYIGRSFIYPTQSQRDNAVRLKLNPLAASIRGKRIVLVDDSIVRGTTSEKIVKSLKNAGAKEVHLRISSPPFRHVCHYGTDIDNEENLIANTMSLDDICRKVGADSLGYISLEGLKKACGQCTLPFCTACF

SEQ ID NO: 91221 - protein, 417 aa, Unknown
  Obtained from environmental sample
  DOMAIN (3)...(127): ABC transporter
  misc_feature (1)..(417): Xaa is any amino acid
NHALPNLTVAENMFIGRGQYKLVNWDAMEKKSKKILDSLGIPANPTRQLSAYSLAVQQMVAIARAVDMDCKALILDEPTSSLDDQEVAKLFAVMRDLKTRGVGIIFVTHFLDQVYEVCDKITVLFNGKYVGEYKTAELPPVQLIAKMMGKELVGLSELHKKEIPSDDVAQAPVYEAVGLSSAAGLKPYNFKIRKGEVNGFTGLLGSGRSESVRAIFGADRVTGGRVKVNGKKARITKPIDAMKNKIGYLPEDRKNDGIIADLSVRDNIILALQVMKGFFRPFSKSEAKAFADEYIRMLGIKTPSVNTPMKSLSGGNQQKVILARWLLTHPEYLILDEPTRGIDVGTKVEIQKLVLKLAEEGMSITFISSEIEEMVRTCSRLIVMRDRNIVGELRGGEVTQDNIMHTIAGGTGENEAQ

SEQ ID NO: 91222 - protein, 88 aa, Unknown
  Obtained from environmental sample
  DOMAIN (1)...(84): PTS HPr component phosphorylation site
  misc_feature (1)..(88): Xaa is any amino acid
MTEQMVTIINRAGIHARPAAVLVQAAKDFISNIYFEKDDDRINAKSIMGILTLAATYGTELKIIADGEDEEEAVQAIARLFESKFEEE

SEQ ID NO: 91223 - protein, 166 aa, Unknown
  Obtained from environmental sample
  DOMAIN (118)...(165): Peptidase S24-like
  misc_feature (1)..(166): Xaa is any amino acid
MKEPTERQKEVLGFIAAYINIHTYPPTIREVADFFSISIKGASDHLTALRKKGLLKQGDKKYRTMELVGAEGEEDFTEIPILGSVAAGLPILALENMEGSIKMHRTLLRNKAKYFALKIKGDSMEEAGIMDGDMAVIEHHSTVRNGEIAVVMLDDAVTLKTFYKES

SEQ ID NO: 91224 - protein, 76 aa, Unknown
  Obtained from environmental sample
  DOMAIN (1)...(64): Protein of unknown function (DUF497)
  misc_feature (1)..(76): Xaa is any amino acid
VFADPDRIERVDRSEGNTSGETRWQTIGRVGAHLFVVYAESGEDTRLISAREAKKHERRSYNGYYQIDGKGWSKAT

SEQ ID NO: 91225 - protein, 383 aa, Unknown
  Obtained from environmental sample
  DOMAIN (2)...(380): Aminopeptidase I zinc metalloprotease (M18)
  misc_feature (1)..(383): Xaa is any amino acid
GIRFGGDCREKPVVEGCNILGAHIDSPRLDLKQNPLYEDSDFALLDTHYYGGIKKYQWTAIPLAMHGVFVNADGKKTAIRIGEEPGDPLFTITDLLPHLAREQMEKKASEFMEAENLDVLAGSKPYNDKDTKEKVKLGVLSLLNAKYGITEKDFASAEIEFVPAFKASDIGFDRSMIGAYGHDDRCCSFPALKALTALAHEKSAPEKTVICYLSDKEEIGSAGNTGARSYNFENFIALLCESEADLRLCYQRCSMLSADVNAAFDPTYAGVFDKKNSSFMGKGLVLTKYTGSGGKYGASDANAEFCAKVQAIMNKNKVQWQFGALGKVDKGGGGTIALYAANLGMDVLDCGVPVLSMHSPFEVISKIDLYTTYRGYIAFLNNA

SEQ ID NO: 91226 - protein, 632 aa, Unknown
  Obtained from environmental sample
  DOMAIN (588)...(621): Tetratricopeptide repeat
  misc_feature (1)..(632): Xaa is any amino acid
AEAESASAEPAHAPAATFNDNDFALPGLDDLFEKPKAEAAPPPPEKKGFFKKKKEEVVEEEPESEDSDEIQLSQSDLDKLLKTLEGYPLNLRVACEELIAEQVILPQQLSKLLRLLIRGANVKEMAEFAGQILGKAIVIPKSYEKSTGAEWEAERSSFAYIFANNFLPVLRIVAFVLALLFSTGYLVYKFIYTPIKAESLYKRGHERISAGEYQRAEELFHKAFLKHRKKKWFYAYAEGFRDQRRYMLAENKYDELLRYYPRDKKGVLDYANLETNYLLNYEKANRLLQHELLDYAPNDYDGLLAAGDNFLAWADSDPSKFYDKYEDARFCYARIMQDYGWTGPVVERMLLYFIHTDNLKETLNLRAWFENNSRKYKLTTPSLAELGGYLLDKQLEKVKGVPNAYVESIESVRDMLLQAVKEDPYLPEPHYHLARYYKNLGNIREERLTLENAIRAYDLAKKESVRRRLNRVDTHYRYANLLINNKEFFPAEEQLVRGIELYEDFISRNLIAPSPQLGQLYAGLGDLEYFVKSGNIQAALNNYHTAEKYGWSPPEIQYRMGAAYYQQEKWGNALDYLFKAASALPLNRRILFALGNTAYKRGDYFAAQGYYNRLLDILENQRVRLPVLFPND

SEQ ID NO: 91227 - protein, 139 aa, Unknown
  Obtained from environmental sample
  DOMAIN (14)...(135): RNA pseudouridylate synthase
  misc_feature (1)..(139): Xaa is any amino acid
MNNNEPYILDETNDFAVVFKPPRMHSAPLAKKEGGTLLEWFTTRKNAAQNSGDCLMHRLDFDTHGLVLFAKNAGSFEFFKELQDKGGFIKEYSAVCGSVPENVVCNESSVPGFPPSPVLAAYAPSPENPLVIESYFRPF

SEQ ID NO: 91228 - protein, 258 aa, Unknown
  Obtained from environmental sample
  DOMAIN (20)...(256): Major Facilitator Superfamily
  misc_feature (1)..(258): Xaa is any amino acid
MNKEQEENIDPKLFKMAVIMVFGIVAPALNATIVNIAIGTIVAEFNSTISVVQWITTGYILVMGIAVPISAWLVNRFSGKMVYITSLVIFFVGSVFAAFSWNIEVLIFSRILQGLGAGILIPTLSTVLVRHTGNAKLGRLMAIVSIPALIIPILGPVLGGLIVNKLPWQWIFYINIPICIAAVILAVKYLDKDEPVNKKQPLDVIGTLLLSAAFSILVIGISKIRTDGLGNISAITPLLIGLALFIAYIVYALNAKIE

SEQ ID NO: 91229 - protein, 501 aa, Unknown
  Obtained from environmental sample
  DOMAIN (53)...(234): Transglycosylase
  misc_feature (1)..(501): Xaa is any amino acid
MVKAMELEAQRITDTSGEFSDGQKIVDGVEVSDFPSLAVVRLLNEVREYSNTILITDRADRPITRIKTDHRRARMAEFPKTLVTALIAAEDKHYMENTLGFSFDSFVRAFANAVPATIKKFRPATPRGTSTITQQVAKLFMSRLDEAGQRRVSNTLNRKNRELKLAAALRKMYTPEEILEVYMNHAVTSDHGLIGYKDIARGLFGKDLSELTDAECVYLARMVKWGRNLKPKIAAQCRVDMGRMGDALGWDAAKRAAVLAEIDTLAFARPKRIEGEHGPLIDLANEFWLLTLRRNGSSETQIAQMDLIDPNSLVRRKGNLTIKLSIDLPLQKTLEKLVSERGYGADTVIVSEVRIGSRGDDVHTTAMPQDTVRRNRVLTETVDFSEPGHPFVTTLYAGDTVVENIRYSKTGQNNYHRSTFYYMRKPMLVNGQYFAYAIMCSKTGKLLAYHSKDQLGSRLSCLLQNRTPNGSSLAKPLLNALSFDLEIFKPYSRWTDALPVT

SEQ ID NO: 91230 - protein, 821 aa, Unknown
  Obtained from environmental sample
  DOMAIN (1)...(199): Homocysteine S-methyltransferase
  misc_feature (1)..(821): Xaa is any amino acid
VAGSMGPTGKSAGLSPDVNDPAKRSIYWDELEAAFYDNARGLLDGGADILILETIFDSLNAKAALFAIRRLLDKRNIDVPIIISATITGDSGRLLSGQTLEAFCASVLHAQPWAMGLNCSFGAEKLLPHIRRLSAIVPCFISSHPNAGLPNKFGAYDESPESMAACVENYLQEGLLNVIGGCCGTTPAHIAAIAAKAALYKPRARPQNPLLRPLLLSGLELLIANSPKPDTTSPHSPLPTPHSLILIGERTNVSGSRKFLRLISEGKYNETLAFARSMIEDGAKIINVGMDDAMLDAEKSICAFLDLALSDPEIAGVPVMIDSSRWNVIEAGLKRLPGKGLVNSINLKDGEAEFLRRALLIKRYGAAAVVMLIDEKGQAVSYERKIEIAGRAYRLLVDAGFPPENIVFDPNVLAVATGISEHDSCGVDFIRACSWIRDNCPGVNISGGISNLSYSFKGNNKVREAMHSVFLVHARAAGLTMAIVNPAELIASNVIEEDLRNAVENVILNRNPGVAERLLALAEKISAASSITHSSFLIPHSSSDWRNQPVETRIIHAMLRGIDDFIEVDALELLKAGKTALEIIEGPLMDGMKEVGKRFDEGTIYLPHVIRSARVIKKAAAALEPYMGKADNAAAIGPKIILATVKGDVHDIGKNIVGIVLACNGYQVIDLGVMVPAEQILDAAEKEQAVMIGLSGLIAPSLDEMAHIARKMEKRRMKIPLLVGGAAASLVHTSLRLAPEYSGPVVYVPNAGKSAETVRALLSDLLRPRFLRELENSYQNAAWRHEELKSRVEIISLENARANRVPPAAYKPAAPKKAGII

SEQ ID NO: 91231 - protein, 316 aa, Unknown
  Obtained from environmental sample
  DOMAIN (69)...(316): Transposase DDE domain
  misc_feature (1)..(316): Xaa is any amino acid
MGRDILDLYSEYLLYSSGQTTATGLSEILDGDISHDKLTRYLATELFDEKTLWKKVKKVVRAYEAEDACLIYDDTIVEKPYMDENDIICWHFDHKENKPVKGVNLLSAFYHSEKNGQSVRLPTGYRVIAKTEEYTDEKSGERKRRSPITKNEMMQEMIKRHMQNKVKFTYILADSWYSSAENMRFIDKRGKVFIFELKENRQVTDSEKERNQGGFERLDTLELPEGKPVKVWIKDLEFPVKIFKQVFINKDGTNGQRFLVTNELSLTEKQFKTLYKKRWGVEEYHKSLKQNASIGNSPAHTERTQSNHIFAAIWAM

SEQ ID NO: 91232 - protein, 293 aa, Unknown
  Obtained from environmental sample
  DOMAIN (191)...(256): Histidine kinase
  misc_feature (1)..(293): Xaa is any amino acid
MKKLFGTLCALIIALSILCLASCTNNNAYPSISSISVSWLELKSDIVNSEQTGGFEDSLAGSIENFRLTLNKFLSSPIIYLYRIRSPENIQLLADIDSAAERLNAALKEGLPLPPIIQEIDSNIEQLWLIEKSLSDASQIKYFQFLFSLSMSLIAAAFALWLLYSKLRKTEKKEEQSRAFSRETIVAQEQERSRIARELHDTVAQDLLQLSLRTEIMNKEPDASKRNSLCDEVVGGQRIIMKRIRNICENLIPPEFQRCRLGDVLHTLCQNFQQRTNIECQIKIQKDLPLAGL

SEQ ID NO: 91233 - protein, 84 aa, Unknown
  Obtained from environmental sample
  DOMAIN (28)...(84): Bacterial regulatory proteins, luxR family
  misc_feature (1)..(84): Xaa is any amino acid
EFLAAIEAVLSGVPYVYTEHQTRNKQDSVKLTSRENEIAALVKQSLTAPQIAERLNISTRTVEKHLERIYVKTETSSWEELHNL

SEQ ID NO: 91234 - protein, 202 aa, Unknown
  Obtained from environmental sample
  misc_feature (1)..(202): Xaa is any amino acid
MLLRSVNAPLTVLHGIGPKAMKESPPKFSRLGIRNVAELLCHYPRDWEDRRFTVPIAEFQRANVCTEVTVLAHDWIGFDRKRTPKVYIEDESGRAVLVGFNRPWLAKQMDVGGRYRIWGCFEYKYGEIQSSNFEFEESSKAENFNTMMPVYPLCAGLRQAMLRRFTANAIKQYAAQLENELPDEIMARDKLLPKAAAVRAYH

SEQ ID NO: 91235 - protein, 283 aa, Unknown
  Obtained from environmental sample
  misc_feature (1)..(283): Xaa is any amino acid
MVRLDDGSYIVYPFIRGDPGLLAGNGLMIRQDWLDDLGLEMPETIDEWQTVLTAFKEKKKSQAPFSFEYGPYMGWLPFITAFNVMRNMYVGDDGRVHFGQVEDGYRKFLTVFAQWYREGLIDPDLPTLQQLQVSSKITSGVSGASCGALGSRMGSWIPSGRATNPRFNLVAAPPPSLVKGEKPEYVPGMIGAGYTGAAITTACKRPDIAARLLDWGYSEEGFLFNNFGIEGVSFRMENNSPVFTAEVMENPRGWPPAHALAAYARSQESGPFVQDINYYEQYM

SEQ ID NO: 91236 - protein, 47 aa, Unknown
  Obtained from environmental sample
  misc_feature (1)..(47): Xaa is any amino acid
THVYRVGLLDRNWSYSTAVGLFNSAINFILLIIANKVSRKVSETSLW

SEQ ID NO: 91237 - protein, 247 aa, Unknown
  Obtained from environmental sample
  misc_feature (1)..(247): Xaa is any amino acid
MALKLSSVRHSSGENIFMVINYGFLGLVSFVCLYPILYVFFASLSENALLMQHTGALLFPKGFSLAAYERVFKNQMILLGYRNTIFVLVVGVALSLLATAVGAYFLSRKNVLFKVPIMMAITFTMFFSGGMIPAYLNLRDLHLTDTLWGLIIPGMISTYNMIIMRTSFQQIPDSLTEAAVIDGAGHIRILFYVILPLSKAIIAVMVLYYGIGIWNSWFWASIIIRNRELLPLQVILREILLQNSTLE

SEQ ID NO: 91238 - protein, 409 aa, Unknown
  Obtained from environmental sample
  DOMAIN (1)...(241): BPG-independent PGAM N-terminus (iPGM_N)
  misc_feature (1)..(409): Xaa is any amino acid
MIAHAKKEGVKRVRVHVLFDGRDVGETSALEYVDPFEAFLKDLNKDGFDAKIGSGGGRMWITMDRYGADWEMVHRGWQTHVFGNARQFAATREAVETYRKEIPGIIDQDLKEFVIAESGKPIGTIEDGDSLIYFNFRGDRALEITAAFEDDNFTHFDRGRRPKVCYSGMMEYDGDLHVPKRYLVSPPSIDRTMGEYLAASGVRTLAISETQKYGHVTYFFNGNRTGKFDDKLEDYVEIKSDVLPFEQRPWMKCAEITDQVMAAVGSGKYDFIRLNYPNGDMVGHTGVYQAVVCSMEAMDIQLGRLLKAADEAGAVMVITADHGNSDDMFEHDKKTGAVSLKADGTPKSKTSHSLNPVPCIVHDPEYKGEYPNGQNDLNEGLGISSIAATCIQLLGYIPPEDYDKSVLKM

SEQ ID NO: 91239 - protein, 280 aa, Unknown
  Obtained from environmental sample
  DOMAIN (155)...(273): Response regulator receiver domain
  misc_feature (1)..(280): Xaa is any amino acid
LIKKFPKSSSTEDQRLAQVIINLLGNAVKFTPEDGSITLTASFIGEENGVCTIQVAVSDTGIGISEEQQKKLFTSFQQAESNTTRKYGGTGLGLAISKSIVEMMGGKIEIKSELGKGSVFTFTIQAQKGSYIEDTPDANAEDKGKADITGIFAGSRILLVEDVELNREIVKSLLEPTQISIDCAENGAEAVRIFSETPDKYALIFMDVQMPEMDGYEATRRIRAMDIPKAQTIPIIAMTANVFREDIEKCEAAGMDSHLGKPLDFEELLNKLRGYLLKNT

SEQ ID NO: 91240 - protein, 444 aa, Unknown
  Obtained from environmental sample
  DOMAIN (91)...(193): PAS fold
  misc_feature (1)..(444): Xaa is any amino acid
VKREDIIGVPCSRWGANICNTENCGITRLRNGYKETYFQQFGGEYHVLVSYLYNEKGEVDGHVEVVYEDTAIIEKEKKKFEELAHWYESILDAIPFFISVTDTNLNWTFINAAIEHSLGESRKDVIGKHCSYWGFGHCNTDECTIERARRGLNQTYFTKENLSYQADVEILRDLKGKTMGYLALVQDITKLEQITKQRAEAEAAARAKSAFLATMSHEMRTPMNAIIGMTTIGKSAADVERKDYCFAKIEDASPHLLGVINDILDMSKIEAGKFELSPEEFSFEKMIQRVVNVVNFRVDEKQQKLTAHIDKEIPQILVDRRPAAGSGHYQPSGKRGQIHARRRFYHPYRVVYRRRKRRLHHTGCGQRHRYRNKRRTAEEAVYLLSTGGVQYNAQIRRHGAGPRYFQKHCGNDGRQDRNQIRTRKRLCFHIYNTSPKRFLYRRYA

SEQ ID NO: 91241 - protein, 258 aa, Unknown
  Obtained from environmental sample
  DOMAIN (5)...(168): SpoU rRNA Methylase family
  misc_feature (1)..(258): Xaa is any amino acid
MLLSDVVIVLSRPEKAGNVGAVCRAMKNMDLSRLRLAAPDFSLTDTVSEAGLGFGGDLAVIRARAIHAFDVWEKAETFDSLPAAVKDCALTIGTTRRRGRHRKQVTMTPSETAAFLLNHPGPAALVFGNERTGLEDEELELCNLASHIPADEAFPSLNLSHAVQIYTYELFKTLSCPRANTPIDAVKGQWVPLDQAAIEILVKEIMDNLKTLGFYKRLGQKEQERFFRDIFSRSAMTEREGRYFAGIIAKAVRLAQKS

SEQ ID NO: 91242 - protein, 370 aa, Unknown
  Obtained from environmental sample
  DOMAIN (46)...(140): Pyridine nucleotide-disulphide oxidoreductase
  misc_feature (1)..(370): Xaa is any amino acid
CPQEKQCQKKCPRPVAIGRLERFVADWERESGSVKIPSAKPETGKKVAVIGSGPASLVVAADVRREGHSVTIFEAFHKLGGVMRYGIPEFRLPNSIVDKEIETLKKMGVVFRTNFVVGKTRKIPDLLKKDGYDAVFIGTGAGLPLFMGIPGEELNGVFSANEFLTRANLMRAYERDFADTPLWEGKEVAVLGGGNVAMDAARVSIRLGAKVRIIYRRTAAEMPAREEEIHHAMEEGVEFCYLQNPSEILGDEKGFVHALKIERYELGEPDDKGRPRPVKLEGESFELPVDTVLVAIGNSSNPLISQGMPELKVNKRGNIELLNPETNATYVEGVFAGGDIVLGAATVILAMGEGRRAAKGILLYLNKQPN

SEQ ID NO: 91243 - protein, 114 aa, Unknown
  Obtained from environmental sample
  misc_feature (1)..(114): Xaa is any amino acid
MYAINSIYMGDSIQLVKEIDENSIALIVSDIPYGIGVDTWDVIHTNTNNAYLGSSPAQEKAGAVFKKRGKPLNGWSQADKLIPKQYYDWVASWAGEWFRILKSSVVIVVCICRT

SEQ ID NO: 91244 - protein, 53 aa, Unknown
  Obtained from environmental sample
  misc_feature (1)..(53): Xaa is any amino acid
MTYEQILIEPVLSEKANILREEGKYVFKVDPRANKLQIKEAVRRIYNVHPVSC

SEQ ID NO: 91245 - protein, 258 aa, Unknown
  Obtained from environmental sample
  DOMAIN (98)...(217): Histidine kinase-, DNA gyrase B-, and HSP90-like ATPase
  misc_feature (1)..(258): Xaa is any amino acid
MNAILGITEIQLQDETLPPGMREALDRIYNSGYLLLGIINDILDLSKVEAGKLELSPVRYDVPSLINDTVNLNIMRFDSKQVAFSLEVDESVPTALFGDELRIKQILNNLLSNAFKYTEKGEVSMSVNAEYPRQKDAPPQVTLVFRVADTGQGLTREQVDKLFDEYTRFNLDANRTTEGTGLGMNITKNLVRMMDGEISVESEPGKGSAFTVRLPQEIADSKVLGRELAEKLKQFNVGRIAHIKNAPQILREYMPYGR

SEQ ID NO: 91246 - protein, 260 aa, Unknown
  Obtained from environmental sample
  DOMAIN (122)...(260): GAF domain
  misc_feature (1)..(260): Xaa is any amino acid
MGVIGQKRKEETGLNKRLITPGIAAIFVLLVLLVLLIIEDLNLTHIGNVQILKWVIIRIGLIALGILLAAVLIIVLLRISAARDETVRELKKIMKEAEQREHLLNTVNSAAGVLLSVNDEKSFEASLLKSFELVGNCLDVDRVQIWCNEVIGGELHFVHRYQWLSDYGSDNVPVPIGLQFPYSSKPEWERLFLRGEYINSPLSDLDSGDQAFLNSYGMKSIVIIPMLLEGNFWGFFSIDDCRRERAFSDEEMHILASVGL

SEQ ID NO: 91247 - protein, 489 aa, Unknown
  Obtained from environmental sample
  misc_feature (1)..(489): Xaa is any amino acid
EANGGTKVDEKSVFTGNKTLYAHWAGVPITVNFNANGGSAPNPASKSATSGYAYGTLPTVTRQGYKFDGWFTEANGGNKVESSTNNAYANNHTLYAHWTANVPTPAPQPQPQPKPQPEPAPKPDYSAYQSQIQGKCSFHDPSGVWTVIEQYSDPNALYKKLAETLTRDRSKDNYNDPLNKKFAEIMSGNRSKNEYKEVIQILCKFPDPSGVWAVLDRHGYADDFYRKLAQSLVGKSDTPVSSNSNGGMIWTAVANSKFDTDIYAIAYAKDKFLAVGDKGKMAYSADGVTWTAVADSKFGTSEIRAIAYGKDKFVAVGSEGKMAYSADGINWTAVKNSTFGTDFIYSIAYGKDKFVAGGDKGKMATSTDGVAWTAVSDSKFESNRSIDAIAYDNGKFVAGGTFGKMTTSTDGTTWTVVPDSKLGILAIKAIAYGNGKFVATSDSCVVSYSSDGITWTSVILASIFTSGGRVMPIRAIAYSKGKFVAAGSN

SEQ ID NO: 91248 - protein, 94 aa, Unknown
  Obtained from environmental sample
  DOMAIN (1)...(88): Nucleotidyltransferase domain
  misc_feature (1)..(94): Xaa is any amino acid
MDIVTDILSKHAPQFEVLAFGSRYHRKHRRYSDLDLAFVGDERLDMMRQAWLADAFSESDLPFRVDIVEYNAATPEFQAIIDGGCEKIFPRIPS

SEQ ID NO: 91249 - protein, 372 aa, Unknown
  Obtained from environmental sample
  DOMAIN (160)...(274): Domain of unknown function (DUF303)
  misc_feature (1)..(372): Xaa is any amino acid
MRTATFLTVGRSLRWPVFLLTAGVLFLGGIMISGCSPDSDGNPAGAVPGAGSFSELFKPVDDGAPVPAVPQPLSAADDKENFHIYLAFGQSNMEGQNWSGSSITYNDVIPMTYKENVDQRFQVMAAVGGSYKISNSQNEQRAKGQWYKAVPPLVRNNTGLCPADYFGRTLVAGISDTNIKVGVIAVAVAGAAIEGLEKGSGANSYYNSQQDFMKSIATLYDNNPYNRLVTLAKKAQETGVIKGIIMHQGESGAVSGNWAQKVNGIYDNLLNDLGIPPNSIPFIAGEPLITADKPNQNNATLIRGLTRTMTAKLPSGQNVAHVVSSAGCTSGGDNLHFSYEGYKKLGEEYGKKMLELNYSNQGSTSIAPNTKR

SEQ ID NO: 91250 - protein, 352 aa, Unknown
  Obtained from environmental sample
  DOMAIN (137)...(352): NADH-Ubiquinone/plastoquinone (complex I), various chains
  misc_feature (1)..(352): Xaa is any amino acid
MPAILNLIWLLPILAVFASLLIPRQQNQALKMFHATCALANVVLCVFFVVKIYGLALSSQAPIGNALQLQYLTDASWFPALNIRFIIGADALSILMCVLASIIVFTGILMSWNVERPKEFFAMIQILGAGVFGVFLSFDLFLFMVFYEVEALAMYLMIAGWGTGRRDYCGKKLTLTLALGSAFALIAVITMYFESNIGSWDIRRLADVQLPSEFQMWAFPLLFIGFAISGSLFPFHNWSPDGHSAAPTAVSMFAAGVMMKMGCYGCLRVAMYLMPEGAKFWLPYIVLLVLFNVVAAAFIAIKQRDLKYIIAYSSISHLGLIFLGLCATNLISIKGASLQMLSHGFLTGLFFA

SEQ ID NO: 91251 - protein, 381 aa, Unknown
  Obtained from environmental sample
  DOMAIN (4)...(203): CobQ/CobB/MinD/ParA nucleotide binding domain
  misc_feature (1)..(381): Xaa is any amino acid
MRIIPVASGKGGVGKSLVSANLGVAFAQAGQRVILADLDLGASNLHLVLGHQSPKTGIGMFLNDTKSDFNEVIVDTDVRGLRFIPGDTEIPGTANLKPFQLKSLVRRLLALSNEADILILDLGAGTHQSILDFFLLSDHGIVVSAPMVTAVLNAYVFLKNTVFRLMFTTFRKNSPAATFLEKSRKDGSGHQKLYIPKMLAEIKKIDPDSHEKFMNRITNFHPRLIMNMIDDPKDANVAMKIRRSCEEYLDLRIEHLGIIYRDSVQDTALASRLPVVLYKPQSVLSQAIYRIADKILQTEEETFGLSDKEIEDSFQEAGMEAEVDFETKMDYVEDLLHSGALSQGDLIETVKSQQFEISKLKKENNFLKFKLSKAFEKGFES

SEQ ID NO: 91252 - protein, 77 aa, Unknown
  Obtained from environmental sample
  misc_feature (1)..(77): Xaa is any amino acid
LDQEKLKVFNLREKFEEHSESEICCRGTIYPGVVIESHNRYYEVQQKRNQVVFYFDRKSGRIKEKHLEINNDSFDQG

SEQ ID NO: 91253 - protein, 77 aa, Unknown
  Obtained from environmental sample
  misc_feature (1)..(77): Xaa is any amino acid
EAGHGKSRPDVFLLAAKKIGVPPQDCLVFEDILAAVKSAKNACMSVCAVYDKASEREWEQIKAAADYAVIDFHDAPI

SEQ ID NO: 91254 - protein, 172 aa, Unknown
  Obtained from environmental sample
  DOMAIN (5)...(168): CobQ/CobB/MinD/ParA nucleotide binding domain
  misc_feature (1)..(172): Xaa is any amino acid
MGSICVFVNQKGGVGKTTSAINIGAFMAEAGKKVLLVDFDAQGNLSSGVGAKPVKPGIYELLSGAATPDEAIKKTEVANLDVIPADHDLSGAAVELIDQKERNFFLKKTLAPIKNKYDYLLIDCPPSLGQLTMNGLAAADLVFIPMQCEYFAMEGLNQLLHTTKRLKENLNP

SEQ ID NO: 91255 - protein, 475 aa, Unknown
  Obtained from environmental sample
  DOMAIN (71)...(475): UvrD/REP helicase
  misc_feature (1)..(475): Xaa is any amino acid
CLRLAHDEAMSFFIAKRKHPAIQRLYPNKSPVSIANDIFASALFNYTHIDKRPNPMKDFAKQYDTICDEWREQSALIINILQKLAEANAENENYLPDLTPVIGQFSTGGEPSFSEATPASTSTAGGTGRIIFPNARQLSEYFKQIEEIPHNKIIEWTDSHPLQTTLTNIMEFLLSLISMSLVKGKKQNNPVKELIKELRVIFKEFSSIMVFCIQAGLTCSVLKLLSNLQDRYLDRKRAEKVLTYTDVARLARSILIEQQDIRQSEKESFKAIMIDEFQDNNKLQKDLLFLIAEKKDIKNKTVPPAKDLSPGKLFFVGDEKQSVYLFRGADVSVFRKLKRDLGGSNLSLKTNYRSAPVLIGAFNTIFGGFKFDPEGKAPAALESAPMAALMAKEEKAPSVFVTTELQLRKLPPAERAYLPPCEASFTPLHANKKSGGNLTLCILDKQGSSEIDSSGDFEGGESGRLSPEENEARYV

SEQ ID NO: 91256 - protein, 284 aa, Unknown
  Obtained from environmental sample
  DOMAIN (9)...(128): ABC transporter
  misc_feature (1)..(284): Xaa is any amino acid
MNARENISLGESSSGGKRLLNPFIKKKRIDQKISEIEKRFGLVTVHNRKIYDMSVSEKQTVEILKMLYRGASVLVLDEPTAVLTPQETDQLFTMLRNMKQEGCAVIIITHKLNEVMEISDRVTVMNRGKSVTTVNTAETNPQELTELMVGASVSLEIKREPPVTREKPVMEIRGLGCLSAEGTPLLDNMSFDLYGGEILGVAGIAGSGQKELCEIIAGLKKTESGSIMYQEENILGLSARQIKDRGVSMSFVPEDRLGMGLVGGMSIAEYVLLRSYEKKPGVFV

SEQ ID NO: 91257 - protein, 101 aa, Unknown
  Obtained from environmental sample
  misc_feature (1)..(101): Xaa is any amino acid
VIAEFLNALELFLQAAVQMGTHILFAVLGGIMCEKIGNMNLGIEGMMLLGASVGFSAALATANPLIAVLAAGCAGAVGAFIYGIITITLRGNQVVTGLILT

SEQ ID NO: 91258 - protein, 512 aa, Unknown
  Obtained from environmental sample
  misc_feature (1)..(512): Xaa is any amino acid
ANLNSVTANGSSAQTTTQLTLTFDKAITGLSADDITLSGVSGVSKGTLSGSNPYTLPISGFISNGTLNVAVAKSGYTINGSPKTVAIYYINAFTLNSVTANGSSTQTTTQLTLTFNKAVSGLTASDITLSGVSGVSKGTLSGSNPYTLPITISGFTSTGGTLNVAVAKSGYTINGSPKTVAIYYVSVSSDITATLNSVTANGSSTQTTTQLTLTFDKAVSGLTASDITLSGVSGVNKGTLSGSNPYTLPISGFTSGGTLSVAVTKSGYDINGSSRTVGIYYSSGNSNSSVLNYIGEGPAPKYQEYRLTITGNNSFELEVGSKISSGTAAQNGSQFLWTLSPQEGAPFTVQLSSAGIVQIAGIITFNDGSYEPGPGLLTPTHSGSGIFVTLNNLNVNNTSGSGSVLTLEFDKAITGLTAADITLSGVPGISKGTLSGSNPYTLPISGFSSSGYLTVAISKSGYDIKSSLCTAYIGYVYIDMVQIPGGSFENYHYTVMLSSFYMGKYEVTQEQW

SEQ ID NO: 91259 - protein, 74 aa, Unknown
  Obtained from environmental sample
  misc_feature (1)..(74): Xaa is any amino acid
MKKTFFLTAAAVMLTAAMTGCTNVQNAVPVTGVTLSPATATLAPGSTLTLTATVLPADATDQAVTWASDDDAVA

SEQ ID NO: 91260 - protein, 638 aa, Unknown
  Obtained from environmental sample
  DOMAIN (290)...(601): N-6 DNA Methylase
  misc_feature (1)..(638): Xaa is any amino acid
MNFTLDGIRDSYKFNETCQDTVPQAIMAFLESTSFEGAVRNAVSIGGDSDTLAAITGGIAEAYYGVPASIRKHALTFLDERLLKILTAFENVYQPSLEKTVKQATVKIVRKNKKIKIGDRAETMQMSFDMIDEDFAETLTVHEETSSEQLFRHLFEACNILRGPINQDEYKSYVTPLLFFKRLSDVYDEETAKALEESGGDEEYAAFPENHRFSIPNGCHWNDVRACHENVGTAITDAMTGIERVNPDTLFGVFSSFDDAVWTDKGKLTDTRLKDLVEHMSKIKVGNKNYDADVMGDAYEYLIKKFADLSKKNAGEFYTPRTIVKLLIMLLAPKAGETVYDPAVGTGGMLIEAIRYMNDDRQTYGRIYGQEKNLANAAIARMNLFLHGARDFKITQGDTLRSPNFIYRGQLQTFDCVVANPPFSLKDWGAEQFSSDVYGRNLWGSPTDSNADFAWLQHMVKSMDVKNGRLAVVLPQGVLFRGGKEGDIRKQMIESDKLEYVIALTSGIFYSTGVSACVLMLNNNKPAAHRGKVCLVDASQIYTARRAQNIMTEDNINTVYGLCSNYTDVTEKAKVVTLDDLRGKDYSLSVSVYIQKTAKETANPVEVRREFKSTLEAAKTAEARLQELLVKGGYTTNG

SEQ ID NO: 91261 - protein, 176 aa, Unknown
  Obtained from environmental sample
  DOMAIN (52)...(131): Phage integrase, N-terminal SAM-like domain
  misc_feature (1)..(176): Xaa is any amino acid
MENTLITAIEQEMCAALDNGQMERLHKVLEYHLRDVVTADPPAEDGSGEKALLNFIAAKRVEGCSDKSLRYYESTIRNMLLAIAKPVKHITTDDLRQYLDKYQRNGGAGKVTIDNIRRILSSFFSWLEDEDCILKSPVRRIHKVKTGTTVKETYSDEALELMRDHCGSVRDLAMID

SEQ ID NO: 91262 - protein, 422 aa, Unknown
  Obtained from environmental sample
  DOMAIN (34)...(352): Alkaline phosphatase
  misc_feature (1)..(422): Xaa is any amino acid
LKKQIAVVLCMMALVFQPLFAKGSTDTNARNDSIAGQGQAKYVFLFIGDGMAMPQVSSAEVFSTARSSKDINVTKLGFSQFPVIGLTTTYDAGTFITDSASAGTAIATGNKTLSGVINMDPGKTRKFKPITEYIHDKGIKVGIVSSVTLNHATPASFYAKSPSRSDYYDIAVQLAQSNYEYYGGGSILQRTGKNNNQQDAVEIAKANGFTYVDTKDGFNALKPGSGKVIAISPRLQDDGAMPYDLDRKNDELSLADFTRKGIELLDNPKGFFMMIEGGKVDWACHANDAGAAISDILSLDAAVRVALDFAKKHPKETLIVVTGDHETGGLTIGFAGTQYDTFFDKVALQKKSYVAFDDEVLKPYKAKTTVANAKLADLLPAIKESFGIDFNSLSAFQKEQIEFAFQRSMGNEQVRSFAEDKY

SEQ ID NO: 91263 - protein, 166 aa, Unknown
  Obtained from environmental sample
  misc_feature (1)..(166): Xaa is any amino acid
MTIKNFNDVSTARVHIFDVDNTIIRKTSTEYFVQIALKEKVIRFSQIRHLCIDWIKYKLASPNINFIENTVKKMAGLEKDVLERVSDSCFKERIKPNIFIGVKNIIEETLKNGEKVIFATSSFDFIIKPLEQFFGIEGSLACQLEYSQGKTTGNLVGYSFFGPKKK

SEQ ID NO: 91264 - protein, 376 aa, Unknown
  Obtained from environmental sample
  DOMAIN (110)...(368): Carbohydrate kinase
  misc_feature (1)..(376): Xaa is any amino acid
LYANVIKAVNDSKVSVLAVDTPSGLDCNNGKCTSICIKADCTVAAGFYKIGQFFYPGRANVGKLQIADLSYPANIVEEQSLGIFLPDNDCFNRILPARKENGSKIDHGLALLVCGSRGMSGAAALASMAAMRSGCGMVHLAVPESLVDTLAAKVTEPVLHPLAETASGACAASALSELLLLCERMDALCVGSGLSRDLQSSSLVRALVGKTDKPAVIDADGLNAFAGYLPEFAKHKGEIVITPHLGEWKRLFGELWADFPDEPLDRINILRDCAAQFKINILLKGNPSLAVNEKGTAVILPFGNSSLAKAGTGDVLSGIIVSLIAQGCSCFEAAILGAYLHGEAGQLAGTDLTEYSVLASDLMRYIPEVIKSLINR

SEQ ID NO: 91265 - protein, 186 aa, Unknown
  Obtained from environmental sample
  misc_feature (1)..(186): Xaa is any amino acid
MSVSCKYWVLGVYCLVSFPLFSQNFYLELNLNDTSSGNPFARQRSSLEVFRVIEKASRDDKVTGIILNIGSVSRDRTYIWELRRALEKFKSDGKKICAFISNADMDIYMLASVADRIVMDELGTLSMLGYSVGRGYAKQTLEKLGVGVRELRYFEYKSAAETFTRDSMSEADRRQYNAYLDDIFNL

SEQ ID NO: 91266 - protein, 228 aa, Unknown
  Obtained from environmental sample
  misc_feature (1)..(228): Xaa is any amino acid
MGTISIEYSSNLYWLGRYTERTYTTLRTFFNYHDKSLDKDKDSYKEFLENLEIDDKYGDHHRFIRGYLYDEEDCFTVNSTLRFAHDNALVCRNVIGSEPLAYIQLAIDAFNASRDKKNPRLALMPTIDYLFAFWGSLDDKLANGEARTIIKCGKFVERLDLYFRFSYDHKLIKNEYDMLCHVLSRVRKGFCNAQHLAVIADALATESYKVQQDEILESLSKLFEDQIV

SEQ ID NO: 91267 - protein, 293 aa, Unknown
  Obtained from environmental sample
  DOMAIN (30)...(292): Succinylglutamate desuccinylase / Aspartoacylase family
  misc_feature (1)..(293): Xaa is any amino acid
MIKHVSVAALPVAEDFIIQKNRIENNAAKGSKRVCIVTGTHGDELEGQYVCAQLAKILNDGKQKLTGIVDIYPAVNPLGIDTVTRGFPMFDLDMNRIFPGSPSGSLAEVAAYDIMRDIEGADMCIDIHSSNIFLREIPQVRISEQNESALLPYALMLNVDLVWIHTSATVLESTLAHSLNMRGVKTLVVEMGVGMRITENFCMQLVYGILNLLRELGMWKGAGGQTREPLVSKDHGVGFLNSDAGGIFIPSAAHGSHVSSGDYIGMVVDPLTGAVVEETLAPCDGLLFTLREY

SEQ ID NO: 91268 - protein, 250 aa, Unknown
  Obtained from environmental sample
  misc_feature (1)..(250): Xaa is any amino acid
VVYRGTDMTLVGWKESFNMSLITSIPSQKEAVSYLEKTAKRYRYPLIIAGHSKGGNLAVYASAFCSKRVRKRVSAVYSNDAPGFHKQVIESEGYKAICPRIRSFIPQSSLIGMLFEHGETPMVVKSAASGPMQHSLCSWEVTYNNMIDAGELTEQSRFIDNIICEWINQIDESQRQQFIQAIYSILVSCDAESVADLTDDWKNTAGGIINALRNMDKSTKKLLGKIIGDLFKTAKENLGKRGKNNSGGRE

SEQ ID NO: 91269 - protein, 164 aa, Unknown
  Obtained from environmental sample
  misc_feature (1)..(164): Xaa is any amino acid
GHETVIAHLKLNLFPKVYRLSRNEGFGLEVKRRIMLGSFVLSSGYYDAYYKKALQVRALIKDAYTKLFTKYDMVLSPVAPTTAYRIGENSGDPMKMYMGDIYTVSINLAGLPSAALPCGFDSAGLPIGFQIIGDAFSESKLIDAARVYQSRTDYHLQKPKGIKA

SEQ ID NO: 91270 - protein, 292 aa, Unknown
  Obtained from environmental sample
  DOMAIN (75)...(238): Type III restriction enzyme, res subunit
  misc_feature (1)..(292): Xaa is any amino acid
VRLTGAPYPLKVTQAQAKVLNCLAAATGTKLESELLRETTVSASVLTGLERNGLIERTKRLDLLSQRREELLHKTVALTPEQEQVVHGVDLGGFAVHLLFGVTGSGKTEIYLELAERVVQNGRRVLWLVPEIGLTPRLLARLEARFHGKVAVGHAGLNATEKQADVVRLLMNDASLFVGVRNAVMAPIRDVGLVIVDEEQEGSYKSEEHPRINARDLAIKRAQLEGCPILLGSATPSLESWQAAKLGRYKLLRLTQRPLGANLPEVQVVDLRECYRAERRKVLFSPPLLKAM

SEQ ID NO: 91271 - protein, 652 aa, Unknown
  Obtained from environmental sample
  misc_feature (1)..(652): Xaa is any amino acid
MTELKQNFGDRAAQNDPMIHFYEDFLSAYDPILRKSRGVWYTPQAVVTFIVRAVDEILQKEFNLPAGLADTSKTKIKINGRETDVHKVQILDPATGTGTFLAETITRIYEKFRKQGGMWQKYVKEHLIPRLNGFEVLMASYTMAHIKLEQLLSQTGYDATDNQRLRIYLTNSLEEQFPETVSLFAQFLAREANEANSIKRDTPIMVVLGNPPYSGESQNKCEWIMQLMDDYKKEPPADSTLQEKNPDHWLEVHEQSAQKLYERNSKWINDDYCKFIRLGQYFIDKNNEGILAYINNHSFLDNPTFRGMRWSLLKSFDKIYILDLHGNSKKKEVCPDGSKDENVFDIQQGVSINIFVKTGRKAKGALAEVYHIDVFGKREEKYKYLHDSKFSKVNFTKLKPSAPEYFFVPKDYGLKEEYEKGFSVQDLFSVNSLGLLTKRDSLSISYSERELTEKIKFFLDENNSIQDVCDHFDIPLKDNDKWNASISRTMINVKQIKKHITNVLYRPFDKRCVFYNEWFVARLNKTTLDNLQNTNHALIIGRQGQVVGDIGGWNIVFITNSIVDQNIFYRGGGTVFPLYLYHDHEIRKPNLNDTIVSEISKRIDVRYVEEKEIGSYKKCFAPIDILDYIYAILHSPVYRERYKEFLKIDFPR

SEQ ID NO: 91272 - protein, 693 aa, Unknown
  Obtained from environmental sample
  DOMAIN (552)...(642): Hpt domain
  misc_feature (1)..(693): Xaa is any amino acid
MRPSPDSAQYMQYIVDNDFDEKTRVGLDTPPFDPRHTPWMVPVLEEGQSKYSGLGHYTPGWEGLLNGFAPVFDSEGNVKAIAGVDIRDHEIVFAKRMISILTVTQIVSVVLVFASGLLGLIEANKANKAKTKFLAKMSHEIRTPMNAIIGMAELTLRENITSTVKEYILTVKHAGTNLLSIINDILDFSKIESGKLEIVPSNYSFSSMFNDVVNIVKMKIVDSGLRFEINIDSNIPNALLGDEMRIRQVLLNILSNAVKYTKKGFVSFSASGEITEDMVILTIEVADSGIGIKKENLEKLFEDFVRLDFTANKGVEGAGLGLAITKNLVTAMGGDIKVHSEYGKGSTFTVKLPQKIRSHEPFGTIKTAEEHGGESMTIKFNAPKAKILIVDDIDTNLKVAEGLMQPYKMKIDSCQSGFAAIEAIKENLYDLVFMDHMMPEMDGIETTKLIREMGKGNPYYANLPIVALTANAVSGTREMFLSNGFNDFLSKPIDIVKLDAILTKWLPKEKQEKLEAKIVDADAPEAIEIEIGGVDVKKGISMTGGSLKIYMQTLAVFHKDGIQKIAEIKKSLETDNYSLYTTYVHALKSASASIGALDLSETAKTLEAAGRKGDSAFIKQQNAHFLMALEILLNNINTVLSANKKNDQKVPVDFEILKSELNKLKTAIGIFDSDAIDEAANSLPKFYASGRHR

SEQ ID NO: 91273 - protein, 289 aa, Unknown
  Obtained from environmental sample
  DOMAIN (53)...(258): Glutamine amidotransferases class-II
  misc_feature (1)..(289): Xaa is any amino acid
CEEFLEEHFDIVNLSKIPTRKVKEITNEPLIWRYFLTPLPTKLADSQLDEREFVVKCVFRINASENMKGAYVFSCGKNMGVFKAVGFPEDVGRFYKLEEYEGYCFTAHGRYPTNTPGWWGGAHPFALLDYSVVHNGEISSYDANRRAIEMYGYKCSLQTDTEVITYIIDYLHRRKRLTLEEIATVVAAPFWQTIERMEPREREEHEYLRTIFSSQLITGPFSILVGFNGGLMALNDRLKLRSMVVGERGDMVYIASEEAAIRVIEPNLDNLWAPKGGEPVIVHANGGDV

SEQ ID NO: 91274 - protein, 188 aa, Unknown
  Obtained from environmental sample
  DOMAIN (43)...(66): 4Fe-4S binding domain
  misc_feature (1)..(188): Xaa is any amino acid
MAINFLYPEYEVARNYDRCIVCRACERQCANEVHEYVDTLNKMLCDDAKCVNCHRCVSLCPTRALKITKSGNTYKENANWSGKTINEVYRQAGSGGVLLSSMGNPEEYPIYFDKILLNASQVTNPSIDPLREPMETTVFLGSKPHDIERGEDGRIITNNLKPQLTLSMPVMFSAMSYGSISYNAHESW

SEQ ID NO: 91275 - protein, 255 aa, Unknown
  Obtained from environmental sample
  DOMAIN (2)...(160): Protein of unknown function DUF115
  misc_feature (1)..(255): Xaa is any amino acid
MQTESFFVEKKENPIHEVAIVAAGPSLDTQINSLAEFKSHNGFIISADTALGVLLQNNIAVDAVISIDCQHISYYHFMGVNPQDKKIPLILDIASPPLLCGLSSFTPVFFSGGHPLTRYISTQWKYFPWLDTSGGNVTYAALSLAQTLGAKHITLFGADFSYIRSQTYARGTYIYPYFNKKQNRLSPMEAQMSAFLYRSPFLPNEDGQKKDYYETASLRFYRKKLEEKAAMMNVEIKSKPGFGAPINLNYTQKTR

SEQ ID NO: 91276 - protein, 338 aa, Unknown
  Obtained from environmental sample
  DOMAIN (159)...(276): Response regulator receiver domain
  misc_feature (1)..(338): Xaa is any amino acid
VDEKGQRLKVYYDHSIPSTLIGDDLRLAQVVMNFLSNAVKFTPEGGSISMHTRLVERKEDGCVVRVEVSDTGIGISKEQQQILFRSFQQADSNTARKYGGTGLGLAISKNIVEMMGGQVGVESELGKGSTFHFTAFLKYGKAPEEGYEEAANDINWDNVRVLVVDDDRDVLDYFKEVTASLGVKNCDIAASGAEALALIDEKGVYNIHFVDWKMPEMDGLELTKEIKKRAHAGEKSIVILFSSTEWTHIEAPAKEAGIDKFIPKPVFPSNIADAINEAIGLRRIHRPDEQTRDITGIFSNYRVLLAEDAEINAEIVKSLLEPTDISIDCAANGTEAVK

SEQ ID NO: 91277 - protein, 602 aa, Unknown
  Obtained from environmental sample
  DOMAIN (289)...(528): Torsin
  misc_feature (1)..(602): Xaa is any amino acid
GIILFIDELHTLVGAGAAEGATDASNLLKPALARGELRCIGATTLDEYRKHIEKDAALERRFQQIYTAEPSVEDTIAILRGLQERYEVHHGVRIKDEALVAAATLSNRYITSRFLPDKAIDLVDEAASRLKMELDSRPTELDKLERKLLQLSIEKQALTREEDSSSQSRLVKLEKEIADLTAERDAMNLRWEKEKKDVQKIREIKQQIEELKIEETRYEREGNLAKAAEVKHGRIPEAQKKLKALTDHMEGRTEGKEGKPALLREEVSEEDIARVVSVWTGIPVSKMLSGELQKYLDLEKVLEQRVVGQKAAVEAVADAIRRNKAGLSDASRPLGSFLFLGPTGVGKTELAKTLADFLFNDEKALTRIDMSEYGEKHSVSRLIGAPPGYVGYEQGGQLTEAVRRRPYSVILFDEIEKAHPEVFNVFLQILDDGRLTDGQGRVVDFKNVIIIMTSNLGSDLILEAKKLDTIKNALMELLKQSFRPEFLNRIDETVIFNRLGKDEIAKIVDIQLALLSSRLAERKVELKLTKAAKELLAERGYDPLFGARPLKRAIQADLENPLAKAIISGRIKEGDTVTADKNSETGGEALSFKKSAASKREQ

SEQ ID NO: 91278 - protein, 294 aa, Unknown
  Obtained from environmental sample
  misc_feature (1)..(294): Xaa is any amino acid
ARSGGAGQNSAEEFRATYPRSRYSEPLKEFLSQFVKEQQQKKGPPSSLQVGLLAPMTGEDAEIGKFILQGVKLALDGHNARAGNALKLIVYDTKGSPVETARKSKELLTKDQAQLCIGPILSNTAVVSAAMFSDKDIVMITPTANEDGISAIGENIFQMNVTLGTMAQRLAKYAIDNMSIRDFAIIAPSNGFGFAMADAFKDELSRQNIEVAYEEYFAEGTHDFSPTLNRLRGALIRRRMEEIFAERGLMQRVTTLSASDSSRYADSTLAVGGLFMPLTDYEDVAKLSSQVVFR

SEQ ID NO: 91279 - protein, 294 aa, Unknown
  Obtained from environmental sample
  DOMAIN (30)...(293): Aminotransferase class I and II
  misc_feature (1)..(294): Xaa is any amino acid
INKSSKLDNVCYDIRGPVLKEAKLLEDQGCRIIKLNIGNPAAFGFTAPDEIIHDIVRNMQNAQGYGDSHGLFAACKAVMQDFQLKGVMDVGVDDIFIGNGVSELIVMAMQALLNSGEEVLVPMPDYPLWTAAVTLAGGRAVHYLCDEGADWNPDLDDIRSKISSRTRAIVVINPNNPTGAVYERSILEGIANIARENNFIVYADEIYSRITYDGAVHIPMSTIAPDILTVSFDGLSKAWRAAGFRSGWMVLSGDKKSAASYVEGLEMLASMRLCANMPAQFGIQTALGGYQSIN

SEQ ID NO: 91280 - protein, 703 aa, Unknown
  Obtained from environmental sample
  DOMAIN (2)...(155): DEAD/DEAH box helicase
  misc_feature (1)..(703): Xaa is any amino acid
NFIGAEDNQAVVVESPTGSGKTTQLPVILYEAGYSQKGIIGVTQPRRIAAVSVSEFIARQMETPLGGLVGYKMRFEDRTGPQTEIKIMTDGMLLQELKLDPWLSKYSVIVVDEAHERSLNIDFTLGLLKRVLESRRDFKVIISSATINAQVFCEYFGGCPVVKIDAQRFPVTLIYDAPHSGAPPHSGEPVVGPDSDSETAADVLLLKIEKIVTRFIAEKREGDILVFLSGEKAIKDCMNRLSLCRAGSKLHLLPLYGRLGKEEQERVFEAAPKGKTKVVLSTNIAETSVTIEGITAVIDSGLSKLNWYNPNTFTSSLVEAPISIASANQRKGRAGRTCEGSCYRLYTRGDFEKRPLFTTEEIFRTDLSEVILRMADLGITDFEDFDFISTPGREGIEAGIETLNLLHALESDRSLSGIGKMMTEFPLAPRQSRIIVEAILHYPNVLRETLIAAAFLSTQSPYMLPPGEETEARKAHSRFRDDNGDFVSYLKIFKAYCDSSRKDRFCEKNYLDEKAMAEIVNVVAQLEEIVAGLKIPILEGGSAINGDANDYLCCIATGMIQFVCVREGPRVGATKGRGARDGGDRGGFSRRNITYRSLTADRITIHPGSVMFRSDPMYIVAGEIVRTSRMYAMSVSPLSKEILDKLGIHTKEQVAGSKEQRKKGKEKKTSRGGRGGAKALESQGVNAKQTANMPSAHSTRKKR

SEQ ID NO: 91281 - protein, 143 aa, Unknown
  Obtained from environmental sample
  DOMAIN (59)...(142): Region found in RelA / SpoT proteins
  misc_feature (1)..(143): Xaa is any amino acid
MKKTRNDAKTANNFSPPAQEAMHKEYEKYNEIRHNIVNEIKERIENLLKEFNSNPVVSGRIKNFSSYYGKYLRLLKSDVKDPIITDLLGIRIICPFIEDLSVIEEIIKNNFNILETERKGHYNFKEFGYESTHLLIKIPKDII

SEQ ID NO: 91282 - protein, 81 aa, Unknown
  Obtained from environmental sample
  DOMAIN (5)...(43): Ribbon-helix-helix protein, copG family
  misc_feature (1)..(81): Xaa is any amino acid
MAVSTVNISFQEDLLSQIDKIAKDEARTRSELIREAARIYIERKKKWESIFAYGESLSSKYKFTEDDVNKEIQKYRKEKNK

SEQ ID NO: 91283 - protein, 67 aa, Unknown
  Obtained from environmental sample
  misc_feature (1)..(67): Xaa is any amino acid
MAGPMLGGFLIFAGIILLVFGHGLNLILNVLSVLVHGVRLNTLEFSSHVGLAWSGTAYKPFAQKAVK

SEQ ID NO: 91284 - protein, 627 aa, Unknown
  Obtained from environmental sample
  DOMAIN (6)...(198): RNA polymerase Rpb1, domain 1
  misc_feature (1)..(627): Xaa is any amino acid
LCGDRTGDTNLRKDQLLSEEQYSELMEQGKKFDAKMGGQAVLELLAKVEVEKLVIELRHLVKRETSEQRRLEHLKRLRVAEAFNRSKNDPQNMVLKVLPVLPPDLRPLVPLEGGRFATSDLNDLYRRVINRNNRLKKLLEIKAPEVILRNEKRMLQEAVDTLFDNGRRTFSVKGEGKRPLKSLSDLLKGKQGRFRQNLLGKRVDYSGRSVIVVGPELKIHQCGLPKLMALELFKPFVIQKLEEKGLVQTVKSAKKFVEKERPEVWDILEEVIKDHPVLLNRAPTLHRLGIQAFFPVLVEGKAIRLHPLVCSAFNADFDGDQMAVHVPLSVESQLECRVLMLSANNLLSPASGHPVMTPTQDIVLGIYYLTKMSPDRLGQGRTFSGTEEVLHAMAAKQVDIHAKIKVRHNGKMIETTPGRVVFNTVVPEGIEFVNELLNKKRVQQLVERVYNAAGTKTTCKFLDEIKALGYEYATRAGITFGAEDLVIPDEKKEIIDRSQEEVTRIRKQYDRGIITEGERYNKLIDLWTHTTSQIADKMHERLAGDKNGFNPVYIMMDSQARGSKDQIKQLAGMRGLMQKPQKKITGAVGEIIENPIISNFKDGLTVLEYFISTHGARKGLADTALKT

SEQ ID NO: 91285 - protein, 175 aa, Unknown
  Obtained from environmental sample
  DOMAIN (82)...(153): Bacterial flagellin C-terminus
  misc_feature (1)..(175): Xaa is any amino acid
KTGTISDTNRQALDLEFQNIITSIADIGLNTKFNQQSVFNVPYNPVVSVGDYTPVSIFTGDIATGPNDTLGLNSPTDNIRTVAAATAVRPILYDAIQSVSLIRASIGANQQQLTSVAESLGIQVENFTAAYSQIRDANMADEVINLTKFQILNQSGTSALGQANQAAQLVLQLLR

SEQ ID NO: 91286 - protein, 357 aa, Unknown
  Obtained from environmental sample
  misc_feature (1)..(357): Xaa is any amino acid
RDLFMSKPVAQRPCKIYRITGSEPLAKIISLRKPCFAFLSNSVLLEDTKANAGYEFDVVFVEDHADAYPLLKSGQIDAYIALDNTESVFDVFGNVTGENFFPLIFRSFALLTGNEELSPIIGVLDKALDANTLAYLTDIRKTGYQKYLGTKLYAQLTEEEKSFINANPVIPIAAEFNNYPVSFFDTETKEWQGIYFDALGEITNMTGMKFEPVSENNMQYHELLSVLEDGKAQIISELYRLKEYEGRFLWSEVSLLQDNYAFITRSDFHHIDVSEVSYLRVSSCKHSHYSELFKKMFPGNQNFIEYDTQEETWDKLKSRKIDAVFSSRRRLVTYTNYHEEAGFKLNLLFDNEFDTSF

SEQ ID NO: 91287 - protein, 309 aa, Unknown
  Obtained from environmental sample
  misc_feature (1)..(309): Xaa is any amino acid
MKLIIPFTRSYAEIKRRAREDASQAKPLSPIIDIVFKNLFSGKDEDSREALRLLLSSCIHRQVQDLRLQNTEILPDFLLGKVFRLDVHVTFNDGEQADIEMQVKRSDDDLKARSLLYASRLLESQLRRGERFKDAKRVYIIFFLDFVLFPQSDKVPRRYVFMEETEHDRLNELLEVVYYEMPKTADAVREYFEGKETLKTLPAEQKWCIYFKYRVKEGMEPLIDELRRGEEGIMRADRALKKIERDREKRARAIFWDNQRLVRNSDMRAAKEEGKEEIARNMIARGYKFEEIQAITGLDMDKIKSFDKP

SEQ ID NO: 91288 - protein, 470 aa, Unknown
  Obtained from environmental sample
  DOMAIN (14)...(469): tRNA synthetases class I (I, L, M and V)
  misc_feature (1)..(470): Xaa is any amino acid
ELAKAYDPKSFEGRIYRLWKEQGAFKPEAAQNAVAKGNGQPFVIVIPPPNVTGVLHLGHGLNNSLQDIVIRYHRMRGEPVLWVPGTDHAGIATQNVVERKLKEKGTSRRELGREKFIEETWKVKREHHAIITEQLARIGASVDWDRERFTLDEGLASAVREVFVTLYERDLLYKGNYLVNWCPSCGTALADDEVDHEDTPGKMYHLRYYFANAEGDTARKTAINGDAPAGVYVELATTRPETLLGDTAVAVHPEDERYAGLKNKDGATVTVRLPLTDRDIPVVFDTYVDRAFGTGVVKITPAHDPNDWEVAKRHNLPVLNILNPDGTLNNEVPTQYRGLSVNKARIAVLEDLKAGGWYIKEEKITHAVGHCYRCHTIIEPFLSEQWFVRMRPLADKALASWRRGELIFYPRKWEHTYQHWLENIRDWCISRQLWWGHRIPAWDCKDCGKTSVSRNDISVCPHCKSKNMSR

SEQ ID NO: 91289 - protein, 70 aa, Unknown
  Obtained from environmental sample
  misc_feature (1)..(70): Xaa is any amino acid
MVADRLLDSIRNRGIPHEASNVANHITISIGVTTGTVLHTFSGDNYIQRADKALYISKQNGRDRYTFLPL

SEQ ID NO: 91290 - protein, 609 aa, Unknown
  Obtained from environmental sample
  misc_feature (1)..(609): Xaa is any amino acid
SGAQWRSNPQDAAYDPLADTVTGYFLESQFSLEYADAAGVGMTLYSGVNSVALGVYGYELAGNCLEVRYSIGDIAHNYIIPPAAPEQRMLTFLDKMEPDDRRKVEASYRLYDINNLRSSDDKSALLASYPDLSRTKIYVMRDNAQEYMKELMEGFFAQAGYTYDDYYEDSSRYTVSGGEEKPAFNITLRYTLDGRSLLLTVPFDKIAYRPAYPITQLALLPFMGAGGENDKGYMLVPDGSGALIYFNNGRQNQIAYNNNVYGWDDAMPRDAVINDNKAPFPAFGIQKNGNALLCVIEEGASYAGVRADVSGRNSSWNNVYPRFTIVHGAIIDISGRSDRAVYLYEKNLPAGEGITLRYTPCATDGYAGMANEYRSWLMRNYPSLGMRAENGVPIAIEIPGAVNKTQHRLGIPFDLPLKLTSHKESKGMIDDFAQWGWKNVRIKLSGWFNRSVDHSVPNKIKLIGELGSKKDFKNMLSAAEKNGYTIFPEADFLYMRDVKPFGGFNLYRDAARYVNRKRIEKYPYSFVWFGERIRWGKLSYIARPAYMMSLIDKFTRKAARLGLSNIAFRSMGAKLSGDYHEKRLVSREASMKMRQEKLAELSGKGTGIL

SEQ ID NO: 91291 - protein, 193 aa, Unknown
  Obtained from environmental sample
  misc_feature (1)..(193): Xaa is any amino acid
MNNRQKTGDWGSISRSYHVQKTILDIVYKICRAVLLFGLCFLIVQPLLDKLSVSFMEQQDLYDSTVVSIPRHFTLGNYRLAGELLEFGPALLQSIIIILVSSLLQVSACTLAGYGFARYKFPLKNFWFMCVMLIIVVPPQTIMASLYLNFRFFDIFGLLRLITGDPANLLDSAASYWLLSATGMGLKSGPCIF

SEQ ID NO: 91292 - protein, 275 aa, Unknown
  Obtained from environmental sample
  misc_feature (1)..(275): Xaa is any amino acid
SIPKTALPRIYFIDREIASGRYPNTRTLAEAYATGTATISRDIEFMKDMMNAPIEYDYTRKGYYYTEKTFRLPAAFASAEDMLALGMAKTLLSLYQNTPIYDAAKELMESVTAPLGGGEDTRWYEERVIVPPVPAVQFSPEVWNAACEALRKNRVLKFEYRSTWKSGYTPRRVRPYQLLFDNGAWYLYAYSIEGRGMRMYSLPRIRNISLEDETFVFPAAADYRARIDGSYFGAYSSEKTRRFRIAFYNDGAMRIKERLWAADQKIKETPDGVIL

SEQ ID NO: 91293 - protein, 480 aa, Unknown
  Obtained from environmental sample
  DOMAIN (1)...(274): Glycosyl hydrolases family 2, TIM barrel domain
  misc_feature (1)..(480): Xaa is any amino acid
MKQLNINAIRTSHYPNDPLLYDLCDEYGILVMDEADVETHGARRKIPASDPLWTAACIDRMRRMVLRDRNHVCVFFWSLGNEAGKGGAFSSMRKAAESLDNTRPFHYEGEHSKDSSDVISRMYPDEKIFKTLCQKQTLKTSANPLIAYAMFDKSVPEKLYDKMPVLLCEYAHCMGNSLGNFSEFTEAFEKYFHLCGGFVWDFVDQAIRRKDAETGRDQWLYGDDFREVYSRDGYKSKRRTGGDGNFCGNGIVAADRKPHPAAWELKKCYQTLCVEAVEGQENRYRVRNKQMFSGLEDYTLKWQCACDGAALEEGEVSDQTLAGIGPGQCAEIVVKPAAELPAGGHVTLTFSWRLKETRAWADAGYEQAFDQFTLRKNVKRDDEAAGNTSRAADEFFIAPIQPNLCRAMTDNDVGAANFVHFLRPFILGARWERAAARQRALRTAESHDAQTGARRVHTEWKHPLCKKLETDYTVYKDGSM

SEQ ID NO: 91294 - protein, 261 aa, Unknown
  Obtained from environmental sample
  DOMAIN (63)...(198): HD domain
  misc_feature (1)..(261): Xaa is any amino acid
MKADVRAALYEGYTEPIRDALWGHIYLTPAISALTESPPFIRLQRIMQLGPTLRVYPGATHNRASHSIGVYHLARRLLAHLAEEGADSWLSPVGIKSFLCAALLHDLGHFPFTHSLKELPLEKHEALTGRLILSNPIKDLVSAAGGDPYFAAAIVDSDSGSESQRLVTQEKWEGELKFYRKLLSGSLDPDKLDYLSRDARYCGVPYGAQDVDFILSRLHPHKERGLDIDSRGIPGLESLLFSKYLMYRSVYWHHSVRSATA

SEQ ID NO: 91295 - protein, 68 aa, Unknown
  Obtained from environmental sample
  misc_feature (1)..(68): Xaa is any amino acid
MVYTGEESGRIDELLNKAAEFYDKEIRNVVDSLASIIEPVLIVILGGIVGGILIALYLPVFSIGKLIK

SEQ ID NO: 91296 - protein, 570 aa, Unknown
  Obtained from environmental sample
  DOMAIN (510)...(545): UvrB/uvrC motif
  misc_feature (1)..(570): Xaa is any amino acid
IGSPEAYEGAAVKISVGQEFTRRDFLIALSDMQYVRNDMSLQRGSFRVKGDVIEVQPAYEEDAVRIETFGDRIEAISYISPLTGKTKQKFEEVTIFPAKHYMTTGNVTMKSAVDRISEELDERLSVLRNSGKLVEAQRLEQRTRYDMEMLTEVGYVNGIENYSRILDGRDPDSRPYTLIDFFKPPYLLIIDESHVSLPQIQGMYNGDRARKDTLVNHGFRLPCALDNRPLKFSEFESLADKTLFVSATPGDYELEKSGGVIVEQVIRPTHLVDPPIELRPAANQVDDLIDQLRTTAERGERALVTTLTKKMAEDLTEYLGSIGLRVRYLHSEIDTLERTEILKSLRVGDFDALIGINLLREGLDLPEVALVAILDADKEGFLRSTRSIVQIAGRAARNINGRITLYADTITDSIKRAIEESERRRNKQLAYNKEHGITPRSAERRIDAMTSPYGTSSTIDTDLDDADIAQTAEPRAGYGKGGKGKRSTKQRKDAKQRGRGNKISSTNTENNRLLDIEAEMIEAAKNLDFERAATLRDKMAAMIQTTERPTWVSPVERLRDTIITKSERKK

SEQ ID NO: 91297 - protein, 354 aa, Unknown
  Obtained from environmental sample
  DOMAIN (5)...(351): Predicted permease YjgP/YjgQ family
  misc_feature (1)..(354): Xaa is any amino acid
MILDRYLTKQFLPVFAVSSVMFVLLLEMVDLFANLPRYLNNEVAAKDVLRVSVFYLPKGFSYALPIALLFAAAFILGELYARNELTSVFAAGIPFWRFSIALLIIGFTASIFSFFFDDMIVIPTLKMKNDLSRELLNERRSQFQADVVVKTNNGQLIYAADYYDGSGKVMHGLSVIEQDENGGLVNLIRVQRAAWNKEYWEFSGSVIYEWKNGFLQYRNFEGSDKYREDPDTFRRSMVNIEELHFFDARLLVNDLKIAGLPYTNALADFHHRFSFSSVSFIVVALSISMGGRFRKNIMLMSLLSSLVSAVVFYVMEMISMMMAKLGYIPPFIGAWFPVFVFIIVAFLLLRTAKT

SEQ ID NO: 91298 - protein, 296 aa, Unknown
  Obtained from environmental sample
  DOMAIN (25)...(170): GTPase of unknown function
  misc_feature (1)..(296): Xaa is any amino acid
LIKLVAELEDELRRGDRIKALDEGIIVTIAGPANAGKSSLFNEILGYDRSIVHDRPGTTRDIISERLNIDGVTVKLFDSAGIRKTGDAVERLGIDRTRSAVAEAHAVLWVTSAIEAFCDGEQEGVLETAGIGGKGDDCVQHVDIYDNYVDNRGENHCGGDRLVVIINKIDVDNTLSPPANSYLIEKRHFCEERGLKYVETSITQKINYEQLFNTISAAIKAVMKDVPTPTIIINERHRGIVNAIIGDLRDCLDNFDREEIAAHCLRVALDRLAEFSGHVGSDEVLNGIFERFCIGK

SEQ ID NO: 91299 - protein, 308 aa, Unknown
  Obtained from environmental sample
  DOMAIN (2)...(281): PHP domain
  misc_feature (1)..(308): Xaa is any amino acid
MIDFHTHSNISDGDLPPAILIKEAVKRGLIALALTDHDTINGLESAKIAAKKENIRFIPGIEVNINWTRGKSSNDIPHGVPGLGPGGEFHLLGLGISSPTPAFISAIESLAHRREVRNREILDRMVELSMITPNGQDEAWNELLTIAGKTSVSSGSGNSLGRPHFAAFLIKHKIVKNVNQAFARYLGVGKPLYVPKEGLVFEEAAVLIRESGGIPVLAHPISLYVAWGRLPDLIKILKDMGLMGLEAWHPTAKQGSCRRLETLARSLGLYVTEGSDFHGSIRPDRKLGYSSKGRKIDDSLLDAIPELR

SEQ ID NO: 91300 - protein, 307 aa, Unknown
  Obtained from environmental sample
  DOMAIN (208)...(307): Magnesium chelatase, subunit ChlI
  misc_feature (1)..(307): Xaa is any amino acid
MGVFTFMPSGAGGIIVRVETDIRRGIPGVDISGLAEGAVREARDRVRAAFRNSGFSFPLDRILINLAPAGLKKDGAALDLSIALSVMAAAGIITISGNLLIMGELELSGRIRPVRGVLAAIAAGLAEGIREFIVPAQNAAEAAILADKGVRFTAAENLQGAVHALFMREKNGVLPESLDEVFSSAAPIAADAANLSANAAAAGEECGDFADVRGQAIYKRALEIAAAGGHNMLVFGPPGAGKTMLARRLPSIMAPLTPDEAVEVTRLHSLAGPRNGFIDPVNYKPSFSRAASYRKRGGHPRRRQNSA

SEQ ID NO: 91301 - protein, 292 aa, Unknown
  Obtained from environmental sample
  misc_feature (1)..(292): Xaa is any amino acid
TVASDEGAGPLTVTVKSTVDNTKYDTATVTLKNPGENVGVNSVTVTPAAASVERGKSVSLTADVSVSGTISKEVEWSVSGTSNPDTKITNISSDTRNASLTVAADENASTLTVKATSKAQSEKYGTADITVSGVIAINNIWLMGIPDWPSFPPGTPMAKQSDGTFTWQGDVAANTTFRFSLTDTTDWDDKYNGNCFAPETFVEGGTAVTLGASGNVIKRFDTDTSSGATDSTRNTWKLNAGKYMIRVNPGELKMYVTDISSVSKLPTPAKPGLSNQGVATWAKLTDETMLPA

SEQ ID NO: 91302 - protein, 458 aa, Unknown
  Obtained from environmental sample
  misc_feature (1)..(458): Xaa is any amino acid
VNLHQNELSELLKELKEKNVSTVNLHQSELSALLENLKDKNDSAINLHQNELSALLKELKDKNDSAVHLHQNELSALLKDLKDKNDSSVHLHQNELSALLKDLKNKNDSAVHQQQTELTAALKDIKDKTYSSVHQQQTELSAVLKDIKDKTHSVVNQQQTDLTAVLKDLKEKTDATIHLHQNELSSTIKEFKEKSNAAISTQQENLNASLSKQMKEWKHLCADTEREIIAANEKRLDEYRKSHNEAFKQLTNLADDAAKLESELRLSMQEAISRVKSDFTAFEKESAVSRDTVAAAFNAQTQSLRKEIDETNKELEGLKKQAHDNLSEKLTAFENEFTVELGKRTSEIGRQIADWQTGLENRIESSGDKIANKWKLIEEKIISEHKKDIAALSERLTSDMERLKSEETAFEEDIRKDMNNIDETRSSFNEQIKKDLEEMRISADSEVKVQVGQYQLLM

SEQ ID NO: 91303 - protein, 53 aa, Unknown
  Obtained from environmental sample
  misc_feature (1)..(53): Xaa is any amino acid
MRGQFVDFRIGDLTIPVLPTFHPSAILREETLKRPAWEDLKLLKSRLVEMNLL

SEQ ID NO: 91304 - protein, 305 aa, Unknown
  Obtained from environmental sample
  DOMAIN (91)...(261): Type III restriction enzyme, res subunit
  misc_feature (1)..(305): Xaa is any amino acid
MVPFGGRDCLGYIVSQKDSPPTGMPSETIKRIRRVVDKEPVFDGRDIELAKWIAGYYFCGLGQALQAMIPSGKRATDFSSLAGEEEITASPLALSDEQQRALDAIIKKETPESSGTAALFYLFGITGSGKTEVFLRAAEAMLKEGKSVIYLVPEISLTHQTADVIWKRFGNTAATIHSGMSPAARLSEWMRIRTGQVKIVVGPRSAVFAPVLNLGLIIIDEEHDGSYKSGNTPRYHARQTAMRRCAAEGARLLMGSATPSAEAWKLMKDGVIKRLDLSRRLSGGQVPDIIPVSLEKTRRLPYPRA

SEQ ID NO: 91305 - protein, 207 aa, Unknown
  Obtained from environmental sample
  misc_feature (1)..(207): Xaa is any amino acid
VNEQPSYSVASRSAKGGALLIGRQACVQVMNFVGMIFLARYLSIAEFGFYGIVFFLFSFISNFGDIGFSASLLRQREEPSKADYSVIFSAQFALALFAGAVFYLLSPLLCKAYKLPPSYTVHFLLISLSLVATALRSAPTARLERHLDFKWLSVIEIIQAFVYNGMAAVMAFKGYGPLSFSLSLLCRVLIGSILVNIVSRISMKLNL

SEQ ID NO: 91306 - protein, 110 aa, Unknown
  Obtained from environmental sample
  misc_feature (1)..(110): Xaa is any amino acid
MMDTPIAPFLGGIVINRVTWNKISPANQTKLLQVTQKTAGDFEAVMPRTVTNAIAMMQKEGLKVNKVSSAQEQLWQSEVQKAMPSLMGNTFDPELYNKMNEILRKSRSGQ

SEQ ID NO: 91307 - protein, 355 aa, Unknown
  Obtained from environmental sample
  misc_feature (1)..(355): Xaa is any amino acid
METRGPLPLKILSRAEEVICFGALSLLALIPFTEFILRQFRVVIPATRLLMPQLFLITGFFAGMLTAKLGEHISITAVQYIKNDRVKRTLDFATSLLSVFILTILAWNCVSYVKYGLGRMIGPIPDRVFAIAMPLGYAVIALTFAIRKRTAKERIVTLAALLVGTAAALPAIAKIIWGFDLPDSVYSWGETMKDVTWLFRVPLILFLILAAFSGMPIFAAIGGIAMVILQAAGLEPEAAPIQIFSALTEMDIIAIPLFTLTGFFLSESKAGERLVRTFRCFFGWLPGGMVIAAVLICAFFTSFTGASGVTILALGGILHLILVENKYKENSSIGLLTSVGGIGLMFPPSLPIILV

SEQ ID NO: 91308 - protein, 458 aa, Unknown
  Obtained from environmental sample
  DOMAIN (108)...(351): Methyl-accepting chemotaxis protein (MCP) signaling domain
  misc_feature (1)..(458): Xaa is any amino acid
MLNKYWKKGLYDRSYKDLSANNTIKHPNNDELTEIYHSLKKFKKEDLYNCTCCGYGKCESMATAIYNKLNKPENCAHYILALLKEEKSVEELNRQLKEHIARASELIRGITALVNKLNNAISSQAETIANSSVATEKMIGSIKETSEMSRKKQESIKGLIDDADKSQESMRGTIQSVEDISKSVEGIAETIKIIASIAANTNLLSMNAAIESAHAGEAGRGFAVVAGEIRRLSETTRENSVNISKTLKNIIAGVSITEKQSGNTGTRINTMSKEIGSFAKTMSDLINTFGELSAQSGEITAALDNLQSQSDMVKTDYAEILSMTEKLRAAMIGLTMLSKKKVLVVDDDEPILIMTKDILKDDYNVTTINSGKAALDLFLEGYIPHLILLDLYMPEMGGWDTFLRIRDISKLHKTPIAIYTTSEDPKDRAKAKELGAVDYIKKPVAKAEMLEKVARLIK

SEQ ID NO: 91309 - protein, 139 aa, Unknown
  Obtained from environmental sample
  misc_feature (1)..(139): Xaa is any amino acid
DHNPKIQGSYDDGWPSNIADWYHEREATIKPEDKELWAAYGVESNAELMDIDPPPNPVWFPAWQVAPPDGSDAQIAWTRAGEVYKKYLPRIIMAKPAQFEELWQEYVNELAKTGLDKYEEFMQKEVIDKRIEKWGHKNQ

SEQ ID NO: 91310 - protein, 207 aa, Unknown
  Obtained from environmental sample
  misc_feature (1)..(207): Xaa is any amino acid
MIAYVLSRQEFVLRKPFTFVLILSMYINAGLIPTYFLIRSLGMVNSFWVYIVPGIVNAFNFVVMRTYMRTIPESIIESARMDGYGDFYIFIRIILPLCLPVLATIGLFVAVGSWNAWFDTMIYNSGRVNLHTLQYKLMEYLQSSQTQTKSAAAIGSMGMAQNLASSMVTPVSIRAAITVVAALPILVVYPFLQRYFVVGINVGSVKE

SEQ ID NO: 91311 - protein, 285 aa, Unknown
  Obtained from environmental sample
  DOMAIN (54)...(282): Receptor family ligand binding region
  misc_feature (1)..(285): Xaa is any amino acid
MPKYKNLAKTKCLLFLTVIIIAVTGCDAKSAKQEYITIGALLPLTGEDSDEGFRALNGMYIAKKEINENGGILGKKLDIIVLNDRGNEEYIVQQYNKLKEKGVAAIIGSSYSGVTIALAKAAEKDGIPVISPTASSPDVTKGRKNVFRAIFVDNYQAHVMAFFARNSLNAKTAVVFKNKNNNDFNHIVEIFIESFKEFGGQIMAVETYSTWNDFAGILRKYVNNPPDVIFCPEDYVPAAKLANTAYEAGLVNTPILGSDAWDGLLAYIYNPDTMKNVYYSAPFSF

SEQ ID NO: 91312 - protein, 137 aa, Unknown
  Obtained from environmental sample
  DOMAIN (8)...(38): Flagella basal body rod protein
  misc_feature (1)..(137): Xaa is any amino acid
MNSFAKTIDLLHRAMDVGVVRRQVIANNMANANVPNFKRSIVNFESELKRALETEKQRPALELTVTNPKHIPNWKERDYRDVQVRRVLDYTSTYNNNGNNVDPEQELMLANRNQMTYTLLAQSAAFEFSQINQVLRG

SEQ ID NO: 91313 - protein, 128 aa, Unknown
  Obtained from environmental sample
  misc_feature (1)..(128): Xaa is any amino acid
IRRAAVIINKIEESEIEETEEIDETEEVDEIEEIDEIAKYKETNKIEEAEESEEVEELEETNEIEETEESEETNEIEEVEELEETNEIEETEESEEVEETNEIGESEKTEENEDKIDEKTEPPHIIYL

SEQ ID NO: 91314 - protein, 304 aa, Unknown
  Obtained from environmental sample
  DOMAIN (135)...(168): Tetratricopeptide repeat
  misc_feature (1)..(304): Xaa is any amino acid
VNYYELLNIKRDADVNDVKRAYFSAVKLHSPDSDPEGFKAIRIAYETLIDQKKRAEYDAFFTASGDLQNDLLAARELIRENKYKQASEFLAELNGKNPDSTDVKRLLATVLWYLKKSGTADKLCGELLEEDPSDYETLLLRAKIAATMGHKDKANKYFTDAVNLDPLNPKTWVEYMRFGLTDVRYQVSNIFYRAMEQDKNMFRDNYIMYLVGAHETNLFNDNIYLEYFDKFAEFYINDKNPDEEIYFEVMRLLPQFLMNDELVPFVEKYCLRLKKANNTVMKTKKVLCIYMLPSPYVSFARINE

SEQ ID NO: 91315 - protein, 156 aa, Unknown
  Obtained from environmental sample
  misc_feature (1)..(156): Xaa is any amino acid
MTLNKDQEEWLREFSNHYSVANRNANRGPVSKEMFLEAGFAVQHLPNELKTEALCLAAVQQDGKTLEFVPEALKTETLCLAAVQQNGWALQYVPDAQKSEALCLAAVQQDCYTLQYVPDAQKTETLCLAAVQQDGGALAYVPDELRDKVQKENDNG

SEQ ID NO: 91316 - protein, 156 aa, Unknown
  Obtained from environmental sample
  misc_feature (1)..(156): Xaa is any amino acid
MGEILRQGIDAYRQSMNPSGKTPDDVKKAPPPEKTGGVYNNADGLIKTVPAQSAESKTRRVAKFLILIGSDKASKILGELDSKQVEEISKEIASIKGIDQEEANAITAEFQSLLSGAYRYSGPSFGGVETARSMLHAALGEEKGEALLQKTILSLP

SEQ ID NO: 91317 - protein, 289 aa, Unknown
  Obtained from environmental sample
  DOMAIN (41)...(256): Nicotinate phosphoribosyltransferase (NAPRTase) family
  misc_feature (1)..(289): Xaa is any amino acid
VRVEGSLIECQIIEGLLLNVVNFQSLIATKACRVWLASGKGNIMEFGLRRAQGYDGAISASRAAFIGGASGTSNTLAGKVFGIPVMGTMAHSWIMSFDTEEEAFDCYASLYPDRTIFLIDTYDTLKSGIHSAIKAGKKLTAKGKNFGVRLDSGDIQYLSTEVRQLLDEAGLEKAFITVSNDLDENIIETLVKAGAPVNSWGVGTKMVTGAQAAAFTGVYKLSARIEGKKAIPVMKFSDNPEKTTNPGVKQVWRIRDKNGEAVADVLGIDGADEITTGQRFCFWHPSADY

SEQ ID NO: 91318 - protein, 199 aa, Unknown
  Obtained from environmental sample
  misc_feature (1)..(199): Xaa is any amino acid
TSEFPGYVEKIEELRKSCETGEAVVTGRCTIKGFPAVIGIMDSRFMMASMGSVVGEKITRAIEYATANKMPVIIFSASGGARMQEGIISLMQMAKTSGAVARHTEAGQLYISVITDPTTGGVTASFAMLGNIILAEPGVTLGFAGKRVIQDTIGAVLPERFQTSEFVGEHGFVDAICCRSELPDMIAKIIKLHGYKGGQ

SEQ ID NO: 91319 - protein, 577 aa, Unknown
  Obtained from environmental sample
  misc_feature (1)..(577): Xaa is any amino acid
MTRLNKLLFFIFFSLLIVLSAAAQELYWEQAEAFTPRAGNFPVSAYSDDFSVIAWQEITTNRDASVTSGGFINVYLAVKETGKDWEQRGSVGGPYVYLGTEPSILSMVIDSKGRILIAAASGNAQAEILISENKGRNFSKSAVNLGFENSVAPRLFVRADGGYLLFVTRGQAQSVSILYSRSDNGTNWTPFGFFTPENAVSLNFLPTHASLDRKDIVFFQSLAIGADSSSTYQLYYKTSEDGGRSWTDSRRFTTFNDPVVQNQNNADNFDNQRAHLTKYKDNLLLVWERRQSNRTPQIYSAVINSSINIVGRVERVNSSEAYCNNPIGFTYNNIPTVVWFDNRSGNNRIILAQRGDFDWKNHLISGVSAEASFARPVVSRDGVFVFWQTTVRDTGRIYMLAPDHSVASPIITAVNFTPSRVSRSERARVAWNIPADTSGVLGFSWSWSQDPNAVPPEQVMIYNIGNASNLNLENNATNDGAWYFSVRAHDYAGNWSAPARISYNRKNTPPPNVKIIDPQLDENGFLLSNDFSMMWEPSSDPFVAGYTWNLQYLGANPSTAISPPPSGIMGTNTSVKY

SEQ ID NO: 91320 - protein, 171 aa, Unknown
  Obtained from environmental sample
  misc_feature (1)..(171): Xaa is any amino acid
MHERIIILGAGVMQGPAIRIAKELGLFTVVADGSSTAPCIPMADRFEKIDLKDKEGIEAMARSLQNSGPLAGIMTAGTDFSATVAWVAEKLGLPGVPYEAALNASDKARMRSCFKKNGLPSPEFITINNSDKVDVAPFSFPLVVKPVDNMGGRGCRRVDTIDEYREATTEA

SEQ ID NO: 91321 - protein, 355 aa, Unknown
  Obtained from environmental sample
  misc_feature (1)..(355): Xaa is any amino acid
MSLKMAVDALQTLSKNHIWVLKATKKKEELKEKVKTDFIWTLKTIIKSFENACDMKKIKAEITPALLSAGEWSTWNGKAREILKSNPEFGVSPDNIDIFTVRDRPISVMEKYYNEFTAQKNFFDRISIMRDFTNSTDTGSDSEYFMEMLSYFTGFLRSASDTTEQIASYLLLKEISVKYPPVNSALTVSFEDIFAKINDVRAVFKNLKDAKFREELLLNIKLFMGNWPDIYIKLFPCALMPSIITHLVKEGYENKLTVMCQDLYENFRDNREALVWLYKNSGNSSWFMAANIGVEKQLITLIHILDITYRDIENHKDTVENRKINKQVYNILFKDGELTNFLDNADEDTIIRIFT

SEQ ID NO: 91322 - protein, 297 aa, Unknown
  Obtained from environmental sample
  misc_feature (1)..(297): Xaa is any amino acid
MTMNAIFMMAIIPLVSLGITMMDTDIMRTGIDFGIAFLCVLSLILIRSKMPLKLVPVFPVTIFGLYCLYLLYTGHLNLWAAVWILTFPLIVIFLCQIIVGIVESSIMLAGIIFILLAPSMPPSQQEFTIRIRFIIGYILVMSLAIVYEYISIKKDQKEKILKAELAQEKNIIQTMKDNINQGIFMMDSELKILPQYSKTLISILSYYDSELAGKKFLDMLQASLNTNQLKIMRDYFSMIFSKAKSAKVLESVNPISEFEYNIDDRTKTLTTKFNLIEQPWAEPVIIGIIQDIPGKKS

SEQ ID NO: 91323 - protein, 350 aa, Unknown
  Obtained from environmental sample
  DOMAIN (62)...(189): ATPase family associated with various cellular activities (AAA)
  misc_feature (1)..(350): Xaa is any amino acid
MGKASDTTAKGLLHPEKRPEEDNRDMALRPRNIAEFQGQKAMKENLAVFIEAARKRNESLDHLFLIGPPGLGKTTLAQVVAHELGVDFKVTSAPALEKPKDLAGILTTLNEKSVFFIDEIHRLKPAIEEMLYIAMEDYELDWIIGQGPSARTIRIPIQPFTLVGATTKAGNVSSPLISRFGITLRFSFYEDQDMEAIVRRSAGILGIAINDDAASLLAKSARGTPRVVNRLLRRMRDYAQYAGSANITLTTVKDGLTKLEIDALGLEKQDRDILKIIIERYQGGPVGAETLAISIGESVETLEDYYEPYLIQSGLLQRTPRGRMVTSLAYGHLGLTPAGNGEVSLFNNEQ

SEQ ID NO: 91324 - protein, 604 aa, Unknown
  Obtained from environmental sample
  DOMAIN (22)...(541): ABC transporter
  misc_feature (1)..(604): Xaa is any amino acid
MIEELSVRNFALIDSLNLSFEKGFTVLSGETGAGKSIIVGSLSFLFGAKTDSEIIRSGSEEANVSAVVTVDNKNRDALQWLSQREIEPEDSRLVIRRSVKASGRNSIYIQNVPVTRNDLAEFMGFLFDLHGQHTHESLLRKETHRVYLDRFSGLENEAAAFCQVFTELAEKRKTLESLNRSEKEREQRLELLNYAIEEITKAAPKSGEIKELEAETQRLSDFEKLSLHVNAVSSSLYEDSESTDSAISLLSLGRRLRASLENAASIDNSLSPLLKRLEDIYYEAEDLAAEFRNYRGRLTYDPAKLEETEERLALLYKLKKKYRPAGQPEAGGSVGVSSDEGGILAYKAEAEAEIEAISGAGENQDKLKAEIGRLEKDIAARAGVLSAKRSEGAKRLSEGITGILSRLGMPKAIFSVSVKPKTREGGSGLVCGSYGADDVEFLISANSGEPLKELARIASGGELSRVMLAIKTILLNSDSDAAGTGAEVLIFDEVDTGIGGEVALSVGEYLARIGKSRQIFCVTHLASIAVRADNHLKVEKKVVSSGGVGGAVSDSGERTVTEVSQLKGLTRRQEIARMLAGDSGEVALAHADELLAKYSVVKNG

SEQ ID NO: 91325 - protein, 292 aa, Unknown
  Obtained from environmental sample
  misc_feature (1)..(292): Xaa is any amino acid
AQTYNAGFTRESSVNSPGQYSKRGGIFDIYAFGNENPIRLEFWGDTIDSIREFDIFKQRSIKPISRITILPMREFSPGVSVRDDALLKIKKYCEKKGIDKKNYDFIAHSWSVFNEIDGLEWFYKWFDRKETNIFEYFPSNTLIIQNDLTDFDKCYEREIANYESHKSRVPEIVAPFVSQPEELLISPEILKKYDGFRTCFVNAGDRKNYSNYIFDFMNQHSFNGDFALFVKDLHHKREMGFEVTVFAENRGYADRLKEMLEEINVVSPPIEINAVRNGFFSLKKRFSHTAKA

SEQ ID NO: 91326 - protein, 251 aa, Unknown
  Obtained from environmental sample
  DOMAIN (178)...(251): TRCF domain
  misc_feature (1)..(251): Xaa is any amino acid
LYMRIEKLVPNAKIAVAHGQMEGEKIDKIMEKFIAGQYDILVCTTIIENGIDIPNANTIIVENCDKLGLSQLYQLRGRVGRSSRQAFAYFLVKSFRTVKDDSMKRLKALEQYTDLGSGFQLAMRDLELRGAGNLLGTDQSGSISAVGFELYCQLLKEEIQRLRNENLQIEKAVETKIRIKLHGYFPSDYVSDTSLQIMLYQKCTSAKTVDELNDFQNEIVDRFGALPEPVVELLLFMGIKILAQNLSVKEL

SEQ ID NO: 91327 - protein, 498 aa, Unknown
  Obtained from environmental sample
  DOMAIN (335)...(421): Hpt domain
  misc_feature (1)..(498): Xaa is any amino acid
LDITDDLPNKLYGDDLRIKQILTNLLTNAIKYTHEGSITLKLRCAREDDAVWMDVAVTDTGMGIPKEDIGRLFLEYYQIESDSNRHIEGTGLGLSITKRLVEIMGGKINVESEYGKGSTFSFRIKQGFVNDTVLGADVSEKLRTFNYSDDKRIATKKLVRVNLSYAKVLVVDDMQTNLDVAFGILRKYQMHVDVLSSGPAAIDRIRGGTPVYNAIFMDHMMPGMDGIETTDRIRAIDTEYAKNVPIIALTANAIQGTDKMFYAHDFQGFVTKPIDVIEMDSVLRKWLYDPKREGTVLSEPVVDEEKENNIKIEIPGVDVKKALSLYNGDADIYLPLLRSYITNTPETLEKLKNVTAENLPSYVISVHGLKGTSAGIGAEKIREMALELENMSRGGDLQGVLSKNGKLIAETEIIVNNVKKWLEENDNQAEKPRLKAPDKEVLSKLRESCESYDMDGIDEAMKALESYDYDEGADLVTWIREKIDMSKMGDVAKRLKDI

SEQ ID NO: 91328 - protein, 80 aa, Unknown
  Obtained from environmental sample
  misc_feature (1)..(80): Xaa is any amino acid
MESKAAIIGIIVGKPDSVEELNGILYEYAQYIIGRMGLPYSKRKINIISVIIDAPQNAIEALSGRISGLDGVSAKAVYSA

SEQ ID NO: 91329 - protein, 109 aa, Unknown
  Obtained from environmental sample
  misc_feature (1)..(109): Xaa is any amino acid
MSDVVSIILGGGKGTRLFPLTQSRSKPAVPFGGKFRLVDIPISNCIHADLRQIYIVTQFNSASLHNHISPLPIPYSPLYIGREFAVGLHKMRKIFGKIEKRAPANGISM

SEQ ID NO: 91330 - protein, 76 aa, Unknown
  Obtained from environmental sample
  misc_feature (1)..(76): Xaa is any amino acid
NDVTVSASLGTVRQKNLVEAAIAALREAINLAEKNEPLDLVSPMLREAVNSLGEITGEVSTADILEEMFSKFCVGK

SEQ ID NO: 91331 - protein, 365 aa, Unknown
  Obtained from environmental sample
  DOMAIN (14)...(163): Histidine kinase-, DNA gyrase B-, and HSP90-like ATPase
  misc_feature (1)..(365): Xaa is any amino acid
VLPPQEARRIAAGEVIDRPAALIREFIDNAIDAGATVIEVSIEGGGAKKAEVSDNGSGMDRENLEKCVLPHATSKIRSLDDLETVETLGFRGEALAAAAAVARLEIISCAGGGAVCSGGAAYSGGSGNGEAWRIEAGPGEGKLHITAASRTRGTTVRALNLYESIPARKKFLKREGSEAALCHQVFMDKALAFPEITFRFNQDGKPRDFFPAANSKKERFAAVAPEAALSVREENFLHEINVSGEGFSVDIVIGGPELFRADKRMLYVFANGRRIQDYSLIHAMEYGTQGWFPNGTHPIGAVYLDIDPALADFNIHPAKREARFKDPGAIHHAISSGLRDFCRRHGRIQDLTSEIKKIRILITTL

SEQ ID NO: 91332 - protein, 83 aa, Unknown
  Obtained from environmental sample
  misc_feature (1)..(83): Xaa is any amino acid
WRDEFKEILTIRLWEGKPWYEQATFNGRLVIFGHWAMNGLVDFPHAKGLDTGCVYGKLLTGYCPEENKFYQVVAKKIYAPMVH

SEQ ID NO: 91333 - protein, 334 aa, Unknown
  Obtained from environmental sample
  DOMAIN (1)...(334): tRNA synthetases class I (I, L, M and V)
  misc_feature (1)..(334): Xaa is any amino acid
VDWDRERFTLDEGLARAVREVFVTLYERDLLYKGNYLVNWCPSCGTALADDEVEHEDTPGKMYHLRYYFASAEGDAARNTAIMGETPPCALKGAHTGAYIELATTRPETLLGDTAVAVHPEDERYAGLKNKDGAAVTVKLPLADRDIPVVFDAYVDRAFGTGVVKITPAHDPNDWEVAKRHNLPVLNILNPDGTLNNEVPAKYRGLSVKKAREAVLEDLKAGGWYIKEENITHAVGQCYRCHTIIEPYLSERKQWFVRMGPLAEKALTSWRRGELIFYPRKWEHTYRHWLENIRDWCISRQLWWGHRIPAWDCQGCGKTSVSRNDLSVCPTAVP

SEQ ID NO: 91334 - protein, 216 aa, Unknown
  Obtained from environmental sample
  DOMAIN (43)...(130): Hpt domain
  misc_feature (1)..(216): Xaa is any amino acid
MISGIINITRMQTSEQNQALSIAGIDMAKGLAMLSGSQDAYRQILITFSEDVEERLTLLQNTPGADTLSAFITSVHALKSASASIGAMELSAQALGLETAGKAGDMAFIRENLPAFAKRLQEMAGGIKEWEKIMKERDSEKPAAAGGVENDSIIPLLRELAQALKLQKADDIDEIMERIMERPLDTGLKAAIEQISDEVLVAEYDKAMVILDGLLK

SEQ ID NO: 91335 - protein, 858 aa, Unknown
  Obtained from environmental sample
  DOMAIN (217)...(282): His Kinase A (phosphoacceptor) domain
  misc_feature (1)..(858): Xaa is any amino acid
MNIKHIKKQFMRFLINIGTSGKFTGEREFGMSDYLIRYVLMNCTIIFGCAVLALFVVMNLNQKQYFTAAVCGGMLTMGITAFIIARTKIKQIIPATALMIFYALLCVMITWTGESDGANFLFIYIYPSLTIMLLGTTYGITLSVILGILISLEMFIPGVARFNYNIELAIRMLVNYFLVFFVMVVIESTRKTKDRLIENQNRRLQELKGEAEAANRTKSNFLASMSHEIRTPMNAITGMAELLLRSELSGEARGYAQDIKQAGNNLISIINDILDFSKIEAGKLEIIPVKYLFPSLINDSVNIIRMRIGEKPLRFFTNIDSTIPNGLFGDEIRLRQIILNLLSNAVKYTEKGHFSLSITVDKRTEKQIWLKIAVTDTGKGIKPEDKEKLFGDFVQVDTKKNRGIEGTGLGLAITRRLCIVMGGNITVESEYGKGSVFTAVIPQDIDSSVPFASVHEPEKKKVLVYESRVVYAKSVCWSLENMRVPYKMVTNPEDFTLALQKEEWFFVFSGYGLYEKIKTIMDSAVYPNGKKPPLALMVELGNESYIPNVHFVSLPIQSLSIANTLNGGADSRSYVDSNRTGGTIRYTFPSARILVADDISTNLKVALGLLSPYKVEVDTCLNGLQAIEHVKRSVEEKRKYDIVFMDHMMPEMDGIEATAAIRKFETENEDSSGESGKKIPIIALTANAVVGMREMFVEKGFNDFLAKPIDINKLDEMLSLWIPKEKRESAAVNKKQEKPEAVKKYVILVDDNPANLKLGKNILSEKFRVATFPSAEKLFGVLENNHPAVILLDIDMPQMNGYDALKELKSKPETKDIPVILIAEEGGSPDKEKGLGAADYVSKPFDPQTLIACIEKHS

SEQ ID NO: 91336 - protein, 391 aa, Unknown
  Obtained from environmental sample
  DOMAIN (174)...(360): Adenylate and Guanylate cyclase catalytic domain
  misc_feature (1)..(391): Xaa is any amino acid
MGDEKKFVILVDDNPTNLKIGKHVLSEKYRVATFPSADKLLSALENNHPDIILLDIDMPDMNGYEAIKILKSKPETKNIPVIFLTGKTESDDELEGLSLGAIDYITKPFNPALLLKRIEVHLLVEEQRKTLEKQAADLQYYNNNLRRAFSTYLSEDVVEEIISDPTRLQLGGIKRKMTALFTDIKGFTSIAETLAPEKLVDLLNHYLTSMSDIILEQKGTIDKYEGDAIICFFGAPLELPDHVTRACTTAVLMKRIEKDINAHIMKKKLSPSPFLTRIGINSGKMIVGNMGTEKKMNYTIIGNVVNLAARLEGVNKQYGTWILTTEDTIRQTDGRFLTRRLDRIRVVGINEPVRICEILETEDGASEELREKAHLFQIAQELLKNATGEAE

SEQ ID NO: 91337 - protein, 264 aa, Unknown
  Obtained from environmental sample
  misc_feature (1)..(264): Xaa is any amino acid
AEQQAKIVRESIKEEERQLAQERQKVQEEQKQDLITKEEAKEAQERIERKTEELEQRKEEAKTLEQVAEKKTEEAQAQRQEIAKDQQAAIAQDTSGVYGVTIERTTPVTMGRVLRLNPADGKEIKRSPLNLVHVRSVVIVGGRVLAIAGENKGQGAVRLVEINPSSLEMARQGNDDIKAGSLLWVNGNDLYAIVVDLEKNKYYIGRFNTNLEIQAISSITVHPESSVLIQQGALLTQREDGSALLLNPADLTENLGKAGAAPAK

SEQ ID NO: 91338 - protein, 166 aa, Unknown
  Obtained from environmental sample
  misc_feature (1)..(166): Xaa is any amino acid
VFINYEGPHARVDTREEIRQIGVGVGQQISDSEKGNAAKLAGLTVEQKKTYSYKFEAGTNNRYFVIHCVSGQEGNKIDSDILGLGVDTGVDHVRNLRVIIQGYLQAGYNYSEKDAALLAEYITIYMPYTAVIGIILQAGIKLRLSAILPKKKRGFLSVMTSGPAER

SEQ ID NO: 91339 - protein, 214 aa, Unknown
  Obtained from environmental sample
  misc_feature (1)..(214): Xaa is any amino acid
MFYTVSSSGGFQGTPDQIIFIVFVCLLFFFICKSAPAVAQSLLTGTPSLSASGAISAATGAVAAAGATLGLAKKVGGVAAGGVGGVAKAGFGLVGTMNEANAAKTAAMSAVADAGGNKQQIKSAGNQAFRSSLADSAKDSLNSVGLGLTRRLLGDNKSGAGGSAGGGINPHSWRQDFMNSPSKDPDNPGHKTVKEHMNDRKDEGRKRGRASADK

SEQ ID NO: 91340 - protein, 381 aa, Unknown
  Obtained from environmental sample
  DOMAIN (12)...(381): Polyphosphate kinase
  misc_feature (1)..(381): Xaa is any amino acid
MKNQPEQSAFTPVYFNRDISWVDFNERVLEEGLRKDLCLFERFRFLSIVSSNFDEFFMVRVPAIKRARQAGLPPLLLGAAEDTGPSPAEQLKIVSIKAHAMYSRLYSCLMNEIFPGLAKNGLKLVSPDSYTVPQMDYLESFFIREIYPVLTPLRIEDDKPLPFFESRCINAAFLLTPEDTTSAETERIVMVQIPSSLSRIVWLPAEGDMLRWALLDDIMLTWGGYLFPGYKVRESMLFKVNRDADFSVDERRDEDFIEAMEEVIEGREKSTPVNMIFSPGSGRLRDELAKRFSLEGDDLYELEGPFNPGGLGELAGIAGFDELHEKTWKIYPVPGFTDEISIWDRLSQGDVMLHFPYQSFDPVVRFFQEAAADPQVISIKT

SEQ ID NO: 91341 - protein, 254 aa, Unknown
  Obtained from environmental sample
  misc_feature (1)..(254): Xaa is any amino acid
MNIFERLLSNYKRQKSGGSLGAKSFDNSRFSLSDDDFNSNLYIDPFTDTYLRNAWVNIAVNILIRNIARADFVLERDGVELKSGSLYSLFHRPNEYLSRYDLWKETAAWWLIEGEAFWWFGPDYGGGLPKQLYILNPRKLQLEGEGLDVQDSVVNKRRRWFYHAGTELVPIFSDELVHFRDWNPWNPLRGVNPLVSLSFELEQDYFANTANSTLLKNNAIPQGLLKTEQTLRPEEADALERRWESKYGQVKRGK

SEQ ID NO: 91342 - protein, 465 aa, Unknown
  Obtained from environmental sample
  DOMAIN (402)...(459): Bacterial regulatory proteins, luxR family
  misc_feature (1)..(465): Xaa is any amino acid
MHLRTCVCQGLMQKSVELVKYYEEKFLGLLEPQPSPKGDEPSYQGYAVRGSSLENNDIKRRTLARLYICWAYLRGLMGITDDVIDFDIYLGKAAECVSTSVDPGHYRSHYPAVWVICIGSTRKGALEEYIDVANRAQKHLMKSNLRGFMAGEAELAQGALEFYRGSMGTAENFTVLALKKAREYKQFGTVHRALFLSLRFAAAQGNFARAEQALKETKAQLDETEYLTRFMDYDISLSWFFCFLDMPEKTSEWLQEDFSWYSHAGFYENFWNFIKARFYFATRNFPPLLAHIEEMKARESFLYERIEMLVMEACIYYKMKDKEKSFAALRAAYTDALSNNIVMPFIEMGKDMRTLSSALLKESDKVIPKAWLEDINRKSASYAKRRAGMISEYMQTNRVTDNPAITPREADILNDLSHGLSRAEIASSRGLSINTVKMVINSLYFKLGAQNLADLIRIATERKMI

SEQ ID NO: 91343 - protein, 846 aa, Unknown
  Obtained from environmental sample
  DOMAIN (783)...(840): Bacterial regulatory proteins, luxR family
  misc_feature (1)..(846): Xaa is any amino acid
MEASFQTSYDSTASFHFERPRLNGLFLEAAKYPLVVVCAGAGYGKTTAVHDFLKGYDARKAWIQLSERDNVGGRFWESYTHSVSKLNKTLAAAISNIGFPDTREKLHHYKSLIKETAAVEKRVLVIDDYHCIEDRSVLRFIEEGFLRNMLKGSTVVVISRSISHLNVAGMTYRDQIFNINESDLRFTENELSGYFRRMGISFQTDSLYEIMQDTEGWAFAINLIARSYQRAPGYGGYVRNAMKTNIFLFLETEIWTEISDRLQNFLVRLSLIDHLSVDLINQLAEKEEGFTAELEKQSAYVRLDSYINAYLIHPLFLEFLTTKQTLLTEEQKRETYVIAGDWCNRNGFRIDALSYYEKIADYQSIVKMFFGMPIQIPFDVCRYAAPMFENAQPQEFFSVEFLAEMHVRTCVCQGLMQKSLELVKYYEEKFLGLPENNNIKRRTLARLYICWAYLRGLMGITDDVIDFDIYLRKAAECVSTSVDPGHFRSHCPAVWVICIGSTRKGALEEYIDVANHAQKHLMKSNLRGFMSGEAELAQGALEFYRGSMGTAETFTALALKKAREYKQFETVHRALFLSLRFAAAQGNFARAEQALKETKAQLDETGYVNRFKDYDISLSWYYCLLGLPEKMTEWLQEDFSSYGHAAFVENFWNQIKARFCYATRNFPPLLAHIEEMKARESFLFERIEMFVMEACIYYKMKDKEKAFAALRAAYTDALSNNIVMPFIEMGKDMRTLASAFLKEGDGAIPESWLEEINRKSASYAKRKAHVISDYIQANRITDNPAITPRETDILGDLSHGLSRTEIASSRNLSINTVKMVINSLYFKLGAENLADVIRIAAKRKMI

SEQ ID NO: 91344 - protein, 446 aa, Unknown
  Obtained from environmental sample
  DOMAIN (353)...(383): Putative Fe-S cluster
  misc_feature (1)..(446): Xaa is any amino acid
MCIGCGHCIAVCTHKARSYIDDTPRFLSDLNNGKKMIAVVAPAVASVFPDKYLNLNGWLKSLGVDAFFDVSYGAELTVVSYLDYIKTKNPRTVIAQPCPAIVTFIEIYHPELIKYLAPADSPMLHTIRMIIEYYHQYSDHRIAVISPCIAKRREFDETRLGDYNVTMLALKKHLESQKIDLSSFPEVEYVSPVPERAAGFSTPGGLMDTAERFIPGISRKIHKIEGIHTIYQYLVELSELLHTDEELSPLVDCLNCEKGCNGGPGTGNHNKPLPVLENPIRKRKAKLEGQLKPQKGDAGIKRYNQDLGKYWKKNLYNRAYKDLSGNNALKTPNEEELKAVFKRLKKFEKKDIYNCTSCGYQSCELMAKAIFNNLNKPENCAHYNIELLKEQTKTEELNRLLKEHINRTTGLIERISHTVHDLNETIEMQAQSVKDSSQKTASMIES

SEQ ID NO: 91345 - protein, 247 aa, Unknown
  Obtained from environmental sample
  DOMAIN (4)...(247): FlhB HrpN YscU SpaS Family
  misc_feature (1)..(247): Xaa is any amino acid
MAHDPSRTEKATPKRRGKAREEGSVLKVQDLDATLLFGANLFLFLALWGATLALLAKQVDFFLRKASTVSPILDGDLGKSALEFFWILLKILLPYLAVNFLIALAIQFIQHGFKPTFKPLMPKFSKMNPMNGLKRIFSMKSTVELLKGLFKLLIVFWAAYIVLNPNLMLLMQSMKMPITQGISLMQDIIFQLYRNVLLAMFVVATIDFLYQRFQFEKNLRMTKQEIKDEMKDAEGDPLVKGRQRSMM

SEQ ID NO: 91346 - protein, 357 aa, Unknown
  Obtained from environmental sample
  DOMAIN (17)...(271): Beta-eliminating lyase
  misc_feature (1)..(357): Xaa is any amino acid
MQTSEASPLSIPFNKPHLTGSESAYIEEAVRSGKLSGNGAFTKRCQEFFERRYNFKKCLLTTSCTDALEMCAILAGVSAGDEVIVPGYTFVSTALAFVRQGAKIVFADSRADHPNIDAAAIEPLITPRTKAIALVHYAGAACDMDAVMKIAEKHSLIVIEDAAQAVDSFYTGSAANAAPRPLGSIGHLAAFSFHDTKNITCGEGGMLAVNDSRFIARSEIVWEKGTNRADFFRGNVSKYGWVDTGSSFLPSEITAAFLWAQLEHLDEIQTARKAAWETYYEAFKPLSESGLFQVQDIPPYATNNAHTFYLVCNSQSDRTGLIEHLKNHGIGAAFHYQSLHRSDYYKDRHDGRELKNC

SEQ ID NO: 91347 - protein, 206 aa, Unknown
  Obtained from environmental sample
  misc_feature (1)..(206): Xaa is any amino acid
MDTNFTDKVLNFFTKVICPVPRASHQEDLIADNLEEFAADRGLTSFRDDNNNVIVFKPGTGKYAGTSTPVILQAHTDMICVPASADFSFGVEAYYSAENRLTGRSAVTGEKTSLGADDGIGVAVAMAVLDGADEIVHPPLVAVFTAEEECGLTGARDISADDILGIAPGLDFGRAAFINLDDGRFGQFSVGCAGSANVTVKVPVER

SEQ ID NO: 91348 - protein, 260 aa, Unknown
  Obtained from environmental sample
  DOMAIN (14)...(205): RNA pseudouridylate synthase
  misc_feature (1)..(260): Xaa is any amino acid
MTDNTPYVIEETSDFAVVFKPPRMHSAPLAKKEGGTLFDWFTARERALSPCQNNLMHRLDFDTHGLVLFAKNLKSFEFFKELQDKGGFVKEYSAICLSSVPSASSVPSASSVPNPSSVPGFPPPPALAAHAPSPENPLIIESFFRPFGPGRKLVRPVIEEGKKSREIAKDNGGFYRTEITGINENIFSLRLKRGFRHQIRCHLCWAGFPIKNDPLYPHPLEFDVVYNDSSVPALSLRACSLSFTDPSTGKQREYKIDKFE

SEQ ID NO: 91349 - protein, 692 aa, Unknown
  Obtained from environmental sample
  misc_feature (1)..(692): Xaa is any amino acid
MIRYTPSADDQSNYNFVTGFVIITVKPKELKFSHDSGLYSGQFSLTLTGEAGDTIYYTTDGSIPVPTKTGTTQYSSAITVKDRNANGGEANVLATPADRFYMVPGDPRGNVPGVFDPPLTAAHVPKATVIRAILVDSGGNKTDVVTKTYFIGNNLNDYGSTRVLSLVSDPDNLVSENRGIMVRGNPNNRWDTIPPYNFRRKGSDWEREAYLEIFEGNSRNKASLSTGVGIRVRGGYSRGVGQKSFNVYFKEDWGIKNLKDYDLIPKNTTLGTTGAVKADGTPVTQYKSFMLRNGANDIEYTKFYDVFLQDLLSDRSFSTQASVPCVVYLNGEYWGPYNFQERYSDNHTDYKYGVDKDNVISYDNGELDDGIAGEEAYYKTMVGFKDKDMSNATNYADFCKLVDIDNYIDFCAAEIYIYNEDWPHNNYRAWRTRNVEPGNPYGDTKWRWQMFDTEFAMGIYQSGGLKGGSGKDAFDEILNGDDKNHQNNKLFKSLLKNPDFCKKFVNTMLDLYNVNFHPDNYLPKLNNYAAVYRPLMNGYFSRWGGWDGMFNNKVNDARSYLNNIRTAMVNDYLPKYFNGYSGIANIGISSGKLYNVTVSATGVSGTTIKINSLTPNIAGGWTGKYYSGNPITVTASAPPNGYEFDGWTVVNGNAATPSVLTTTVNIITDNTLIIAEYKQTGSAVVPVTGISL

SEQ ID NO: 91350 - protein, 359 aa, Unknown
  Obtained from environmental sample
  misc_feature (1)..(359): Xaa is any amino acid
MSERFVTIDRETPMLFPVDMRDWLPEDHLVFFIIEAIEQIGVTGFKVNHRGCGSEQYPPDMMLALLVYSYVTGRFGSRTIEAATYTDVALRYICGGEAHPDHTVICAFRKDNKEVFEETFTKILVLARQLKKLKGVGGASGDGTKIHANASKHKAVSYKRAGEIIEELKEEVKKLTRMAEEADGKAEKPVINIPDEIKLRKERKKALEEARAEMEKLYEAAQEEGAKTRKKLDEYQHNFTDKDSRIMKVGNREHYEQSYNAQAVVDTEGSMLILGGYVTQNVNDKKEMEPLVASVDKEVREINTICLDTGFYSEEAVAAVEKTNEEGEREGPEVICAVEKGHHGKTVEDLKEKGPQGRP

SEQ ID NO: 91351 - protein, 325 aa, Unknown
  Obtained from environmental sample
  DOMAIN (1)...(78): Phosphoribosylglycinamide synthetase, N domain
  misc_feature (1)..(325): Xaa is any amino acid
APGNGGTATEEKTVNLLLDGANPETEKGQELLLEFAKKEGIDLTVVGPEAPLAAGIVDRFRSAGLAIVGPGQKAARLETSKVYSKSFMSKYGIRTAASKNFTGHADALKYAEKHFSKAKKTTPPPLVVKADGLAAGKGVVVAANLTEAKQTLSAFMKDGSLGEAGKSVILEEFLEGLEVSVLAAVSVSPGKKGTIKPFISARDHKRRFENGSGPNTGGMGAIAPVPDFTEAARNDFETAILAPTLKGMVAEKMDYRGFIFFGLMVREERCYLLEYNVRLGDPETQAVLPLMDSDLAELCTTILNGTLQNFPLKWKRGAVCAPVAV

SEQ ID NO: 91352 - protein, 325 aa, Unknown
  Obtained from environmental sample
  DOMAIN (23)...(241): SPFH domain / Band 7 family
  misc_feature (1)..(325): Xaa is any amino acid
MKKIITTIIVILVIIIGIAVAGPLYVINEGEQAVIVQFGRITDVISQAGLKVKVPFIDEVVRYPKKIMAWDGEARIVPTAERQFIFVDVVARWRISDPKKFYESINTVDAAYSKLSEIIDSEVRTVVAENPLRESVRNSNIIMERSLHSEAAGIGEGIEVDILSSTNQSGSSYEPITRGRRQLAEEILARSQRMVPEYGIALIDVVTRQISYSPELTPSVYARMIRERNQIAMAFRSEGEGRKAEWLGKMDNEKRSILSAAYTQAQTIMGNADARAARIYANAYNQDRAFFDYWRAIESYRQTMPKFDKTLTTNMDYFRYLYSTR

SEQ ID NO: 91353 - protein, 136 aa, Unknown
  Obtained from environmental sample
  misc_feature (1)..(136): Xaa is any amino acid
EYGLGIDVIAVKLQNVTPPSGVQEAFEDVNKAMQDLERLINEGQQVYNEEIPKARGEAEKTIQVAQGYATERVNRANGDVARFNSVYEEYRRAPEVTRQRLYYEMIEEVFKNEKDMTIIDRNLKNFLPLMNMGGNR

SEQ ID NO: 91354 - protein, 427 aa, Unknown
  Obtained from environmental sample
  DOMAIN (170)...(420): Methyl-accepting chemotaxis protein (MCP) signaling domain
  misc_feature (1)..(427): Xaa is any amino acid
IAVMTDTIMAPVYEMLNITIIISVVVLALVVLAALFLAMSISKPIVKVADTLKDISEGEGDLTRTIAVNSRDEIGSLALYFNNTLKKIRNLVVNVKGEAAALSGIGTDLASNMDETASAINEINANIHSIKGRIINQSASVSETHATMEQLTVNIHKLNEHVENQSIHMSQASSAIEQMMANINSVTGTLVNNADNVKALKEASEVGRSGLRDVAADIQEIARESEGLLEINSVMENIASQTNLLSMNAAIEAAHAGDAGKGFAVVADEIRKLAESSGEQSKTIGVVLKKIAESITKITKSTEVVLTRFEAIDSSVKTVSQQEENIRNAMEEQGEGSKQILGGIGNLNDITTQVTSSSEEMLNGSQEVVKESHNLERVTQEITGGMNEMASGADQINVAVHNVNEMTVKNREAIDDLLMEVSRFKID

SEQ ID NO: 91355 - protein, 875 aa, Unknown
  Obtained from environmental sample
  DOMAIN (162)...(243): Cache domain
  misc_feature (1)..(875): Xaa is any amino acid
MHVTNDKEQKTKKTISRYMQILFVAIAFGLMVFASYWFVSDLERKHLQNNVKNAISQTEANIIADLKEPETILAGFSETVRGFILRGDNERRVREYIYFINNYMQDNEKNRLLGVLGFYGYFDVFGKKYFVESSDWIPPADYDLESRPWYIAAVEANGDIGVTAPYRNLRLGDVAVITFSRRIFDNEGKALGIICLDIKMDRVSQHAINTQFAENGYGFLLSASRDIIAHPEPSVIGKNFRNVRSTIASYEDELVEKGYVNEVIATDYRGIKSIVFLERLENGWYMGVVTPREKYYQNTRSMALFLTVMGALMATGLIAILLVMFNELNKENEKSLAMTKKHADAEAANAAKSAFLAKVSHEIRTPMNAILGITEIQLRNGSLPNDTRNALDRIYNSGYMLLGIINDILDLSKIEAGKLELFPVEYDFPSLINDTVVLNIVRYESKPITFNLQVDENIPLMLYGDELRIKQILNNLLSNAFKYTASGIVSMTVSLDSALLEQSQLKQRQQEKGGVTLVFRISDTGQGMSPEQLDKLFNEYMRFNMETNRAIEGAGLGMSITRHLVRLMNGDIEVQSKLGKGSTFTVYLPQKIAGDPACVIGREMAEKIGQMSPVKSAHKKKAPIIYEYMPYGRILVVDDVETNLYVTRGLISPYGLSVDTASSGYEVIEKIKSGLTWDIVFMDHFMPGMDGVETARIIRAMGYIKPIVALTANVVSGQAEMFFANGFDDFISKPIDIRQLDLILNKHIRDKYPDDIIKAARQLKNNMGQSYVSPPTINPELAGIFTRDANKAINMLETLLKKQGGFDEEDIQMYVINVHAMKSALANIGETGLSSFALKLEEAGRKNNISVIPAETPSFISSLRGIIEKINPNKD

SEQ ID NO: 91356 - protein, 74 aa, Unknown
  Obtained from environmental sample
  misc_feature (1)..(74): Xaa is any amino acid
KKSAIEVPPVFGLIASAGKIPERDMFNTYNMGVGMCVITASNNADEALRILKSSGEKAAIVGEIKSCINGVIIE

SEQ ID NO: 91357 - protein, 137 aa, Unknown
  Obtained from environmental sample
  DOMAIN (13)...(115): Mur ligase family, catalytic domain
  misc_feature (1)..(137): Xaa is any amino acid
MISFADILNSDTLVYFVGIKGTGVCALAELIHNMGVRTRGSDTPEIFYTDAILKELGIPYYESFDSAHITDDIDMVIHSAAYSAENNEELAEAGRKSIPCVSYPDALGAYSAAFDSAGIAGVHGKTTTTAMIGCLMQ

SEQ ID NO: 91358 - protein, 255 aa, Unknown
  Obtained from environmental sample
  DOMAIN (15)...(203): RNA pseudouridylate synthase
  misc_feature (1)..(255): Xaa is any amino acid
MTDLEKPFVFDETEDFAVVYKPPRMHSVPLKNSGGDTLLEWYAAVFPPVMELSNREGGILHRLDFETQGLVLFAKNQQSLDYLLKLQDEGNFIKEYCAICHKNSALPSSFPASPFNFSLTEFSGQTSFAVESFFRPFGPGRKQVRPVTDACGKKRKIAHNEIAKDRGGYYRTEIIDITKNGYYTFTVRLKRGFRHQIRCHLAWIGCPVVNDPLYGQQPVSGFLALRSNGLMFTDPRSGKPREYRIEPLEIPSNPM

SEQ ID NO: 91359 - protein, 140 aa, Unknown
  Obtained from environmental sample
  DOMAIN (25)...(138): Cytidylate kinase
  misc_feature (1)..(140): Xaa is any amino acid
MKKDIKIAVSGKSGCGNTTVSKMVADKLGLLFINFTFRSLAQEKGMTLKEVLERAATDDWWDREVDNRQIQFARGNGGCVLGSRLAIWMLEEADLKVYLTASDEIRAARIAKREGGNLEAVAAFTAERDRQDHSRYLRIY

SEQ ID NO: 91360 - protein, 131 aa, Unknown
  Obtained from environmental sample
  DOMAIN (44)...(131): Domain of unknown function (DUF1732)
  misc_feature (1)..(131): Xaa is any amino acid
NSISNIESALQTVASHIGELENSIKENIKARFKEISGDTIDENRILAETAVLLMKYTISEEVSRLSSHLAEFRAETAKNERPGKKLDFLCQEINREINTIGSKSAILEVSRAVVGMKESLENIREQLRNVE

SEQ ID NO: 91361 - protein, 677 aa, Unknown
  Obtained from environmental sample
  DOMAIN (472)...(585): PAS fold
  misc_feature (1)..(677): Xaa is any amino acid
LLKGLDSGSVDFTGELMFTPERQKIYYMTSPTVDRLMKIYRIMDSEPIDTIIKSRPPRYAFLAGSVLNADVTENAGYDFTTVYVDNYKTIYSMLRSGEIDAFFSMDTSDVAFMAYHDVVAEDFYPLIFKSACLSAKKTELAPVIRVLDKILNEETLVFLSELYRQGHKKYLEEKLYNQMTEEEKAFLQNTLFVPIAAESDNYPVCFFDSNTNQWHGIYLDALDEVTRLTGLKFKRVNDQNLHNQDFTAMLERGEVLIVPVLYRIKENEGRFLWSDVPLLKDTYAFLSKSDFENIEINQIPFLNVGVRENSNYSEFFKKMFPNHRHLFEYGTQENAWSALKQNELDIIFACNRRLLTYTNFYEETGYKLNLITDHSFDTSMGYNKDAYLLKSIVDKTLRIIDLNNISNQWMHKTYDYRYKLSKAQHPWLIGMSILFFLVLVLFFVLLIRSRIAGKELAEIVSQQTSDIAYEKSKLEAVIDSIPDYMFCKDKDYRYTQCNKYFQNFLGISEDDILGKSDMEGTWLHPEHAQKIYSLEQKVISDNKVYKVEEKVHSPVTGNESYFETVKAPIRYNGKVVGIVAIIRDITKRKEMEEEAQAANRAKSSFLANMSHELRTPLNVVIGLTELVLEEDMADHVRESLVKISRAGSTLLSIVNDILDFSKIESGKLTLSPVNLPV

SEQ ID NO: 91362 - protein, 478 aa, Unknown
  Obtained from environmental sample
  DOMAIN (364)...(439): Hpt domain
  misc_feature (1)..(478): Xaa is any amino acid
YYLSSILNDIITLVTTRLGEKPIIFKLNIKDDLPNKLLGDDLRVKQILTNLLTNAIKYTREGSIELTVRSTREGDKMWLDVAVSDTGIGIPKDDIGSLFMDYYQVAASSTRNIEGTGLGLPITKRLVEMMEGEITVASEYGKGSTFSFRIKQGFIDDAVLGAEVSEKLRSFSYSDDKRIVSKKLVRVNLSYARVLVVDDMQTNLDVASGILRKYQMQVDVLKSGQEAVDRIQAGIPLYNLIFMDHMMPGMDGIETVDRIRALGTEYAKKIPIIALTANAIQGTEKLFYEHDFQAFVTKPIDILEMDSVVRKWLYEKKRGSVNVSGVPDSDFIEDDGNEMDIYIPGVDTKKGLSLYGRDADIYVPLLRSYVANTPATLEVLKNVSAATLSKYVISVHGLKGTSAGIGAEEIRVQALELEKLSRANELHAVLAKNDKLIADTELIVASVKEWLDKHDIRDEKPRKKAPEKELLERLRESV

SEQ ID NO: 91363 - protein, 497 aa, Unknown
  Obtained from environmental sample
  misc_feature (1)..(497): Xaa is any amino acid
GTRAGYSGSKTSKPTAIVTKPVSPPPSQLNTAALQAKIAEAESLKSLTEVNTAAEDVSQGAFWVTQAVMTAFENAISAAQSALGSATTQEALDSAVTALQSAITTFSGARQEGVKTSGFTPAQVTELVNSAKADKEGVHISADGDDVSPVEYWVSSSDLEALNAVITALESANGQPAIDAAYLDLVQARETFNSVKQHGTTPDITALNNAITDADAAKDGVETAASGEQVPLGSSWATAAQFDALNTVIESATAVKNDANATKTAVDTAASNLTAAITVFNTAVTNNGPGTLLPALTGTVSISGTAQVGQTLTAVTTSLGGNGDITYQWKRGSTTIDTNSSTYQVQMLDVGYTITVTVTRAGYSGSVTSDPTATVPSPSQTAVTNVTVSPSTANIAKGTTQTFTATVTGTNSPAQTVTWSIDETSKNTGTTINASGVLTVATAESLTSLTVRATSTVDTTKSGTATVTISTPVGSGQYTSKDVLGNSYSISVGSNAS

SEQ ID NO: 91364 - protein, 97 aa, Unknown
  Obtained from environmental sample
  misc_feature (1)..(97): Xaa is any amino acid
MKEKTTVWDMADHINTKEDAIAYLEAALEENDTAFLLSVLGDIARSKGMAQIARELNLARESLYRSLAQDGNPSFNTVAKVLDNLGYQLSIKQKIPA

SEQ ID NO: 91365 - protein, 421 aa, Unknown
  Obtained from environmental sample
  DOMAIN (7)...(413): EPSP synthase (3-phosphoshikimate 1-carboxyvinyltransferase)
  misc_feature (1)..(421): Xaa is any amino acid
MNSDVKISPCRLNGVVRAIPSKSQAHRALICAALADKPTTIECNGGSDDIAATADCLSALGAKIEHESGVYIVHPLKREGNDIATLDCGESGSTFRFMLPIIGALGRKASFILKGRLPERPLSPLYEELVRHGAELPPHGTVPFCASGQLAPGSYSLDAGVSSQFISGLLFALPLLDGDSELHLTGQAESFPYIELTLAMLEIFGIKTEFKNNVFFIPGGQTYRSPGKTRVEGDWSNAAFWLSAGAIGSGNVTCAGLDLQSRQGDRAILGLLAKFGAKVETSDSAVTVSGGKLRGIEINAKDIPDLVPILAVIAAAAEGTTVIRNAERLRIKESDRLAAVSAVLRALGADVSETEDGLAIHGSTAFKSGEVSSYGDHRIAMSAAVAATVCAEPVVIHGAEAVNKSYPGFFDDMRLLSGSVL

SEQ ID NO: 91366 - protein, 240 aa, Unknown
  Obtained from environmental sample
  DOMAIN (9)...(240): Chorismate synthase
  misc_feature (1)..(240): Xaa is any amino acid
MSSQYGNKIRISIFGQSHSPAIGVSIDGLPAGIKIDTDELRAFLKRRAPGQNDTSTARAEDDSPEILSGLAGGVTCGAPLAIIIRNKDARSTDYRELRDIPRPSHADYAAHIKYGGHQDVAGGGHFSGRLTAPLCAAGGICLQILRGLGIHVGAHILRIGSAKDDPFDPVGISAGSFDAIRENPLPVLNLETGEAMRLRILEMREKGDSVGGVIECAVVGLPAGLGDPIFDGIENRIPRA

SEQ ID NO: 91367 - protein, 249 aa, Unknown
  Obtained from environmental sample
  DOMAIN (10)...(249): Pyridine nucleotide-disulphide oxidoreductase
  misc_feature (1)..(249): Xaa is any amino acid
MWKKCGGKMKHLIIGAGAAAISAVRTILKEKSDDTVVMLSQDEEVYSRCMLHKFISGERDAESINFINDDILKSPRVQWIKGKTITRMDAASKTVYSGDEKIASGDTVLIATGSDSVTPPIGELKTAKNAFGLRHLSDARAIAEQAKKAKQIAVIGAGLVGLDAVYGILESPGGENKKITVVEMAPSVLAINLDAHAAEAYQRLFEKKGVAFRLARKVVNTKGVNGNISALELDDGEIIPCDMVIMAVG

SEQ ID NO: 91368 - protein, 268 aa, Unknown
  Obtained from environmental sample
  DOMAIN (38)...(263): DNA methylase
  misc_feature (1)..(268): Xaa is any amino acid
MVELTALKAFKPYYQSENAMIFNNDCLEVLKHIPENSIDMIFADPPYLLSNNGFTCQNGKMASVNKGKWDKSSGFEIDILFHNEWIAACHRILKPEGTIWISGTYHSIYQCGYLLQKNNFHFLNDIAWFKPNASPNLSCRFFTASHETLIWARKDKKAKHTFNYEEMKNGLFPEDKLKKENTQMRSVWSIPTPKTGEKEKGKHPTQKPLDLLRRIVIASTKENDIVLDPFCGSGTTGIACKNIGKRFFIGIEIEEKYCELAKERLLLA

SEQ ID NO: 91369 - protein, 151 aa, Unknown
  Obtained from environmental sample
  misc_feature (1)..(151): Xaa is any amino acid
VEDNIETEHAIPIQARLYTNLSIEEKTKLRAEAVLLCPSIVKSGRSKNKYDAAVLYLLTYHGVICHQARDLFSAGSVANPENDDEGGIYIERALKLIEKEIIQASMIMDDALFIEYWGESVPPEQRTKKWLEKADALAHDWIPSKSLFLEE

SEQ ID NO: 91370 - protein, 502 aa, Unknown
  Obtained from environmental sample
  DOMAIN (129)...(304): Integrase core domain
  misc_feature (1)..(502): Xaa is any amino acid
MEKAKEILRLSLQMGLSQRDVAANLRFDGTGCSLGMVNAVLARVKEAGIADPLSLDTKALGSIIYPPEQGQGKEEPDFSYIDREMKKKGVTLFLLWEEYKVRHPEGCMYSQFCAKYREYRKQSSVYMRKVYKAGEQMLVDWAGLTMKHIEGNGNEKTSYVFVAILPASSILFVRAFTDMKMESWIEGHVKAFEYFGGVPRLLVPDNARTAVTKASRYEAELNKTYKEMADFYGCAIVPARPRSPTDKAPVETAVQIVERRIIAKLRHTRFLSLDELNETVCSEIEALNGQPFQKQPGSRRSLFLSTEQHELMKLPPRRYEYAQFKQAKAGFDYHVALDKGHYYSIPYQFAGKEVLIRSTLHTVEVFCQGERIACHVRSMDPRKRFITEPSHMPESHRAVADWSPERFVSWAAKTGDKTKAYIAWLLGRKEHPQQAFRTCAGILRVAATVAPQRMEEACENAMAQNIFSYACFVKLLENRSSDKPLIHENLRGKDYFSGGSHV

SEQ ID NO: 91371 - protein, 354 aa, Unknown
  Obtained from environmental sample
  DOMAIN (13)...(176): Type III restriction enzyme, res subunit
  misc_feature (1)..(354): Xaa is any amino acid
MDKLSILRERFGYSAFRPGQEEVIDAILAGKDALAVMPTGAGKSLCYQIPALLLEGMTIVISPLISLMKDQVSALKEAGCGAAFLNSSLSGREYMETMDDISSGEIKLLYIAPERLQRTDLPELEINSVPLVVVDEAHCVSQWGHDFRTSYLQIADFIRSIKPRPVVAAFTATATVNVRGDISKLLALRSPLCVNTGFDRPNLYFEVQKPKDKKTALLECLDKRKETSGIIYCATRKTVEETCNFLISCGFNATRYHAGLDDEERRKNQDDFIYDNKTVMVATNAFGMGIDKSNVSYVIHYNMPKNIESYYQEAGRAGRDGSPADCILLYNGQDVQINQYLITHNEDEDAADEV

SEQ ID NO: 91372 - protein, 108 aa, Unknown
  Obtained from environmental sample
  misc_feature (1)..(108): Xaa is any amino acid
MFNGSPNKAEKINVRRVVLSDLPYLYEICLKTGDEGKDASAFFNDPYLIGHYYAAPYVIYPKNICFAAVYENYPKGYIVSVPDTAAYKQWLEEYWLPPLRKQFPIGKK

SEQ ID NO: 91373 - protein, 310 aa, Unknown
  Obtained from environmental sample
  DOMAIN (53)...(266): Methyl-accepting chemotaxis protein (MCP) signaling domain
  misc_feature (1)..(310): Xaa is any amino acid
AAVNQITANIQSIKGRVINQSAGVTETNATMEQVIANINKLNGHVENQSRNVSQASSAIEEMVANINSVTNTLVNNAANVKTLKDASEVGKTGLQEVAMDIQEIARESEGLLEINTVMENIASQTNLLSMNAAIEAAHAGELGKGFAVVADEIRKLAESSGEQSKTIGTVLKKIAESIKKITVSTENVLKKFEAIDSGVKTVSDQEENIRNAMEEQGEGSKQVLQRQTSLSELTRQVKSGSEEMLEGSKEVMKESQHLEMVTQEITSGMNEMASGAEQVNVAVHQVNDISAKNRESIDNLIQEVSRFKVD

SEQ ID NO: 91374 - protein, 155 aa, Unknown
  Obtained from environmental sample
  DOMAIN (20)...(78): Hemerythrin HHE cation binding domain
  misc_feature (1)..(155): Xaa is any amino acid
MTNTNNNKDMVVWDEKYATGIELIDSQHKELFSLTNELFRACMGDNETLKGVFTETMGRMVDYVRFHFGAEQVMLQRIKYPDYDAHKKQHDKLIRDILDAVNAHNKGEKFVANQFVRTMRDWILGHIAVSDMQYVLYITAQKKKGLLSVEQINKE

SEQ ID NO: 91375 - protein, 44 aa, Unknown
  Obtained from environmental sample
  misc_feature (1)..(44): Xaa is any amino acid
MKIDGVLYKEDIGIRLEDDLLITEKGCENLSASIPKEIEDIEGG

SEQ ID NO: 91376 - protein, 100 aa, Unknown
  Obtained from environmental sample
  DOMAIN (66)...(100): UvrB/uvrC motif
  misc_feature (1)..(100): Xaa is any amino acid
ESDSRNQPPPRNSTCLQQKTRDNPGDGKKAIADILTRHVEEADDAAASTVEVLKKSYNLLIPAQRKQLVKALEKEMLEHAKNLEFEQAAAIRDEIARLKE

SEQ ID NO: 91377 - protein, 372 aa, Unknown
  Obtained from environmental sample
  DOMAIN (15)...(168): Type III restriction enzyme, res subunit
  misc_feature (1)..(372): Xaa is any amino acid
METGNSDVDYKLISRYKPAGSQPAAIEALTDGILAGKKSQVLLGVTGSGKTFTMANVIKNVGRPALVIAHNKTLAAQLCNEFRQFFPDNAVEYFVSYYDYYQPEAYVASRDLYIEKDASINDEIERMRLSAARSMMEREDVIIVATVSCIYGMVTPDVYRKMTATCSKGETIDVDALIRRFVELQYERNDAVLDRGRFRRRGDTLEIFPAYMEEAYRVDLDWDKVERIRRFNPISGEILEELDHALIYPAKQFVMPAEMVQNALGAIREELEERLEYFKANGKILEAERLKTRVEYDIEMLTEMGYCSGIENYSALLAGRKPGESPDTLVDYLPREHLTFIDESHVTLPQLGAMYLGDRSRQQNLVDYGFRL

SEQ ID NO: 91378 - protein, 292 aa, Unknown
  Obtained from environmental sample
  DOMAIN (189)...(235): Bacterial regulatory helix-turn-helix proteins, AraC family
  misc_feature (1)..(292): Xaa is any amino acid
MPLADIDDYNKFLYKTDLYILLWENTENLDYPSHWHSAMELIMPIKGNYEVQLRNKTYLLKENDILIIHPLDVHGITVPPDSKTGERIILMVEPTILFSLPGISNSFLKQYNFNLITHEETPEIHGEIKRLLMECYNEYKKNDIYQITAMYARIIDIFITLSRYYDQKLPHRDDIQTNKRQNHIVRLNSVFEYIDSNLTEKLTLEKLTNVAHYSKFHFERIFKVFTSMSFYQYLKEKRVSYSEALLLDPKLAVIDVALKSGFGSASAFNSAFKEIRHCTPSEFRKKYQKTAY

SEQ ID NO: 91379 - protein, 299 aa, Unknown
  Obtained from environmental sample
  misc_feature (1)..(299): Xaa is any amino acid
MNNLGYYYAPNDYWDAQLYANVLEGSEADFSKSSLNTEVRYNKRYSLDGFVDATGYLNDGTIWRDYDIHFRHAQKITPDGSKTLNGEGSFVSRQNLRRQNGIDEKTVLDQQANAEMTYYQKIGDNKNITVKERQEYNLQTGLIVRQNPDIQFRASGPLFSPDVSGESINPPFWEKINYSYYNRFNNYMVRAPDTVYYNPLDTASDYYTVDTTAYYAGFSDNFSLNYTGILFDVLSITPSLNFFGNWTANEYISPRDSIDRRGHLTFDPSKNEYGQYYPKYNGSVRTSTKLYGIWLPEWG

SEQ ID NO: 91380 - protein, 340 aa, Unknown
  Obtained from environmental sample
  DOMAIN (1)...(87): SRP54-type protein, helical bundle domain
  misc_feature (1)..(340): Xaa is any amino acid
MFEDLSARFDSIFKRLRGRGKLSADNIAEAVRDVKRALLEADVHYKVVKKFAAVVQEKAMGSAVVDSITPGQQFVKLVHDELTAVMGTAARTCKFHTNRVNVVVLAGLQGSGKTTACAKLALHFRKQGHKPLMAACDMYRPAAVDQIETLGKALGVPVYADRAAKPVAIAKAAVEAARRDGQSLVIVDTAGRLHVDKEMMAELKEICAAVKPDETFFVADAMTGQDAVNVAAEFHKEVGFTGAILTKMDGDARGGAALSILDVTGVAVQFVGVGEKPDGLELFHPERMASRILGMGDIVSLVERAQETVDLENSKKIEKKIRKNTFSLQDFLDQLRQIKK

SEQ ID NO: 91381 - protein, 609 aa, Unknown
  Obtained from environmental sample
  DOMAIN (1)...(241): Iron only hydrogenase large subunit, C-terminal domain
  misc_feature (1)..(609): Xaa is any amino acid
MEDLKQYKKIIAVSAPAAASFFPEQFLNLNGWLKSLGVEAFFDVGMGAELTVMSYLNYIKEKKPRTVISQPCPAIVTFIELFHPELLPYLAPADSPILHIIKMIKEYYPQYKNHKVAVISPCIAKRREYDETGMGDYNVTMVELKNLLDSQKINLSSFPKVEYTGVSAERAVGFPIPGGLLDTAERFEPGIRRNTEKIEGVFAIYPYLKEISEILNTDDELPLLIDCLNCEKGCLGGPGTGNAEKPLAELKAPVRKRMTKLEKEHNPKKAKSAYKKYHDVLKKYWKKGLYNRSYRNLSENNTIKHPDEAEITKIFRSMKKFKKEDIYNCTCCGYGSCKAMATAIYNKLNKHENCAHYILALLKENQEHIANASNLIEGINNLIQELNDIISSQAEAVDHSSAETEEIVASIKNTSEMSLKQQESVKGLMEVAGHGQESMRKTIQSISEISKSVEGISSAIHIISSIAANTNLLSMNAAIEAAHAGDAGKGFAVVAGEIRRLSENTRENAVSISHTLTNIINGISDTTKQSGETDTRIAQMSEEIRGFAKTMSVFISTFSELSAKSENITASLVSLKEQSSAVKTSYAQMIEMTNKLSRALKDLSELSKR

SEQ ID NO: 91382 - protein, 592 aa, Unknown
  Obtained from environmental sample
  DOMAIN (8)...(72): ATP synthase alpha/beta family, beta-barrel domain
  misc_feature (1)..(592): Xaa is any amino acid
MIGTKGTVVAVNGNMVSVRFNGIVSMNEVGYIKVAGKRLRSEVIMIRGEISQLQVFEITKGITIGDEVEFTGGMLSVELGPGLLGQVYDGLQNPLPQLAQAAGYFLERGVYLDALSTETSWQFTPKAKAGDRVERADTLGTVPEGSFTHRIMVPFNMYGTFTVSWIKPEGAYKIRDNIAELTDEKGNKIPVTLSFHWPVKRAIDCYEERLKPAEPMVTRVRLIDTFFPVARGGTYCIPGPFGAGKTVLQQITSRFADVDIVIVAACGERAGEVVETLKEFPELKDERTGRSLMERTIIICNTSSMPVAAREASVYTAVTLAEYYRQMGLNVLLLADSTSRWAQAMREMSGRLEEIPGEEAFPAYLESTIASFYERAGIVRLKDGNLGSVTIGGTVSPAGGNFEEPVTQATLKVVGAFHGLSRERSDARKFPAIHPMDSWSKYKGIISEEKVGYAHGFMRRGTEVEQMMKVVGEEGTSIEDYVVYLKGDLIDSVYFQQNSFDEVDAAVKPERQIYTFNKLLAILASQFSFPDKNEARVWFNRLRQKFLDYNGSHWQDERFKAMEKDIEDAVKKQSKGLDKAAEHILAPDGARA

SEQ ID NO: 91383 - protein, 256 aa, Unknown
  Obtained from environmental sample
  DOMAIN (159)...(256): HD domain
  misc_feature (1)..(256): Xaa is any amino acid
MVNRLDVSSPGVRRQLIMTLIQSTPAAYAVLGKDYKVIFLNDFFMRARKMEGPVPVGETCYNIVNGGVICPQCAVHEAIDRGRPARMLRKDVLPDGTVTHSDDFAIPIRKGPGTDDFDCVLQVIVSRTEEMRLRDRNSRLFLEIVYSLMKRLGGTPPYASAHSKNVAAISAKLTRYLGMGSHAAFHSALGGLLHDLGMFFVPGEILGKRAALTDEEYSAVKGHTVYMGGFLDGLASFATLRDIAVSHHERWDGGGY

SEQ ID NO: 91384 - protein, 80 aa, Unknown
  Obtained from environmental sample
  misc_feature (1)..(80): Xaa is any amino acid
MELFKDQSYEMSYEYIDKGTEPFIWKGKFKWDDTGNIIILDTKDAPNYYKVEKTKLIQLDMKGKPIKGKLADDYVLNRVL

SEQ ID NO: 91385 - protein, 596 aa, Unknown
  Obtained from environmental sample
  DOMAIN (25)...(297): ABC transporter transmembrane region
  misc_feature (1)..(596): Xaa is any amino acid
MSRPNISLKEYKALFPYLSRYKAQYIIGVIFLIIVDAAQIAIPQFIRYAIDLISSGDFQWKQILILSLWMVGIMAVVSLGRFLWRYFISGSSRRIEAELRETLYAHLQKLSWDFYQKNKIGDMMARFINDLNAIRMAIGMGVVALFDFIFMATSILIIIFIQDARSALVSIIPLPLVTVLILLFGSLVGKKFFAVQGTYSKMSDNAQETFAGISVIKSFVKEWWFIKKFADSNEDYQKANMELVRLFGFFFPFISFLSGLTVLIMIGIGGLRVMNGLMTPGSLVAMFRYLSMLIWPLMGAGFMVNMIQRGAVSLGRINEVLNTTPSIRDSENASAAQSTRGVPALEISNLEFAYREEENVLKGINLKVERGEWLGIMGRTGSGKSTLIKTFMRMTDPPRGAVRIFGLDARDWQLEELRKLFAVSPQDSYLFSDSIANNIAYGLDDSQFSSDSEKEQKVDDAVSFASLNKDLGFFRDGKNTLVGERGLTLSGGQKQRTAIARAAIMDSEFLVLDDSLSAVDNETELKILEALRKERKGRTTIIISHRVSSLKYADNVLVLDKGKVLEYGSPARLVAEGGFYSRMAAFQKRNQERQMA

SEQ ID NO: 91386 - protein, 608 aa, Unknown
  Obtained from environmental sample
  DOMAIN (345)...(463): Response regulator receiver domain
  misc_feature (1)..(608): Xaa is any amino acid
RDVPDAAQEHILTIKQAGANLLSIINDILDFSKIESGKLEIIPVKYMLSSLINDTVNIIRMRFKEKPLRFFTNIDGSIPNNLYGDEPRLRQITLNLLTNAVKYTEKGYIGLIITINKRNDKQIWLKIEVIDTGKGIKPEDQKKLFGEFVQVDTRENKGIEGTGLGLAITKRLCLAMGGDITVESEYGKGSVFTVIVPQNIESQEPFAEVEEPQRKKVLVYEGRAVYANAVCWSLENMKVPHTVVTNKEDFAAALYKEEWSYVFSGYGLYENIKPLIEQNDSNFCGGKKPPMALMIEWGTEAYIPGVRFLSIPVQSLAIANILNGREDIKGYSKSSNTVRFTFPRARILVVDDIATNLKVAEGLLAPYRTTVDTSLTGLQSLEMVKQNEYDIVFMDHMMPVMDGIETTAAIRAWEKEQHKKQRIPIIALTANAVVGMREMFLENGFDDFISKPIDIRQLNAALNKMIRDKQPFEVIDAARKEKATRKVDQKTPQPQLQPQSLQLPQPQSAVSQAKEIFARNTEMAVTRLETIYKNEAPKPEQQGQDRAINMIITELPKFIEALREVSEKLKANIKSGESENEDIGLLEKIQILHKAYKERDKQSEKAEQ

SEQ ID NO: 91387 - protein, 376 aa, Unknown
  Obtained from environmental sample
  DOMAIN (165)...(348): ABC transporter
  misc_feature (1)..(376): Xaa is any amino acid
YLSEHLAGIQVVQLLRQEKKSANEFRAGNNELLDANIKEMYVFATFRPLVEWFAVFTVAAVIVFGCRMVSSVSISLGVLIAFINLVQMFFQPVTDIAEKYTMLQSAMAGGEKVFKLMDTDEQIPNTGTHEIKGEVRGHIEFENVRFSYKKGEDVLRGLSFAVKPGEMTAIVGYTGAGKTTIVNVLARLWDIDSGVIRLDGIPVINIPLKDLRRSIMPVMQDVTLFSGTIEENITLGLDFSSEQIIEAAKTVYAHDFISALPDGYKTVLSEGAANISTGQRQLISYARVIAHNPRVVVLDEATSSVDTETERLIQLGIKKVMSGRTSFVIAHRLSTIKNADRILVLSAGRLVEEGTHEELIARDGLYAGLYRLQYEE

SEQ ID NO: 91388 - protein, 547 aa, Unknown
  Obtained from environmental sample
  DOMAIN (71)...(242): DHH family
  misc_feature (1)..(547): Xaa is any amino acid
MKWEKKDIPQEKVRDMSAKYGCDLLTASILARRGFFTGDSIRFFLEDDLLSLHNPFLMDGMEDAVERILAAKDEGEKVLIFGDSDVDGITGTALLAGYLENLGMDVAWRIPTGDESYGLSLEAVEEFAAKDGTLIITVDCGISRFSEIRRANELSIDVIVTDHHEPQEELPEAFVIINPKLKNSTYPFRNLAGCGVAFKLVCALRSAQRSELYGQQICLLNTRPANEAWTIEIAKIRNLTVIDTLKETIVPGMISISETRLPAFLEGQQILVWDAPLHKQTFTRLFGSGIEVGMLDIAPQIGKEIPQTAGQSLLRIKELSKIAKYSDRELSELDVFVNLFTSYAKLREKNAADANEESADIQLAALGTIADIMPLLDENRIIVRRGIESLEKKPRPGILQLLQKLDLAGRHFDTKDISWKLCPVINAARRMGSAQTAADLFFEKSPKERERLAAELAAMNESRKELEDETWAVVEPMAYKSFEEYKERLAFVYSEKINKGVTGLMAQRTARQFNVPSIAVSLGEEICSGSLRSARGFNVCALLNNAA

SEQ ID NO: 91389 - protein, 117 aa, Unknown
  Obtained from environmental sample
  DOMAIN (2)...(114): Response regulator receiver domain
  misc_feature (1)..(117): Xaa is any amino acid
MENALIISNSEKDTALYTGFLNAASIHQVTSAQSCDSARRLILKQDFDLIIVDSSPEDESGENFSRYTASKGVSQVILLVNSEVFNSVTAACEEDGVLTISKPLNRELFWAALSLAK

SEQ ID NO: 91390 - protein, 306 aa, Unknown
  Obtained from environmental sample
  DOMAIN (2)...(155): Protein of unknown function DUF115
  misc_feature (1)..(306): Xaa is any amino acid
LRVWRRVDVPAAHPLPVFLAAAGPGLDSIAPLLPEIRQRCIVVAVDTSLRFLLRNGVDPDFTLVIDPQFWNNRHLDRCTSPHTRLIVESAVYPPVLRLPFKTVYLCGSQYPLGNFIEQRVDPKGALGAGGSVATSAWDFSRILGAQQIWIAGLDLAFPGLRTHFRGARFEEKVLAESDRLNPAETWLLHALRGGIPFYAPSISGGQVLTDRRLSLYATWFESRFRQFPAIRNYSLSPESIAIAGLEPAKTEALLALPERRAEINQRLETAFSRIKTEFFEPEETRQRGERYENAVNALFSGLRQLQ

SEQ ID NO: 91391 - protein, 554 aa, Unknown
  Obtained from environmental sample
  DOMAIN (345)...(517): ABC transporter
  misc_feature (1)..(554): Xaa is any amino acid
MYRVSKKHGTKQVLKDINLSYFYGAKIGVIGLNGSGKSSLLKILAGVDTEFAGETSVSPGFTIGFMEQEPFLESGKTVKEVVSEGVQELVDLLQEFDRVSEAFADPDADYDKLGAKQAELQEKIEAADGWNLDNRLDLAMEALRCPPGDEIVDHLSGGERRRVALCRLLLQKPDILLLDEPTNHLDAETVAWLERHLRDYAGTVIAVTHDRYFLDNVAGWILELDRGEGIPWKGNYSGWLEQKEQRMAQEEKGESDRRKTLQRELEWIRMSPKGRHAKSKARITQYEKLFQDDERERSRGAAQSSKITIPAGPHLGKLVIEAQGLAKSYGDRILFEKLDFTIPPGACVGIIGPNGAGKTTLFKIITGAEKPDSGELRLGDSVKLGYADQMRAVLDDNKSVWEQLSGGQDLIKLGLGQGAREVNSRAYCAWYNFSGGDQQKKVGVLSGGERNRLNLAMMLKEGANVLLLDEPTNDLDVNTLRALEDALDSFAGVSLVISHDRWFLDRIVTHILAFEDGEVVWYDGNWSEYAEWRRERLGTTADSPHRYVYRKLER

SEQ ID NO: 91392 - protein, 169 aa, Unknown
  Obtained from environmental sample
  misc_feature (1)..(169): Xaa is any amino acid
MLPIICFISITLLFLDFTGTVHTYLGWVAKMQFVPAVFASNVVIALSIVFLTLLFGRFYCAMLCPLGIFQDIVSFKTRFYYKKPRKRFIILRYVLLAGFVATAFVGGGLVSVLEPYSAYGRIVSQIFGPIYKFGNNLLAYFSEHIGSYAFYSVDVWVKSLTSFVLAILT

SEQ ID NO: 91393 - protein, 83 aa, Unknown
  Obtained from environmental sample
  DOMAIN (3)...(75): Phd_YefM
  misc_feature (1)..(83): Xaa is any amino acid
MLNQQIGAFEAKTHFSQILDKVEHGGNFVITKRGKPVAKIIPFQKEPEMTRQEAFEKMKELRKNYRGEPGSFNIREAIEDGRK

SEQ ID NO: 91394 - protein, 263 aa, Unknown
  Obtained from environmental sample
  DOMAIN (10)...(240): Amino acid kinase family
  misc_feature (1)..(263): Xaa is any amino acid
MITKLIADSRKIIIKIGSNTLAGSNGKINSAFLAEFAEQTAALMKKGKQIAIVSSGAQVAGLSTMDKWARKKDIHYRQALCAVGQVDLMGAWSKAFEQHGLHIAQILLTREDFNDSLRTLNMRNTLFTLVDEGIIPIINENDTVSVEEIKIGDNDTLAARSAILWSADLLILFSDIDGLYNKNPKEHNDAVLVEEVRDIDAVQKDISIGTANNFGTGGIATKLEAAKLALSYGIPAILANGGKPRSLETLAAGGQKGTVFLNS

SEQ ID NO: 91395 - protein, 160 aa, Unknown
  Obtained from environmental sample
  DOMAIN (1)...(93): HD domain
  misc_feature (1)..(160): Xaa is any amino acid
VGKIAIPDYILNKLGLLTEDEFELMKTHAEAGERIMDKVIARTGELQFLLNAKLFAGCHHERWDGSGYPRGLKGVNIPLQGRIMAVVDYYDALLSDRPYQRRFSEAEVIAGISANAGILFDPLITQVFVEIKDKISEARQNYVNCDLPISETQADNGGAG

SEQ ID NO: 91396 - protein, 470 aa, Unknown
  Obtained from environmental sample
  misc_feature (1)..(470): Xaa is any amino acid
EDKFGFSALPGGWGGPDGSFSNVGEEGYWRIANSPEYWQIANYPESRYMYYNGDGVSYDYDGSTGKIKLYSVRCLQGDAKEAEAKEAAALAAKKAEKAAEAAAEAAKAKKEKAEKEAEMKAYVKVRGGTFTDTRDGKKYKTIKMGEQIWMAENLNYAASGSKCYYNRPKNCDIYGRLYNWKTAMKACPSGWHLPSNKEWDILYKYASRPYEDEGMAIEYLKAANGWDSYSASNSIWTGNGDDKFGFSALPGGWGYSDGSFNGIRDYGRWWSVSDDDSGKGDSKTMYTHKTNEGFLYFGGEFLHSIRCLQKVPQPKGSTQQKETFTDTRDGKTYKTIKIGEQVWMAENLNYEASGSKCNGEGGKVFNRKTKKHDITLSNAEIQTNCNKYGKLYDWEAAMKACPSGWHLPSKEEWGVLTKVAGGDKIAGLYLKATNGWIENGNGEDKFGFSALPGGLGRNGGSSFSADLSAG

SEQ ID NO: 91397 - protein, 78 aa, Unknown
  Obtained from environmental sample
  misc_feature (1)..(78): Xaa is any amino acid
MDYCLSKEGAYIDFPFGDIPICVKYNGHIFAEVYPKDSDYKITLRCKPEIGQMYRKKYSEIILQGYHVPLNKENIKIQ

SEQ ID NO: 91398 - protein, 54 aa, Unknown
  Obtained from environmental sample
  misc_feature (1)..(54): Xaa is any amino acid
MNKLESHPISGQNFEFLFYFDIDTPVISDELKQVLAELEQETDMFSFLGTYQEF

SEQ ID NO: 91399 - protein, 343 aa, Unknown
  Obtained from environmental sample
  misc_feature (1)..(343): Xaa is any amino acid
VIFSFYAGCYTSDSKDKGIHLLKFDTDSGNLRLENSFYGGENPSFLLRSGNFLYAANESKNAGKVSSFSIEDRNTLTLLNSREVSGASTCHVAEMNNFLYAANYGSGSIFGVEILRDGSLGGIAAEIQHTGSGPNQVRQKGPHAHSVNPIPRYNLLIAADLGADSLFCYNQEKNGTLVPDSANPAVKAPPGGGPRHLAIHPGGEFVYAVMEMGVSLVCYRMTDTGLKQEAEYPLIEGAFTQADTAADIHFTESGARLYASVRGKNLISAFNVCEGSSLQFIGSYPTFGDSPRNFCLSPGEEFVVIAHQASGSVTVCPVDSQTGAVGNALTSVVLSGASCVIKG

SEQ ID NO: 91400 - protein, 283 aa, Unknown
  Obtained from environmental sample
  misc_feature (1)..(283): Xaa is any amino acid
FTKIGELKKRFSLKYAKLLKTRGFIKKELAAELGFENVKVITGAGHDTADAVAAAPLNGEDSCYISCGTWSLLGIESSSPITGKEAYDCNFTNESGINDTILFLKNISGLWLLQESRGQWKREGETLSYAGIEDAIANNASPEVYLDAELNDFGAPGDLPSLFNKFFRETGQKPLKNKIDIAHCIMESLALSYDYRIRQLERITGKKFNAVNIIGGGSKDTNLMRFTANATGKKVIAGPSEATAIGNIIIQLIAAGELKSVKEAREKIEGLVSYLPTNRRNLE

SEQ ID NO: 91401 - protein, 428 aa, Unknown
  Obtained from environmental sample
  DOMAIN (8)...(180): L-fucose isomerase, first N-terminal domain
  misc_feature (1)..(428): Xaa is any amino acid
MAINRLKGSYPKIGIRPTIDGRQGPLNVRGDLEEQTMNMAKAAKTFLENNLRYSNGEKVQVIIADTTIGRVSESAACADKFRREGVDISITVTPCWCYGSETMDMDKNTIKAVWGFNGTERPGAVYLASVLASHAQKGLPAFGIYGRDVQDANNTEIPPDVQEKLLRFARTAIAAAAMRGKSYLQIGSICMGIASSIINCDFFEEYLGMRVESVDEVEIIRRMEKGIYDENEFRIALEWTKKYCKEGFDKNPQHLQRSREEQDKVWEFVVKMMCIIKDLFSGNPNLKAGCEEERLGHNAIAGGFQGQRQWTDFYPNCDFPESLMCSSFDWEGAREPYVLATENDTLNAVGMLFGKLLTGTAQIFADVRTYWSPEAVKKAASYELEGDAKEAGGFIHLINSGAACLDACGEMKRRNGKRVIKPFWGVTE

SEQ ID NO: 91402 - protein, 73 aa, Unknown
  Obtained from environmental sample
  DOMAIN (1)...(69): RbsD / FucU transport protein family
  misc_feature (1)..(73): Xaa is any amino acid
MAAVPGDTLDETTEKSYRAVIDKKWPGTPPVERIERFSFYERAEKAFAVVMTGETVKYGNIILKKGVTNSYGN

SEQ ID NO: 91403 - protein, 472 aa, Unknown
  Obtained from environmental sample
  DOMAIN (1)...(434): 4-alpha-glucanotransferase
  misc_feature (1)..(472): Xaa is any amino acid
EFPDLVEFAHLCKKMKIGLIQLLPVNDTGYQSSPYFSLTAFALHPLYIRIADLPEAEKFKDKAAAINKEFGHETRFPYEKVLQAKMSLLREIYAENESAIEEKAGPESSLGLWIKDNPWIKPFAVYRRLKEAHEEKSWKEWKDHRDVTPEDIEAIWEDPKFRSDHLFWAWLQEALDTQFSAAAKAVAEAGIVLEGDLPILMNDDSCDVWAHKEIFNLELSAGAPPDMYSPEGQNWGFPLHNWDEQEKDNFAWWKQRLAVAGKYYQAYRIDHVLGFFRIWASSHRDYSSALGRYIPYTPITNSDLKKLGFDKGRIRWVSLPHIPTNELLDAMRANQMNEDDIAAATKKIFSKALDRVGNEELWLFKKKIKGEKDIDDLGLHPSARSYLINVWRNRLFLEYAKGKYFPVWSYRDSRAYHSLANEEKENLEQLLQKRMARSEKIWEAHGRKLLSVLVESSSMLPCAEDLGAVPNC

SEQ ID NO: 91404 - protein, 365 aa, Unknown
  Obtained from environmental sample
  DOMAIN (10)...(353): FlhB HrpN YscU SpaS Family
  misc_feature (1)..(365): Xaa is any amino acid
LQWFADDDEDAPGKTEEPTEHKLQRLREEGQVVKSQELVGAIGLFLPALLLLFLAPSMLRTCVEMIRFFFLRAVELDPTKDAVILVVLLRYFVKLVWPILTVAVLAAVFSNVAQIGFLFTTKTIVPNFSKVLPKIGQYFRRIFSVDGIYNFIKSIAKMAIIGFVAFILIYSEKDKLLNLQKTDVWIGLTTVSSIAIKMMIISAVLLIILSIPDYMFQRWRFRERNRMTRYEIKEEMKMYEADPQVQSRIRSRFRELLRQNIGVSVPKADVVVTNPTHLAVAIQYDQRSMAGPMVVAMGADEMSARIRQIARENDVPLVENKPLAWALYRETDVGEIIPTAYWNTVAVILSKVWYLNEDRRRRISA

SEQ ID NO: 91405 - protein, 218 aa, Unknown
  Obtained from environmental sample
  DOMAIN (8)...(218): Bacterial export proteins, family 1
  misc_feature (1)..(218): Xaa is any amino acid
MVDNAVLQNILLFGPVFLLIAARALAMIEVAPLLSSESIPQVVKISLAGLAAFAVLPTAEVFMAANSPSGLVTLPGGTISDLRSETFSLRFFLLIIGEGIIGLIIGFFMMIIFSAFSTAGQFFSLQMGFGASETFDPLSQIENPLMGQYLNLVSMLVFVTIGGFHQLFLGGFWRSVQTINIISLVEGRETVVTMIVSGLSRLFMDAMVISLPILGTLF

SEQ ID NO: 91406 - protein, 65 aa, Unknown
  Obtained from environmental sample
  DOMAIN (1)...(55): Bacterial export proteins, family 3
  misc_feature (1)..(65): Xaa is any amino acid
LISALVIGLVVAILQATTSIQEQTLVFVPKVIVILLVLALLGGWMFTSLGQYTTELFRKIPDMAR

SEQ ID NO: 91407 - protein, 442 aa, Unknown
  Obtained from environmental sample
  misc_feature (1)..(442): Xaa is any amino acid
MGRDVARAGQAIKKHDMAGRNMLKTATTMSITDIAVDRFGNIFTTSTEGWIQVNSGDGEEIFFFGSGHLSNEDIAGWYTNLVSIAVSSQGHIWALDGEKAFLQSYTPTEYTEAIYHAQQLFNEGHYEEAGTEWNNVLRFNQMSVLAHNGLGKSYLYQEEYEKARYEFFVAGNRGYYSQAFWETRNIWLLGNIPYILVSFVLIFAGSFVLKLADKNQILKAAIKKNIHTLMNAKYINTTLFSFSVARHPMDSFYDLKIKRKGSLPGAIVNFLFIFAAYLINQTSKGFIIQFIEIEDMDFNVIIGGFIGIYLLFVFCNYLVTSINDGEGEIDDIFKLVSYAMLPLSVTLLAVTLISHVTTENETFLLVFMLIGGFAWSAALLWLGLQEVHNYSFSNTFKSLLFTAVFMLIVLVVLFNMTILFSQFVQFFEAIIREAYANITKMY

SEQ ID NO: 91408 - protein, 452 aa, Unknown
  Obtained from environmental sample
  DOMAIN (219)...(301): Helicase conserved C-terminal domain
  misc_feature (1)..(452): Xaa is any amino acid
DATDKYRKANDLVNRLKRDDDYTIDEKHKNVQLTEKGVTHIESIMGIKGLYGEHSDWVHYILQSVKAHNVFVKDVDYIVRDGEIVIVDENTGRLMEGRRYSEGIHQSIEAKENVQIRRENQTLATITFQNLFRMYKKLSGMTGTAETEATEFLKIYNMPTWVIPTHKPCIRNDMQDQIYKTADAKWKAIIADITERHEKGQPILVGTISVEKSEKLSKMLRIANIPHDVLNAKNHGREAEIIQYAGHKGKVTVATNMAGRGTDIALGPGVVELGGLHVLGTERHESRRIDNQLRGRSGRQGDPGSSQYYLSLDDDLMRIFGGENVKKIMDRFGFKDDDVIEHPWVTKSVRNAQRRIEGQNFDARKHLLDYDNVMNEQRRVIYSLRRSILMGEEIKTEISNRIEDAADIKVSKYVTPNSYPETWDMDGLENDLKMSMGIEYKPGPEKLTGMTA

SEQ ID NO: 91409 - protein, 291 aa, Unknown
  Obtained from environmental sample
  misc_feature (1)..(291): Xaa is any amino acid
MGKITLTTGKIESRIFTIRGLQVMLDSDLATMYQVEVKRLNEQVRRNHERFPAEFCFQLTEVEFKALILRSQIATSNKRGGRRYLPYVFTEQGIAMLSAVLHSDTAIKASIQIMHAFVKMRKIISYNIGLVQRIEGLEQKQIATDKKIDDIFNALESKEVILKCGVFFDGQIFDAYVLANKIIKSAKNSITLIDNYIDESVLTMLGKKSKNVKVTLLTKNIPKQLNLYVAKFNQQYTNMEVKAFNLSHDRFLIIDNKDIYHLGASLKDLGKKWFAFSKIENEGLFLLEKIT

SEQ ID NO: 91410 - protein, 756 aa, Unknown
  Obtained from environmental sample
  misc_feature (1)..(756): Xaa is any amino acid
LLKEARELRVVDEMKKDCDEHLAHSKNSIIALYLSGMIALSRQIIDDAAMINLVTIFADNHKWAIVKYLCERILDHGESKYALRSLIDCCKNENNEEALYGIWERLVKVDYEEAELAKSLAEHYEKLGNNETAVDYYKKALHRFINKSLFANVKEIWEKLLVYCPDDIDFFFHVQKKVAKTISEERAIDLLKLVYASCKDRDVDTAIAILKIVLQYDEQDYPARKEIVECYKKKFAGHSHLDDYIRISNLTQSYRNVHEAITDFEKHIAFDKGNYVYHRTWGVGKIVSIEGDDIKINFSKKANHTMSLKMAVSALQILSKDHIWVIRATWNKEKLQEKIKADIPWALRTIIKSAGNSCDLKKIKSELCPGVLSEKEWPSWSGKARDILKSDPNFGVSPDNIDIFTVRERPISISEKLYNEFKAERNFFARTDIIRNFISHKNAEIDSDYFAEMLSYFTSFLKTANQGGEQQIAAYLLVKDIAAKFPHLGVSINFNFADVFKNITNIPELYSNLKDSRFREEFLKNIQIHIPDWADIFIQIFPKTMDAAIIDILEEEHGEKLTALTIDCFENFKEYREAVVWLFRMYSKAKAEIKAKSKARAKPEDDASSAAAAAASADDAALSKAKAAARVKWYEAAGISEERQLITLIHILDLTYRDIENQRETTEARKINKQIYTILIKEDVLGSFLDAADTDIISRIYRFVNDVKNLDPQDKINLRSRIQDKHQDFKFIDSMEKRILPAGLPLQGQNSRRSKN

SEQ ID NO: 91411 - protein, 572 aa, Unknown
  Obtained from environmental sample
  DOMAIN (8)...(572): Bacterial protein of unknown function (DUF879)
  misc_feature (1)..(572): Xaa is any amino acid
GRTPLSQEEGARFAEKYPQRAGYLNLESAKDRDPKVEALFEGFAFISAGIRERIDDALPSLAAGLAGLVWPQLLHPIPALCIAEFKPRPGTLQGVCSIPRGTALFTDPDPATGVSCQFAATREVRVCPISVTGAQSAANGDGKDSLTVAFKLDKGIRPESIPLSPLRVFINDELPAALHIRKMLLCHAEEVILSDGAGRSVTLPPQDVFAEGGFGEEDGLFPEPQRAGRALDLLRDYFAFPERFMFIDLHGLDALAERGGCAAGTVYMQVRFDRKLSAKVSLSRDTFKLHCAPAVNVFRRDAEPILVDGRKHEYELVSDAGRPECFAIHSVASVVGIDSATGARRNYERYCKTGGGKQRFYSLRAEELSGDGLLYNNDRRLKLSMNGRQTEDGRLIRETLHIEAWQTNGTLARKVLTEGAALHKAAPEFPDYITFTNITKPRPPINPPSGDEYLWTFLSHIASAYTNFGEAERLKELLRTYDWSGRAELRPEIEAIRSVSITPRDLSVDRAVIRGAEMNIVADERAAPEESLFLLGTVLARSLSCMASINTFLKLVLTLPVSGKSHEWYCRS

SEQ ID NO: 91412 - protein, 208 aa, Unknown
  Obtained from environmental sample
  DOMAIN (33)...(187): DHH family
  misc_feature (1)..(208): Xaa is any amino acid
VAQLLQTIMLRQFSHINQPPFKEISLPAEFIEKLAKHSRFLLTPHESPDADAIGSSLGLAWHLRGLGKEFRIVVSPKLPHFLKFLDTQSWIEVYSPNEHGSIASWPDCWVMLDASELGRLGPLKKAFSESAATKACIDHHLFGSMDLFDFFVSKPAASSTCELIAEALAPKDPMCAEMASAIYAGIVDDTGSFKFPSTTPQVHRLAAA

SEQ ID NO: 91413 - protein, 217 aa, Unknown
  Obtained from environmental sample
  DOMAIN (10)...(216): Glycerate kinase family
  misc_feature (1)..(217): Xaa is any amino acid
DTDIARGAVAVESAKIIGMAGLERLDPIKASSRGFGELLAKLQNAPRLLIGLGGSATVDGGMDWPSIVLPPATVFCDVKTDLSDAVRLFAPQKGALPFHLPILQKRLMSLGLPDGPHTGAAGGLGAKFKQLGGDLVDGAVAMMELLGFDEACAPCSAVVTGEGRLDASTLEGKLPLAVAKRARALGKKVIGHFGCKGEGWREAAEYFDEVSFDSNSK

SEQ ID NO: 91414 - protein, 55 aa, Unknown
  Obtained from environmental sample
  misc_feature (1)..(55): Xaa is any amino acid
MECAELYTLAAKYEREALCIVTISDSFITGEATSSEERQTTFTSMMETALETAVS

SEQ ID NO: 91415 - protein, 313 aa, Unknown
  Obtained from environmental sample
  DOMAIN (33)...(223): ABC transporter
  misc_feature (1)..(313): Xaa is any amino acid
MSNAAITVQNLTKRYKGAEKPAVDDISFSVGEGEFFAFLGPNGAGKTTTISILTTTLSKTSGELRIAGFDADTQARQVREEIGIIFQQPSLDQNLSAEENIRFHACLYGMCAYRPSFKLMPAAYRKKVLELADMVGLGDVLGKPVKKLSGGMQRKLEIIRSLIHTPRVLFLDEPTQGLDAVSSRGLWEYINETRSRYGTTVFLTTHYIDEAENVDTVCLINNGKIASCCPPSELKRSLLRHELILDAEDRTALTNELSALGLEFALNGHVVVPYKDSAQEIISRIKTKLTVLKIHEPSLEDAYIEFLTKQKEN

SEQ ID NO: 91416 - protein, 327 aa, Unknown
  Obtained from environmental sample
  misc_feature (1)..(327): Xaa is any amino acid
MNTGFKTSPNSFFCFETHATFVYEKGQEFYFSGDDDIWVFINDNLVIDIGGCHLATPGYVALDEIGRAGSRWQGSQQVSGNGTKPNYEQLVEGTEYPIDIFFCDRRSNASNIRISTNMYIQQKNGLKVDGDAKNGEATVCVEQSGSGTCASLLGTGGTGTQKMCGDNTDLSQWIEFYLINRSKTTRYPENPAQGLSIGEHCEATSNPDELLCFKGVTINMKTGKARVDQGKVQNLPGTWYLYVKVIDSKNPGLAIEDEKVATITTQTYVGVAYGDIKDGNTLLTNRCSKDLVAVTGELVPVCFSSGIQNGNTFETEKCRILWAEHSN

SEQ ID NO: 91417 - protein, 757 aa, Unknown
  Obtained from environmental sample
  misc_feature (1)..(757): Xaa is any amino acid
DYPRCQNGLIFHKEGENHLATFVRKKYLPARELSFALPAPAGIPQVVMQSAQGSYYFLASVTPNLEQRKRRWDDDLAIIWDVSLSGSQRNLTREMEMLNIIFAEKKTADVNLYFLNNKNMRMGNYKVAGGKWDKLKSALDSAVFDGGTDFSQINMSDIIGKEVLFFSDGISTLSDAYFSIDSAETRPVHCVVSSAKADYGAMRLIADRTNGKFININALSPERLKNELLYETPLFLGAEHGEPVREVYPSIATPVYGNFSISGIADTNSAEITLLFGFDSTVETRVKVLLDAKSASSPIDAYKIWAQKKITELELDYYNNRDELTELAQRFGLVTRNTSLIVLESIDDYVRYGIAPPTSENELYAQYQRRTGGGGRIGVAGIGYGSGSGYGSGFGGSGGGTDGSRSGSGGNSNSSRGSGTTRESSSREERVAKLVKSEEPAATLERQKESSNSGISSNKGGGDPRARVTQMGVLGVVSGQVKGKPVASADVFGKGGFSTDIDAILSDVGGLKSGGDGSVGRKGTAGLSYGSGYGSGFGGSGGSDREIDDLLGGLMGGSGDGLPLRKNTGEPKISSPDFLKGGALIGGRSRASIFRVVMQNMAALRYAYNKRLRDVPGLHGKVTIKFAIDEFGSVIFAQIVESTLFDRELENTVLSRVKSWNFERIDKPGDVTEVTYPFVFSNDGAATTPQNNTNTTQNYWDPGALNGALVAANNLSFWWTRDFTLPPKSKYPTPDKFNKIAGAADIASRDKDNGYLD

SEQ ID NO: 91418 - protein, 234 aa, Unknown
  Obtained from environmental sample
  misc_feature (1)..(234): Xaa is any amino acid
MDNTPYINRKIDNDLLSWMLESKRKPLLLRGARQVGKSRAVKRLSEQFEYFLEINFESNNEVRDLFAKGDLSPFKLCQELSVIYQMPIIPGKTLLFFDEIQSSVPAISSLRFFYEEYGELHVIAAGSLLEFAFQEIPSFGVGRVRSMFMYPMNFFEFLNACNHQLLLQAIQKADCKNPLSEPVHKKAVELLRIFLILGGMPEVVSAYVNNNDLLSCQRILDDLIISLRSDFTKY

SEQ ID NO: 91419 - protein, 463 aa, Unknown
  Obtained from environmental sample
  DOMAIN (262)...(412): ABC transporter
  misc_feature (1)..(463): Xaa is any amino acid
LLAPVIRGKKGEHQKIIEDARKAGFARARIDGVPVNLDESIKLDKQKKHSIEIIVDRLVIGKDIRSRLAESVETALQTAEGLLIVLINEDGKNSEQIFSQKNSCPDCGVSIPELQPRLFSFNNPFGACPGCSGLGAKLEFDPDLVIPDRSLSFNEGGVLPYNPDSAWNRSRFQSLAKHYGFSLDTPFNKLSKKVVNAILYGSDDDIKVRYVNREGTGHFEYQSKFPGILEELKRRYLETQSQGIKDWLEKFMSQKPCEDCGGKRLKPEVLAVTVAGKNIWELSKLSVTDSLHFFKTVKFNKNENKIAYQILKEINARLGFMQNVGLDYLSLERKASTLSGGEAQRIRLATQIGSSLVGVLYILDEPSIGLHQRDNQRLIDTLMYLRDLGNTLIVVEHDEQTLRTADHIVDLGPSAGVHGGYVVAQGRPEEVMKVKESLTGQYLAGTLKIDIPKERRAGNGAVS

SEQ ID NO: 91420 - protein, 212 aa, Unknown
  Obtained from environmental sample
  misc_feature (1)..(212): Xaa is any amino acid
MNIRSKIMLSIAVGAAVATLAVCTMSVFSVKSIVVVAAIISVFCAVAAVGGLLIAESINIPFNASGDGRLTGTDAAAKSNAAAAAQARLLAAKANAVDAAVKRMTKAVSRIRAASDKNAKIIKRFNYTAIRAHLLAFRTTIKAARAGDGGNGYAFIADEVRNFAQRCSMTAKNAADMIEESVREADDGVKLVEDAAKSIGKIVDTAPVTLTA

SEQ ID NO: 91421 - protein, 330 aa, Unknown
  Obtained from environmental sample
  misc_feature (1)..(330): Xaa is any amino acid
MIGTTNIFKPTHIQRKALALLKGGAKHILLFGGSRSGKTTVLVMAIIYRALRFAGSRHLICRYRAKDARSSVMRETLLPWLDNTVGKNRYTYLAHESMITLFNSSEIWIGGLGDREQADKILGHEYNTIYFNEISQLSYAAVTTAYSRLAMRIKGCRNLFYYDCNPGSPLHWAYKIFVLKKTFLSGEQLEKPELYQSMLLNPEDNRDNLPEDYITDILDVLPEKQKARFRDGLWVKAEGVIYDKFDESMILRSSELPERFDRYAAGQDFGLNITFVKIGWLGDAVYIIGDYGAFNMTTQSFNEELGARGLLDCPDGMGMPVYCDPAGGNG

SEQ ID NO: 91422 - protein, 394 aa, Unknown
  Obtained from environmental sample
  DOMAIN (4)...(385): Protein of unknown function (DUF342)
  misc_feature (1)..(394): Xaa is any amino acid
ANTREHGSVLGHVIARGESPIARGGSAIKWLVPLELPLSGAASESKTVQVKAGVPIAELSEAVPEGRPGYDVTGKEIPVEKAAALSIEHDQSVRETPLGKGKRLIAARSGELGYDGKTLKILSTKTIQGDVNQETGKIKFSGEIKITGNVLSGGVVVGSSHVTVDGYAEEALISSGGKATVTMGVKGGGRGVLKARAGISAAFVERASAVALGDVQLNKGSILSSIKTNGKLSIASESGKLSGGVCQARQGIDAADIGSEKGLRTELSFGQDYFIKEQIAACEEEIAKTRNDLSELEEKITELRKEKRKLPDDLKIEKIRLVKLLEQKNLKIFTLREKFEEHFESEIRCRGTVFSGVVIESHNRYYEVQQKRNQVVFYFDRESGRIKEKPMTEF

SEQ ID NO: 91423 - protein, 65 aa, Unknown
  Obtained from environmental sample
  DOMAIN (2)...(64): Stage III sporulation protein AC (SpoIIIAC)
  misc_feature (1)..(65): Xaa is any amino acid
MTIETIFKLVAIGILASVACTILKHSGKEDIATIVSLAAVIICLVMVLGMINELFNVVKDLFQLY

SEQ ID NO: 91424 - protein, 136 aa, Unknown
  Obtained from environmental sample
  misc_feature (1)..(136): Xaa is any amino acid
VPFEQYCVEVLFAAVQPTLELLGTTLDDEATAELEPATELELRTKELLEATDELLGFELEDEATAELELATELELRTKELLEATDELLGFELEDETTAELEFVTELELRMEELLPCGTLEDEETTDELLRNTLELL

SEQ ID NO: 91425 - protein, 650 aa, Unknown
  Obtained from environmental sample
  misc_feature (1)..(650): Xaa is any amino acid
NTAVTVKYPIHCVVSSAKADYGAMRVIAGKTKGKFINLNALSSDRLKDELLNETPQFLGIERGESVREIYPSIATPVYGKFSLSGISDGNNAEATLLFGYGNKVKKRFKVNLDAKKAGEQGNVQKLWAQKKITELDLKYEKNSAELTELGQQFGIVTRNTSLIVLETVNDYIRYKITPPAELMEEYLNMQKKSDVRTRDTKRNMLKEALAAVDTIKEWWNIDFLPKQSKYPMPPDSSEDNIDDYVYNYDSTSRRGVSGIGYGSGYGSGFGGGGGGVDDIIGGLMGAGGGGIESGGIEIRMHGSLIVSASDSLFNRAPSSDNDIEEQEEETSSPTITVKSIKNDSDYLKKLTGKTAEDYKIYLKLRDNYADSPTFYFDMADWFYTHKDRKLAIRILTSIADLELENASLYRLLGYRLKEYGDYALEKFVCQKVIQWRPMEPQSYRDYALALADNGETQAALDSLLGVLTRTYSEYIIDRSIGIEEIVVTEINHLITKNANLDKSRIDKRLIINIPVDIRVVINWNMDNTDIDLHVKDPNGEKCFYGHKLTEIGGRISADNTNGYGPEQFLLKKAVKGKYSVFINYFGDRQVTDDGPSTIMAEIYTKYADNTEQRRIVCLQLSKAAKADGRDDESREDDKGRKYVEVAEFEF

SEQ ID NO: 91426 - protein, 494 aa, Unknown
  Obtained from environmental sample
  DOMAIN (15)...(131): Vault protein inter-alpha-trypsin
  misc_feature (1)..(494): Xaa is any amino acid
MAESPVLKINGKKNSDVYLQSLDIQVEVTGSLASTRYTMVFKNKSDRVLEGELTFPLPDECSVTFYALDINGKMREAVPVDKAKATEIFEEIEQRRVDPGLLEKVEGNNFRTRVYPIPAKGIRTVSIGYEEVLTLENKSLHYRLPMTYPDPLENFSVKATVWKSNLKPIVPESVEQLRFDRTDGNYVAVFARKNYRPARMLNFSVPVPVDVPQVMMQPVQGSRYFFASVAPNLKTRKKHWDKDLAIIWDVSLSGSQRDLKREMELLDMLFAEKKNANVYLYFLNNTLGKMVNKNTTNGEYKVNNGNWDGLKNVLKKAVFDGGTDFSKINVGAISGKEILFFSDGISTLSDADFIKNTTVTHPIHCIVSSAKADYSAMRLIAGKTKGKFININALSPENLKNELLNETLQFLGTEHGEALREVYPSLATPVFGKFSLAGISEAGNAEITLLFGFGNKVEKRFKVKLDAKKAGKQGNVYRLWAQKKIAELDLNYEA

SEQ ID NO: 91427 - protein, 531 aa, Unknown
  Obtained from environmental sample
  DOMAIN (86)...(164): Bacterial Ig-like domain (group 2)
  misc_feature (1)..(531): Xaa is any amino acid
HTLALKTDGSLWAWGSNEYGQRGHSVAAPAQVGTDKDWAIVSAGNHSMAVKTNGSVWAWGRNNAGQLGDGTTTDRNAPVRVDSWVPVSGVSLDKSAIGLMLGGQEQLTATIQPSNATYRPVTWSSSNTAVATVSVDGLVRAVAVGTALITVITHDGDWKAQCAVTVETISVTGVSLNKSETTINAGDQEQLVATIQPSNAINQTVSWTSSNTAVATVSNSGLVTALSAGITGITVKTQDGNKIAQCAVTVTPVLVSGVSLNKTTMSLVGWSQEQLTATIQPGNATNKNVTWTSSNSDIASVSSSGLVSAGVVSGTAQITVTTQDGNKTAQCAVTVTTVPVSGVSLNKTTMTLVGRSLGQLRATLLPGNASNRVVTWTSSNTAVAVVSALGLVTGVGVGTADITVTTQDGNKTAKCVVTVKPAMALLAHSLRSLVVRPDGSLWAWGYNHKGQLGDGTTTHRLFPTRIGTDNDWVALGGGNWHSHGIKSDGSLWGWGENSYRIGDGNASIGGTSDRYSPVREGTDTDWAAVTG

SEQ ID NO: 91428 - protein, 210 aa, Unknown
  Obtained from environmental sample
  misc_feature (1)..(210): Xaa is any amino acid
MKNNKVKLIPLLGLLSVILYFLHVILGEIFYEGYNPLAQAVSDLTASNSPSKNIARLFSMLYGICAVSFSIGFFVYLRNKINKAVTAASFIFCIMNIISFLGYTFFPLSESGYTATFQDKMHMVVTVFVVLLTIVSLVFFFIGLFRAKEHKWLGVVSISTLLILMAGAMLINIMPNEYFGVAERINVYSIIIYTGILSLWMKRYIGKEII

SEQ ID NO: 91429 - protein, 560 aa, Unknown
  Obtained from environmental sample
  misc_feature (1)..(560): Xaa is any amino acid
MVHREWEEAWRREPLPLLGPWLRYEGPISLSRVASVFGISLAEAEDAVNALAEVDEVICDARLAGTVSPLVCDSRNFEMLLRLSRRKQRPEISERPAVFLVPFLAMRQGLLSMSNAREQITGNREQSRFKEQSNEILLKKLNACCAPVKLWETEFFTARCAHYSPEIINSEINEGRLVWYGAGKERIGFCRPDDLELVNVNSVQKPKQKIHSEVELPGEAMSPGELLKKILARLIDNGFFDRPRDFWEIKDAINAGAKKNITGKECADALWQEAWQGRLSSDSFEPLRRGIQFGFTIKNTETSEQPPQSSLGSPRMPRVPRSLRDRWRDGAPVSGRWFSIVLNDVENTEQGQWWDDPLEEDGRNRDRVRLLLARWGILCRPLMEKVSKSELSPFTWSGLLPTMRRMELSGELVAGRFFAGINSLQFASPAIARELENAEAVDSIYWMNAVDPASPAGLDIEGLDSRLPDRLLSSRIYFRGAQLIAVSNRNNKELHIFIAPDDPGIPALIDLIKIPRARKIFPENKIVVDTINNKTAGQSEYARGFQDCGFISDRGRLCFW

SEQ ID NO: 91430 - protein, 669 aa, Unknown
  Obtained from environmental sample
  DOMAIN (40)...(116): Helicase conserved C-terminal domain
  misc_feature (1)..(669): Xaa is any amino acid
LSRISGRSTILVFTESRRRAERLCYFINQEAALYETALQKAGVSGTVAFTHHGSLSKELRQSVERRLAAGSLFCVVATASLELGIDIGSVDEVVLAGSPNSVSQALQRVGRSGHGVGMVSRGLLFPFHGMDLLLASALKSAVEDRDIEEIRPIENPLDILAQMILALCVEKNRNIDELYRLLKGFYIFRNLNREAYLRTVRMLAGLSSRGDGNVRLRDIKPRIWLDNAPSPEGKTCEIGALDGSLLLLYSSGGVIANRGMYSLRLADGTKIGELDEEFVWERRIGDRFHFGGRGWRITAIEAESVQAVPLETSSDFMPFWKADTVFRSPRLTERVLAILDGYNGDSSPGAPVAAAIPEALVAFLDSQRSAQHGLPLSGTNRITVEIIDSPENRGDLYAVVMHSFWGGAVNYPLTLALAQELEETLKLRVESFSNDDSLLLLIPRLGIEGNVKQIENIFRNAVTELNKSGGGGLCRGERLFRNRLEASGVFGANFREAAERSLLLPKAGFGKRTPLWITRQRSRRLFDAVRGEEGFPVTAEAWRSCLVDLFDMEGFRELLCAINDSTVAVSFFYSSIPSPFSRDMVRQETNTLMYEYDERKDIQGSGATLSDRVIQEALGDASLRPVIKDGACHTSFGVRLRREEPDWAPDDRLSLYEWVKERIAIPQDE

SEQ ID NO: 91431 - protein, 729 aa, Unknown
  Obtained from environmental sample
  misc_feature (1)..(729): Xaa is any amino acid
VDAVKEPLKFSGPGPHNITVNEPISATWLESGAPARFLFELSAAIKANISLTPDFKGTIKQSGNKEAAPISVSGGYDGVLQKGKYEISVTPVKPQNYTPYELSVATADLFAGVGYEVGRDQTVPVQVGERGRYEIFSQGRSEVAARLYASDNKTEIARSGGDQLDWNFFISERLDSGSYHLRLTGFESNPAKVFMRRAADTVLSQVKPDNAVVEKRRVPLSWKQIVIPIMSQSGNVLNISVNSGSRLVCELEAADKPPVANPASASIGRRRGKQVNISAVMETGAAYTLRIWSEDRLDDVAAVEIWAADAVPLSFESARSGVTGQASKEAGNTFFYKIDGMDAGPGHYEMIATENEISRVSGASGARGIFEEEEGMIIANAGRQLIVGVAFKSPEKFRFAMAPVLLSDLRDAQEKTSGKFETADKYRGSKHHIKSREREELPVVIKLGGDKVFAIDAPAQTLGVVTLTMPAGQPIVGLSSPPQTAEFVRNGIPVMGGQYISRGVSKTVVIPGDTGRVVGWNAQTGGSVATGVNAIFTMKSYKMEKTDTLKTGRTVWTAKPSLAKEYRVSNSSGSPIVTIKLSPSTGVVYVSPDGRRDMYYGGDEGAQYTVTPVGGRFFLFGKADGGDDGYGGIELEMYASPLAGKKVDGQRGILTAGSEAVKLQSIDTREALRVKNGTKQTLRLYRSGSIESADWVNKSGVMTQNVTNGGKLSGESGVLLVNYSAGTGK

SEQ ID NO: 91432 - protein, 439 aa, Unknown
  Obtained from environmental sample
  DOMAIN (190)...(374): Radical SAM superfamily
  misc_feature (1)..(439): Xaa is any amino acid
MIDSHKHSAQARVAVFGDPDFVAAMVRLCCENGALPVLAATGSISPKLKEMLANEAEDCRKFHFAEEIRVLDDSDFSAIEKGCVELGANLLIGSSDGRRISRKLNIPLIRCAFPIHDYIGGQRTRILGFDGSLCILDQAANAMMEKTESSFREELHKKFYKPQTAKKVADKTATHPCFGEQACQNARVHLPVAPKCNIQCNYCLRNYDCMNESRPGVTSKILSPAEALERYIKLKANMLGLTVVGIAGPGDALANFDKSAETFRLIREYDPSVTFCIATNGLLLTQYAQELKELDVSHVTVTMNAVDPSIGAKIYKYVQYMGKTYTGIEGASILLANQLAGIKMLSDAGIMCKVNCVTLKGINEHHIYEVTQTAANLGAFMTNIMPHLPVKGSAFEGLERVTNKEIAVLREQCGANIKQMTHCRQCRSDAAGTLIEMCL

SEQ ID NO: 91433 - protein, 493 aa, Unknown
  Obtained from environmental sample
  DOMAIN (102)...(364): Peptidase M16C associated
  misc_feature (1)..(493): Xaa is any amino acid
ALILGELRRLVTEGIPQGEIEAALLFMEFSQREVKRSHGPFSLVWMRRTLRTWLHGGKPWDGLLLTRALETLKRRLAENSRYFESLIQKYLLGNPHRALVMLEPQKDFLPQQEARLAEELAKIEQGLSDTEKNRITEKSAALEKIQSEGDSPEALASIPHLSRGDLSPEPEIIPRGFEDLQGIPALCHDLYTNGITYIDLVFPLDILPPEDYSWLPFFARAAISVGLPGMDYGEVSSLLARTVGGFNAILHTATAVKNTPPFLQTASGSFDLSGRDWLFLRLKCLDEKIAPSVDLAMRVICDADFSDRRRINDLILEMKNEINSSLAPMGHIYSSSRTCRFNSRSKSVEEKYSGISQIEFVNQLSKYDIGEIIKKLQYIREKIVKTGLIVNITGTAVNSAVAEIAQRFSRFGAPSPRLSVEISGNKPAPEVFTSRSLQVGFAALTLNAAPYDTLEQTAEIVLSHQLSTGALWEVIRMKGGAYGAFINSNSLDN

SEQ ID NO: 91434 - protein, 81 aa, Unknown
  Obtained from environmental sample
  misc_feature (1)..(81): Xaa is any amino acid
VAFDDFDSLTVIPMTTIEVNSDFRVKIEPSKENNLGRVGFVMIDKLTTIKKSGLGEYIGHIEDKYVDQIESALLKFIGVKR

SEQ ID NO: 91435 - protein, 406 aa, Unknown
  Obtained from environmental sample
  DOMAIN (6)...(391): EPSP synthase (3-phosphoshikimate 1-carboxyvinyltransferase)
  misc_feature (1)..(406): Xaa is any amino acid
MQAVKLKPTSHFSGEVRVPGSKSISNRVLLMGALAEGESKFIGILESEDTRYMREALEKLGKNFSNEKAELFLGNAGTAMRSLTAALCLKHGEYILRGEPRMHERPIKDLVDALRTLGANIEYLGTEGCPPLKIKASGLNGGVVHIKGNISSQFLSALLIAAPYCKEPLEIIVDGELISRPYVYMTIRLMEKFGIKAENNDYKSFKVEKGVYKAQTLEIEGDASSASYFWAAKAITKGNVVVKGVEKNGLQGDVKFLEVLEKMGEDLDGITVDATLFPDAAMTICPLACYAKGKTKITGIASWKVKETDRISAMANELRKVGAEVTTGDDFIEITPPKEILPATIETYNDHRMAMCFSLLSLNSPNKNGAEITILNPECVSKTFPGYFEDLRDYLQLCNSNYGDFF

SEQ ID NO: 91436 - protein, 423 aa, Unknown
  Obtained from environmental sample
  DOMAIN (65)...(182): PAS fold
  misc_feature (1)..(423): Xaa is any amino acid
MADDKTINERLAFLEEENKRLLTENNGLSRKYQTAQDTIERINWYSRSRDQMYESLLAKNTRQKEFFNLLLKNLQNVILILDQNLRLLYCSDAFLKLVGITNIGFISNQSFDEFSKWYADAASIKFILDALVQALAEKKVKVVDRVLPIGKDKEPRHYRINIAPMMNAKEVIEGIILLFYDLTEIIKAKEQAEQASRAKSVFLAQTSHEIRTPMNTVIGMSELALRADTLSQAQEYLGSIKQAGHNLLTIINDILDISKIEAGTMEIESVAYSLSTLLNDVITMIQVKVSEKPLVFIVDVDASLPNLLKGDEARIRQVLVNLLSNAVKYTQKGFIRLKVTGRAVASLSDVASQSDTTSDGGVIIFTYEVSDSGIGIKKEDMPTLFHTFTRLDMKKNQGVEGTGLGLAISKSICKAMGGDITAA

SEQ ID NO: 91437 - protein, 267 aa, Unknown
  Obtained from environmental sample
  misc_feature (1)..(267): Xaa is any amino acid
AELAKKNHSRIYDALYRISLVKNAELIIKEHGKDNGIEEFIELIQSSRNEFFSTGELSKKVRSLVDRIDYWGYLVNEHGRDEKKARWKYANIGYLIEMIENWENDPDNFERGLYAYLNRVSLLTRTDGEEDRNDASFKNGGKANLMTIHAAKGLEFPVVFIAGAEEGIIPHERSIEDEGLSTGANPIEEERRLFYVAITRAQDKLFITSCQKRNRREGTSDRQPSPFIGEIKPELIECHDSDDLPAKEEVPMDADAFFKSMRERFSK

SEQ ID NO: 91438 - protein, 107 aa, Unknown
  Obtained from environmental sample
  misc_feature (1)..(107): Xaa is any amino acid
MPVSSTEYAELQGRSSETLRCIAEKGVRKTTQKIDRNLVVNRKEIYPIKKRENKESLSVLSLFSGCGGLDIGFEGDFCVLKESINEKINPDWKLINSANSQWKRFQK

SEQ ID NO: 91439 - protein, 797 aa, Unknown
  Obtained from environmental sample
  DOMAIN (194)...(280): Glycosyltransferase 36 associated family
  misc_feature (1)..(797): Xaa is any amino acid
MEYGHFDAKAREYVITRPDTPAPWANYLGSPAYGAIISNNAGGYSFVKSGAAGRIIRYRFNEQDRPGRYVYLRDDETGDYWSASWRPVGKPLDQYKSECRHGTGYTRLEADYRDIHSEALYYVPQDSDYEVWKVKVTNNGSYARKISCFGFVEFTCESFYEQDQVNLQYTQFITRTYFKKNFVLQTINENCLNAVNESRVETRFFALAGADVASYCGDRAAFLGKYHDYGNPVSVENGKLDGTLNYNMNPCGALHTTLDLEPGKSVECVFLLGQKREAQAKELIARYEDSALPDREVAELKNYWHKKLGNLKVTTPDENFNNMINTWNAYQCFITFIWSRAASLIYCGQRNGYGYRDTVQDIQGIIHLDPDMALEKIKFMISAQVNHGGALPLVKYSHNPGNEDKPEDESYSKSTGHPSYRADDALWLFPTVWKYVAETGNTALLDEIIPYADKGKDTLFNHLKKAIDFSLNHLGIHGLPAGLHADWNDCLRLGAKGVSVFVAFQLYYAFEIMIRFAKFKKDSATEKEMTKQKNRFGKIIEEHCWKDDRFVRGITENDVTVGKKDDPEANIWLNPQSWAVISGFADDVRGKSILDLVHKELNTKYGARLMAPAYRKHAFDGALALLFNPSTKENGGIFLQTQGWIILAEALLGRGNRAVEYYLESCPAAQNEIADTRLMEPYVYSQFTESVDSPFEGRSHVHWLTGTASTVMVGSVEGILGLRPDIEGLRLAPAIPSSWKSFTMEKSFRGKKLNIKVNNPDGHESGCKKLTVNGTAVEGNYIPAGILKPENEIILEM

SEQ ID NO: 91440 - protein, 133 aa, Unknown
  Obtained from environmental sample
  misc_feature (1)..(133): Xaa is any amino acid
MFLLKAQKYRQEMEGDEMARKPALGRGLDALIPVGDFSIETETEAVESDIEVRSDIDIDDVTSIEPPAEQPEPSAEVAEATEPAEATEPVEVAEIAESAEIVETAEAAEVAEATEPAETAEATEPVEVAEVVE

SEQ ID NO: 91441 - protein, 446 aa, Unknown
  Obtained from environmental sample
  misc_feature (1)..(446): Xaa is any amino acid
MKRLFILINLLFIPILCFAQVNNSIKITGRIPDAADGRLYQIQIGAFKIIQNAENSFEKLKNASLNPSFEKYMDYTRVLIRGVKASDIPYLIERIKSAGFYEIFIKLDSGNIMTALPPVSTAALPSEGLREIGHITIKVGETKSLSGFIKDKNVTSWRSSTSSAVKADSNGVITGLNIGNGFISINETEYISAAVVPSENFYVLPESQATRLPRNSRVRNSATQNITEYCTEPTFRLAYRFNNKGEHKGASGRNGGIDILGRGRNYEWLWTTYEQGGWFYDLNGIQREMINGFQKDPRNGVELTVKPEFVYINGTPYLQLRNILYNPGNNTVTGQKFGASADVMIHRNDAAPLMHTSYGAYMTDSETNPSLELMFVCESGDGINPVDTLWLGRYGGGSHLNYIYDDNRNEIRGEDSAIGFSYQNIDLAPRQKKEFIVRFTLARTEN

SEQ ID NO: 91442 - protein, 384 aa, Unknown
  Obtained from environmental sample
  DOMAIN (1)...(265): Cellulase (glycosyl hydrolase family 5)
  misc_feature (1)..(384): Xaa is any amino acid
NAIRIPVSWTKAQSGAPNYTIRSDWMTRVVEVVNYAADNDMYIILNTHHDEDVLTFMNSNAAAGKAAFGKLWEQIADTFKNYNEKLIFEGLNEPRTIDSANEWNGGTSEERTNLNTYYSIFIDKVRHSGGNNDKRILMINPYAASSTSTAVNALTLPTDTVPNKLIVSIHAYTPYDFCYPFSNTQTPNWSSSNSSDTSAIQSAIQPAYDKFVSKGIPVIIGEFGSVNKNNTTARAAWAEYYVSYAKSKGIACFYWDNGVITGDEEKFGIFKRSDNTFAFPEIKTALINGANSTTPITPTPTPPTINGNLGNYHFGLQEDGVSPNYTQAVWELSSANVTTAKTAGAKLVLVLSAAPTATTQLVWQAPNASIWWKQKDILGETRQR

SEQ ID NO: 91443 - protein, 64 aa, Unknown
  Obtained from environmental sample
  DOMAIN (1)...(64): S1 RNA binding domain
  misc_feature (1)..(64): Xaa is any amino acid
VDGSVTEVLGNDLFRVSLENGHEVLAHLSGKMRKNFIRILLSDKITVELTPYDLTRGRITYRYK

SEQ ID NO: 91444 - protein, 294 aa, Unknown
  Obtained from environmental sample
  DOMAIN (101)...(134): Tetratricopeptide repeat
  misc_feature (1)..(294): Xaa is any amino acid
IDALVRDGAPEAALPLLRSLEKKHHGKLALHLLLARVHAMLAQHKEAVEEWNRVLLINQHHCAMPQADVALSLTENHLALGELREAQGVLLLMLKSSPGEMRLRERLAEIYLQRGMPKHALECYDILLKYDPENNDLLYKIALVQERAGDLRAALMSALRIIRQDAQNANALLMAANLYSGFSNHRSAEEYWRRLIQFSSHAAEGYKGLASCLDAQGGRDEEALAAYTEALHYACEERDRLAIQYAMVNILIRGEALREALALLEEIKARDPEYRDVAYLIDQYRELAQDELVA

SEQ ID NO: 91445 - protein, 346 aa, Unknown
  Obtained from environmental sample
  misc_feature (1)..(346): Xaa is any amino acid
LLIEYQNFRNGFTDRLKLIKNQSEFIELNELIRRDYIRSTHHIRIGTYIKNLETIFSNYFQQSAWGKKLAHDLSIICRSHGENSNFIEDLDTNAQYYGHESANLQFVSILLRLGDIIHFSFDRAPIDLRTSRLFKSEYSFQQWAIKNNGVNYSIDNGKISFRAYCQNPETYFKLHQYIDCIDVEVQIYFRFQRKWSTNYIDNLQEKVDRSNIKCDEEIFLPKRGLGFSLNQKKIIDLLMGVGLYKDKYACLRELYQNSLDAVRCMLSQNETDGRSATGIIEFSIIKEENRTYLCCTDNGIGMTKEVIENYLLKIGNSYYKSADFYKQQAKWGGKFTPISQFGIGIL

SEQ ID NO: 91446 - protein, 494 aa, Unknown
  Obtained from environmental sample
  misc_feature (1)..(494): Xaa is any amino acid
DNVGARFWKSYTHSLTHVNLPLAMATTKLGFPDTKEKLIHYQELLHNHVEMKRRIIVLDDFHCIEEPTVIRFVEECILQNMPPETSVFLISRSTPRINIAGLVYRDQIFNISENDLRFTESELVQYFHSTDISPNQESLREIMKDTEGWAFAINLIARSYQKAPGYGGYVRNAMKTNIFRLMETEIWDGITGRLQNFLTRLSLIDHLSVDFIAKLAENEEGLLADMEKQSAYVRQDSYINAYLIHPLFLEFLATKQELLSEKQKRETYAIAGDWCTRNGFRIDALSYYEKIRDYKSIVKIFFDLPLQIPLDVSHYAMPILDGAQPDELYKVEFLAEMHVRAYLCQGLLQKALDLVKYYESRFLELPENSDVKKRTLARIYICRAYIRGLMCVTDDVVDFDIYLEKASDCVSTSVDPGKLSPHCPSLWIICVGSSRKGAFEEFVDAIARAQKHMSRSNLRGFMAGELELARSVLEFYRGNMGTAESFVTLARRRR

SEQ ID NO: 91447 - protein, 400 aa, Unknown
  Obtained from environmental sample
  DOMAIN (4)...(263): BadF/BadG/BcrA/BcrD ATPase family
  misc_feature (1)..(400): Xaa is any amino acid
MLHIGIDVGSTTVKAVVIQSGTKEILYSRYERHNACQSEKVYAFLQEIFKVFPNNQFKIALCGSGGRIIADMIHAPFVQEVVANSIAVRTFYPQARVAIELGGQDAKIVFFFHDKATNRLIAGDMRMNGSCAGGTGAFIDEVASLLRTPVEKFDALAAEGTQVYDISGRCGVFAKTDIQPLLNQGGMVKDIALSTFHAIAKQTIGGLAQGLEIKPPVVFEGGPFTFNPTLINVFAQRFGLSESDIIVPPKAELFIAYGTALSINEMFMDYDKNFSPQAALTSLSMYHEIVTGNTVLQNLNFFNTEAEREDFIARHKIQSINKDLINQKKGETLHVYLGIDAGSTTTKFVLIDEDENVIDCFYSPNKGEPLKVIKKALLDMYEKYRNAGVNLEVIALGTTG

SEQ ID NO: 91448 - protein, 235 aa, Unknown
  Obtained from environmental sample
  misc_feature (1)..(235): Xaa is any amino acid
MKTNRRFLLAAIFGLAITFTLSCSGGDDGGGNDPNGGTSSPSSSPSGGGGSSPSGGGGSCDMSGYQKQKMPDGKTWMTENLNCIVAGSECYEKKESYCNTYGRLYTWEAAKKACSGGWHLPSNDEWEALVTAVGGASTAGKHLKAKKGWYSCGPTGSGKDYLCEDTYGFSALPGGFGGSDGSFRNADGAGVWWSASEYLSDIAYGRGMLTNLDLVLHGGYNKDNLYSVRCVQDSP

SEQ ID NO: 91449 - protein, 80 aa, Unknown
  Obtained from environmental sample
  misc_feature (1)..(80): Xaa is any amino acid
KPCARLEGGMYTGDGGCNVGIPQNTPLKPVSYLADVDYGMVVVFLFFGGADSHWFRILPAGYRYIHTLTAMKQSDYQAPR

SEQ ID NO: 91450 - protein, 505 aa, Unknown
  Obtained from environmental sample
  DOMAIN (137)...(310): AIR synthase related protein, N-terminal domain
  misc_feature (1)..(505): Xaa is any amino acid
VSGNAIEAVKKYLINPVDSREASMDMPHSLEEEESFPADVPVLDGFITADDEGLAAIAGKYGLALNVDDLRFCRRWFSSINRNPTLAELRALDTYWSDHCRHTTFNTILEDIDAGGSPHASALKNALALYESARREVYGNDADKLANHPRSLMDIAVIGTKVLRKRGLAADVDVSKEINACTVKVNAQFGDGTSEPWLLLFKNETHNHPTEIEPFGGAATCLGGAIRDPLSGRAFVHQAMRVTGGGDPRINLDETVPGKLPQIKIAREAAAGYSSYGNQIGLATGQVAEFYHSGFLAKRMELGAVIGAVPEAWVRREEPVPGDLVILVGGRTGRDGIGGATGSSKVHTGESVESAGAEVQKGNAVEERKLQRLFRKSEVSRLIKRCNDFGAGGVSVAVGELAGGLDINLDAVPKKYAGLDGTELAISESQERMAVLCSSDDAEAFIKAAATENLEAVIIAKVKSDNRLRMSWRGKTIVDISRNFLDTNGAPRTAKVLLVPDIKHA

SEQ ID NO: 91451 - protein, 468 aa, Unknown
  Obtained from environmental sample
  misc_feature (1)..(468): Xaa is any amino acid
FALSESDTVTEDESLTADDLPDLSEGDTTIEDTSLAADDLADLSEVDTGINTTLAADDFPDLSEGDTATEDTSLVTDDLALSESDTVTEDTSLTADDLPDLSDEDMLIEDSLVMDDLPDLSEGDAAIEDASPTADDLPDLSEGDAVVEDTSLTTDDLPDLSDGDMAIEESLVMDDLPDLSEGDAVTEDTSLAADDFADITDGENLTINEDTAKSDELDILREEGAPIPITETPENSSYLEEGGDIDLSDAVIDEPELSTEGINDELTEPSLDSDDFNLDSLDDLSIDSELDLDSDLSSVEPAQEIPEDSALDTESLDKAVDNVINESNFEEELEEPVVFDDFQDFSEDNFDSVIEPEPAPPPKAAPVKQPAATPAPPPPVQQVPVAPQPVQQAAPIIMQAPPPQQPAAQPTGGKEPFAIPSGLRSELRNILSYMDQLLESLPEEKIEEFAKSEYFDSYKKLFKDLGLV

SEQ ID NO: 91452 - protein, 358 aa, Unknown
  Obtained from environmental sample
  DOMAIN (86)...(278): CheR methyltransferase, SAM binding domain
  misc_feature (1)..(358): Xaa is any amino acid
MSGNTAVLDTAVDVPAQALSNPALLFLYHRIEQILGIKTEYDALFKLNEYIEFTCGASFIENPAVFEYLLTSREQIYIIAKYLTVNETYFFREDAHFNLLSELLPELIKLDRPLQICSAAVSIGCEAYSIAMLLDYHIKNGLEIDFSVDAFDVSADAIETAKNARYTANALRADGTSCRHILDSYLIQKDDEYIVPDNIRRKVRFFNHNIMRGLEKQYDVIFFRNSLIYFSSKSRISVLNNLSESLFNNGILFIGASEISSVKHPLLAGRNLSDVFYFQKTGTPYIYERIENHPAFTEHHKYDYKHKKKENHTLEGKKRPSLPKIEITVSCAEVNEILKKEDGKQNAEKTLEAVKKKH

SEQ ID NO: 91453 - protein, 276 aa, Unknown
  Obtained from environmental sample
  misc_feature (1)..(276): Xaa is any amino acid
VTDTPPPEKSFATLWVNGEEQLLSDGERGASAKCVFVSGDDVYVAGQETNDNWNSVATLWKNGEAQRLSRGENDAYAFSVFVSGQDVYVAREVFQAMDGGGGNTEWHRSAPTLVKNGFPQILNEGFPSGGTLSVFVSGKDVYAAGYEGSEAVVWKNNERRRLSIIGGGPATARSVFVSGNDVYVAGNESNACGTDVATLWKNGEAQRLSDMDHNAVAISVFVSGKDVFVAGWEDSKEGKRIATLWKNGEAQRLSDGSSNAVAISVFVSGKDVFVAG

SEQ ID NO: 91454 - protein, 248 aa, Unknown
  Obtained from environmental sample
  DOMAIN (116)...(163): Regulator of chromosome condensation (RCC1)
  misc_feature (1)..(248): Xaa is any amino acid
RRRQDWKAVSTNTVHSVALKADGSLWAWRIGNGTEADQSSPVRVGMDKDWAAAAAGGLHMVALKADGSLWAWGWNSDGQLGDGTNTNRNAPTQVGEDKDWKAVSAGGSHTLALKADGGLWAWGLNDHGQLGDGTNTNRNAPIRVGSDKDWAAVSAGGLHTVALKANGSLWTWGLTLTSVYGDGSGQNAPVQLFRANDWKAASIGSTHIIAVKADGSLWAWGSNEHGQLGDGTNQRRALPVSPERRAAK

SEQ ID NO: 91455 - protein, 296 aa, Unknown
  Obtained from environmental sample
  DOMAIN (110)...(176): S1 RNA binding domain
  misc_feature (1)..(296): Xaa is any amino acid
RLIFRTIENTLLAAYKRKFGTMDNAIVRFSDDRVVSIHAKKKVVDGVYDPVTEIDIEEARELNPDAEIGDEIVIEVNPKEFDRVSVQSAKQTAHQSIREIQKDSLHSEYKDKIGEIIIGYYQRERNGTIYVDLGKMEGILPKKYQSPREIYHVNDRIKALITEVNKTPSGLQVVLSRTHTDFVRAIFELEVPEIYDKTVEIHKIVREPGYRTKLAVYSNREDVDPVGACVGLKGVRILSIIKELEGEKIDILKYDPDPRRFIKNALSPAEVREVIVLDEAKHQALAVVNDSQFSLA

SEQ ID NO: 91456 - protein, 235 aa, Unknown
  Obtained from environmental sample
  DOMAIN (1)...(235): Phosphoenolpyruvate carboxykinase
  misc_feature (1)..(235): Xaa is any amino acid
LHSIGKPLAAGEKDNGKWPCAPLDKKYIAHFPEERTIWSYGSGYGGNALLGKKCLALRIASTQARDEGWLAEHMLILKMVRESDKKAKYFAAAFPSACGKTNLAMLIPTIPGWHVEVIGDDIAWMRPGKDGKLYAINPEAGFFGVAPGTAEDTNPNAMKSITKNTIFTNVALTEDGDVWWEGIGHDAPGKLIDWKGNPWVQDKSNKAQEPAAHANARFTAPASQCPVIAPEWARA

SEQ ID NO: 91457 - protein, 155 aa, Unknown
  Obtained from environmental sample
  DOMAIN (12)...(155): Phosphoenolpyruvate carboxykinase
  misc_feature (1)..(155): Xaa is any amino acid
MSSSSSNAKLNAWVKEIAALTEPDSVYWCDGSKNEYDEMVKVLVDGGLATPLAKRPHSYLFRSDPSDVARVESRTYIASKSQDDAGPTNNWIDPVELKKVMKDLYKGCMKGRTMYVIPFSMGPIGSPIAKIGVELSDSPYVVINMHIMARVGSEV

SEQ ID NO: 91458 - protein, 90 aa, Unknown
  Obtained from environmental sample
  DOMAIN (3)...(81): Ribosome-binding factor A
  misc_feature (1)..(90): Xaa is any amino acid
ANVGFVSISRVDVTADLSHATVKVSAMGSRQEQMKSLNALQKSAGFMRSHLAKLIKIRKFPELHFVFDENLQHAARIDEILHELKEKGEL

SEQ ID NO: 91459 - protein, 292 aa, Unknown
  Obtained from environmental sample
  misc_feature (1)..(292): Xaa is any amino acid
IGIETIKYSIDGEVVEIIKNPLRKKISPIILLPYDILRKLPFATTWEEIEDAAYKNNQLRAKFNHYLGGLFKAKTKAEKERQLASLMKNQEGINTLFEIINKANIKPYDFKADAESIMFIRHVSEVINNNPLGLSAVNNDINDLKNIVKTIIEQFKFLIENKGMNSLLWKDKKTPNVEKTAQKIFHLVAYSYCKANNIDINPEMDTGVGNVDFKFSKGFSKKVIVEIKLSTNYNIINGFSTQLNLYKISEETLSGYYIIIDVGHMGKKLENLYEIYNADITKKSEIFYIDAL

SEQ ID NO: 91460 - protein, 88 aa, Unknown
  Obtained from environmental sample
  DOMAIN (4)...(87): Plasmid stabilisation system protein
  misc_feature (1)..(88): Xaa is any amino acid
MLDIARSSAFKKEIKKIKDVDVFAELKNVVTLLVNNLPLPEKYKLHPLFGNYKKYMECHLKPDVLLIFRVTKTELYLYRIGSHSKLFK

SEQ ID NO: 91461 - protein, 89 aa, Unknown
  Obtained from environmental sample
  misc_feature (1)..(89): Xaa is any amino acid
METTFDKFINNDPGEKELFDKEYNEFLLSEFVLEKMEAEHISVRTLAKRAGVSPTIIQKIRSKNAERINFRTFTNVLHTLGYKINLEKI

SEQ ID NO: 91462 - protein, 321 aa, Unknown
  Obtained from environmental sample
  DOMAIN (6)...(319): MreB/Mbl protein
  misc_feature (1)..(321): Xaa is any amino acid
MFGSFSTDLGIDLGTCNTLIYIKGKGVVLNEPSVVAVERGTKKIVAVGADAKRMLWKTPENIIAIRPMRDGVIADIESTEKMIRYFIYRVFPRYRFLKPSMVVGIPSCITEVERRAVEESAYKSGAREVNVIEESLAAAIGADIPINEPAGHMVCDIGGGTTEISVISLGGMVVTNAIRLGGDEFDEAIIKYVKTVNNLIIGQQMAEHLKIQIGNAVPDKNIEEVEVKGTNAANGLPQRFKIGSDQIREALRDPISQIIDNIKSTLGQTPPELAADIVERGIVMTGGGSLLKGLDKLIATETGVPVFIAEHPLTALLGGGQ

SEQ ID NO: 91463 - protein, 364 aa, Unknown
  Obtained from environmental sample
  misc_feature (1)..(364): Xaa is any amino acid
MPVKTTVKKTVKKKRTATAVKTAAKPPAKKPAERELVSFDFAVKYLLRGKRDFVVLNGFLSELLGKKVEVKSIEDVENIKDDKDDKTNRVDLKALINGGEVVVFEIQFLQEWDFFGKALFGVCSAIKDQVEAGDVYNIKKVYSVNIAYFNLKAKKEYLFSGKLNGFQGVHYKDEVIPFAQSRSQKSKKQFEIHPEYYLILPRMFDEKLRGRFDEWVYILKNSKARADFKAAGIKEAKTKLDYLRMTPEKKKEYARFLEHRRSARSALETAVGQGELRGERRGIRKGYSKAYKKVYSKAYKKVYSKAYKKVYSKVYRKAYRKADRKVGKASTKHAKSLYKTGLTVKKIAKALKLSETAVKQILGL

SEQ ID NO: 91464 - protein, 483 aa, Unknown
  Obtained from environmental sample
  DOMAIN (388)...(483): ABC transporter
  misc_feature (1)..(483): Xaa is any amino acid
MADFEDFDYNKPMSLGVWKKMLPFISPQKKDLIHVALLMCAVAMVDVLYPLLLGYAIKNNIEPRTTEGIGLLLAAGIFLITAQGVIVRFFVALGLKAETGISRSIRNAVFYHLQKLSLSYYNKTPVGYMMARTNSDTGRIGDLVAWGLIDFSWSAFYCFGVIISMFLVHWRLALIVCATIPPLSLITWFFQKRILATNRVMRKLNSKMTGAMNEGITGSKTVKVLVAEERSLKEYSAITGEYRHHATHMAHLRSTFIPLVLFVGSAATATVLGYGGYEIAFMGADLAILAIFLQYAGGFFDPIQNIANIFTEFVSTQANIERVSGLLEQTPGIVDRPDVIEKYGDNFSGKKENWEPITGDIEFKDVTFMYPDGTENVLERFSLHVPAGTYIAIVGETGAGKSTLVNLVCRFFEPNSGEILVDGRDYRERSQLWLHSALGYVLQSPHLFTGTIRDNIRYGRLEASDEEVEAAARIVHADRVINK

SEQ ID NO: 91465 - protein, 394 aa, Unknown
  Obtained from environmental sample
  misc_feature (1)..(394): Xaa is any amino acid
MSTIFDYLTWRGDIDFSRSPFNLVDNIVLCQIAYLPFDGIVPGPDERTDISVKDAVHILYQKMQDKDERAKLPYINKEDSALISALRNASRFGNCRLRGYVNTIDTGKEIQFSALCINTGDGSHFIAYRGTDVTFVGWKEDFNMSFSKVVPAQLAAADYLVKMAKKIKRPFLKGPLLKRPLLKIPLLKGPLRIGGHSKGGNLAVYAASQCGKKIQRRITAVYSNDAPGFHESVIASEGFAAIRERIHTFIPQSSVVGMLFEHGTAYKVVKSSVNGLLQHELYTWEVAPNDMVYVDDITQGSRFVNKTLKDWIATLDNTRREQFIEALYNILRASRAKTVPEFERSWLQSTARMLQSLGDIGEPTRNIIKTALAALFHSARNNLVLLQKKNERTA

SEQ ID NO: 91466 - protein, 50 aa, Unknown
  Obtained from environmental sample
  misc_feature (1)..(50): Xaa is any amino acid
MNFDIEFDREEDGRWIAEIPEIPGVLAYGVTPLQAGAKAKALALRVLAER

SEQ ID NO: 91467 - protein, 238 aa, Unknown
  Obtained from environmental sample
  misc_feature (1)..(238): Xaa is any amino acid
LDERINGVLAKLNGGMIRGINTAILFDNDNGCVGAATCRPPSPTSKKYINGVSGIKILAGDKIAGDPVIDGLTDATTEINVSGIKFLADGGSFFQSNGFLLERLGRWAGGLLGGGFCLDLYGGIGFFSLMLADDFDEIALVENVAEQVRAAERNFAVNKKDHIRAVLADVERGGGLQKAAGGRRPDCVVVDPPRPGLVKAMRKWLIETAPRSILYVSCNPSTFARDAGALLGGGYKLT

SEQ ID NO: 91468 - protein, 266 aa, Unknown
  Obtained from environmental sample
  misc_feature (1)..(266): Xaa is any amino acid
MEEVSAVKTKNTNTASGAKEPFIINIKEADLSVCENADSFLQSSMWGEFKSRFDSTAKAFLIDWQKGETAETLPLLALCRRFAFAFGLGFSFAYIPWGSLPDFFSAEDRVKALAELAAKLKPFLSKDTAFIRFEPPWHYKDGDENYKNESVMLTSAGFKKAAATVQPPDTVIVNLNISSEEILASMKSKWRYNVSLAEKKGVKVRTCGVQDIEVFYNLLKETAARDGIAVHGINYYRTLFEVCEKQNKRNQFIRLYTAEHEGDIIA

SEQ ID NO: 91469 - protein, 203 aa, Unknown
  Obtained from environmental sample
  misc_feature (1)..(203): Xaa is any amino acid
MTVREAAAAGKRTLKSPCLNALITTPDLDASLLLAEALHLHREELITQGEKTLTEDEHKKFLELLERRMGGECVAYILGKKEFRGLEFFVNESVLVPRPDTELLVEAVLQKRELWKKAGTEEEKIRALDLCTGSGAIAISLKHEMPDFEVWAADISTEALETAKTNAQRHQMEKSIRFYQGYLFKSLPVSLRFHVIVSNPPYI

SEQ ID NO: 91470 - protein, 145 aa, Unknown
  Obtained from environmental sample
  DOMAIN (7)...(121): Response regulator receiver domain
  misc_feature (1)..(145): Xaa is any amino acid
MNSNSTIKILCIEDNATNYRLVQRLLSQAGFEMFWAEEGMSGFDLALQVAPDLILMDINLPGLSGFELTSKFRSRPEFADTPIIALTAKTQKSDRETALVAGCNGFIPKPIDPFAFVGQIKNYLGGRQERLDKGAEGRALRQYNV

SEQ ID NO: 91471 - protein, 294 aa, Unknown
  Obtained from environmental sample
  DOMAIN (164)...(275): Glycosyl hydrolases family 2, immunoglobulin-like beta-sandwich domain
  misc_feature (1)..(294): Xaa is any amino acid
MKDNSSVLFNDSWKFLLGDVKNAYSVNFNDRKWKKVDLPHDWVISQPFSRGEEGGWTAQNMQGFFTWEGICWYRKEFTLKDISGKAVYLYFGGAYRNSTVYINGKEAGGRASGYSSFQVDITGFIKEGKNIAAVRLDNGCEPPDRWYSGSGLFRNVFLKIVPVTHIKTWGVHIEAELSANKKNADITVTTTVISRDKKGGVVVCIRLLAPDGKCAAEHSSILVFDGYEEVWTKETLHIKAPALWFAEEPNLYRAVVCLEKDGIAVETTETVFGVRDVKIAYNRGMTVNGEKVKL

SEQ ID NO: 91472 - protein, 478 aa, Unknown
  Obtained from environmental sample
  DOMAIN (63)...(96): Tetratricopeptide repeat
  misc_feature (1)..(478): Xaa is any amino acid
MRRLRILICLIYVLSFFPVAAVAQAQGTATAYFERGKNQMADENWYSAVESFLECLRLNPAHAEGTASLAECYYELAEFDEALNWVRKAKQLARTNMSVANLEVFTLIALGQLDTASSLVNEILAKEPYNRETLFAAGELDIARNRPSEAMLRYRDAVRRYPDDRRLLISLALVTLSLGDGDTAASYINNALIQHPDDYRVFYYASYIYSQNHKITEAIGFAERSLYYKPDHAPSRSLMATLRYRNGEYEEAARLCDTLIAANRQDMGAWYLKGLSLLRLNRNQNAITILSNAISVNEEDEFIRAVLEETLFSSTALEDPRRARYAVWHFNKARNYRQRNLIEQALFEYRRGLRMNPFATDRREYAELLRLSGYPARYLEELLFLQDHGISDRSIKDEVEAYGALLSNALFKQWQVYPVDLAERHWKIAVFSLAGQSSFIHADAGSVAAGVIRELLVHDRNITPMNMDLRQAAFSQAS

SEQ ID NO: 91473 - protein, 109 aa, Unknown
  Obtained from environmental sample
  misc_feature (1)..(109): Xaa is any amino acid
MADTLRILSGNANIPLAKAICNHAGVKLGECEIVKFSNENLKVKICESVRGQDVFIVQPSCPPVNEGIMELLIMIDAAKHASAGRITAVVPYFPYVRSDKKDEPRISIT

SEQ ID NO: 91474 - protein, 516 aa, Unknown
  Obtained from environmental sample
  DOMAIN (215)...(515): Bacterial DNA polymerase III alpha subunit
  misc_feature (1)..(516): Xaa is any amino acid
TKEFGMPAVAITDHGGIFGAVAFFEECKYAGIKPILGFEAYVTKDRKDRTSSTDERHYCHLILLAKNNEGWKNLMRLSSIGYLDGFYYKPRIDTEVLRKYSEGIIATSACVAGAIPQAILSGDMKKARELTEEYISIFGKDNFYFELQDHGIDEEKTAMKGLIALGREMGVPFIVANDAHYLNREDAPSHEVLLCIGTKDTLDNPKHYKFSSDQIYFKSPQEMAKLFPDIPEAMTNTLEIAERCNVDILIDPQLPSVNVPDGYSDPGSYLSYLAKKGLRERYAEVTPELEKKLEWELEVIINMKFAGYFLIVLDFVKKARELDVMVGCRGSAAGSLVVYALGITDVDPIKYDLIFERFLNNERISMPDADIDFADRGRYKIVDYVVEKYGREAVCQIINFGTLMAKSAVKDVARVMGLPIGEQNRLSSMVGNELARLSQGKSKKAETLKEAMGIPLKEKKKIDGKEKEVDTPPLSEIIAGNMLERYATANNEIVNTIMSGSQYKELFHHAAVLEGL

SEQ ID NO: 91475 - protein, 206 aa, Unknown
  Obtained from environmental sample
  misc_feature (1)..(206): Xaa is any amino acid
MKIKFKLSIIVIAIMAVVVSGIATLLLWQASKSTLQLSLRAQEHLVNSRAEFWKGKEDGYVRALSTLGNILADFQTVNPENRRDKYDELLRSALEAEPEMVVLYTVWKPNALDGMDEQYIDRIGSTPTGQYATAWSKETGKITKRPSADVDGVMEHINGSNALKDRITEPEIRNINGKDKWVMRITVPIIDSQKNDVVVGSVGCLL

SEQ ID NO: 91476 - protein, 299 aa, Unknown
  Obtained from environmental sample
  DOMAIN (27)...(298): Borrelia P83/100 protein
  misc_feature (1)..(299): Xaa is any amino acid
MKYVSKALFLLILFTGMAGIGYAQVDRGELQKNLAPITFYNNEGPQARVETREQIRQIGAVLGQQIRARQARAGAANRYFVIHSVTAPDGDKLDADIYGLGSNAGVDHIRNLRTIIQGYLQEAYGYTTNDAALLAEYITIYNAVYRGTWTYFSGRFKKPVTDNLNRDSAGLSVRYQEWPGKTLMLIPLNAGGLSSINTSAISDSRVVEKMRAEADKGVPQRQGMVDLKEREAAQARQEAADKKEAARIEEGAIARDKQSLDEEQRQNARDRQQLEQDKASGTITNEEAARRETALSQRE

SEQ ID NO: 91477 - protein, 139 aa, Unknown
  Obtained from environmental sample
  DOMAIN (8)...(131): FabA-like domain
  misc_feature (1)..(139): Xaa is any amino acid
MNEIEKLLPHREPFLFVDEIVQADEKKIIAKHVFTEKEFFFKGHFPQYPVVPGVILVETMAQSGGAGLRKCGALGADSLFFFASVDKVKFRRQVRPGDEVRCEIKNLRVSQKMIKQSGIAYVGDEVAAEAEWMCLVGNA

SEQ ID NO: 91478 - protein, 96 aa, Unknown
  Obtained from environmental sample
  DOMAIN (3)...(92): Bacterial DNA-binding protein
  misc_feature (1)..(96): Xaa is any amino acid
MNTTKHDLVAAVARETGLTQSEIKIVVEEFLEAIAEELERGRAIEFRGFGTFLVKERQARPARNPRTGEVVPLERRMVAVFRYSGDLRERIESGGL

SEQ ID NO: 91479 - protein, 70 aa, Unknown
  Obtained from environmental sample
  misc_feature (1)..(70): Xaa is any amino acid
MMMCVQDLGLSSCWITYFDPKIVRKEFNIPDNIVPFNILAIGYGADAPQSPDRHGETRKPLDSIVKYSSF

SEQ ID NO: 91480 - protein, 471 aa, Unknown
  Obtained from environmental sample
  misc_feature (1)..(471): Xaa is any amino acid
MTITGNYRFSDDLELRSTGFWGMDGVGFSYDYESKESGGISSVSRTVLDWTNYQGFITAALNWNPRNDMLAKIIIGVGYEDSEVDAEAKNSIRKNKFSDDFLDKYSTPELRPFLEQGPSPYNTDSFVRQSDLMVNAQARADYDWELGKGFLAAAGIQEMFTMYSMKGSQQGAYERRLSNLGESDRNKVLAALPPELKDYLIATDNQLLKDLRIAFPSPPYSSDAKNYLLTTSGYSLVEYSTPDKRFNAELGLRIDHYYLFSGNFSLSAKPALNPRLNADFNVFKNKWIIESFDISAGTGLFSTVDNSIFMAEEKHNMAGLKPNRSWTSVFGTRITFPEGIILNIEGYYKYIFNRLYVPIRFGLEEFDIRTQSDGEGRVWGIDLMLQKLQSRYWDGWLTYSFSWARYRDPSSNNANMGISGGTRGNDWYYPNFHRFHNLNLVVNYRPGQKFNFYTRFGLASGSQLSRRLTDR

SEQ ID NO: 91481 - protein, 679 aa, Unknown
  Obtained from environmental sample
  misc_feature (1)..(679): Xaa is any amino acid
GTPAKASAVGWTPAAEKTAAAIGSSKTAEESASYTDKVNVEELFRLAKLVAPAEEDGSLSSDFEDEYAELSQEDKRRIGNELLSHALKQIAAILNLPDEDGASAKFEFDPANIEQLAAIMSYLDLTIKVANDRIDVSANAESANIAMAAYGMESPIAHIEPEENAAELSEFAAALRTEKFRMDMAFRLIGVSGMIAEKMAEQSDSGTATGIPQAVNPADLSMSVADTVSAFSNLIKEELAASSDRVRQIVRGQVEMTDIERAAVELGTVKSEILKAALSKAKVGDSTFVKNDLNINVNVDDKKTDMDSANANVNTNGKTGINTANVKADVNTSVNTTVNTANVKTDVNPDINATVNTANVKSDVNPAVNTTVNTNNVKADVNPDVNPTVNTSVNTANVKTDVNPDANTTVNTNNVKADVNTDVNLTVNTTVNTANVKSDVNPTVNTTINTTNVKADVNHDVNTTVNTANVKTDVNPAVNTTVNTNNAEADVNTDVNPTVNTTVNTANVKADVNPTVNTTVNTANVKTEVNPAVNTTVNPANVKADVNPTVNTTVNTTVNTDVNTEVKTDVKTDVNTANVKADVDTAADKRVNADVQTETKTDVNTAKVKADVNTGVNATNTTVNTDSKADVNNDVNTAVNTANVKHDVNTTVNTEVKAEANTANANIKADVNPAKLIQA

SEQ ID NO: 91482 - protein, 291 aa, Unknown
  Obtained from environmental sample
  misc_feature (1)..(291): Xaa is any amino acid
MTKHYKLQAGRLVLSDASDAQVIALVSPDPEEISALIKNYQIDEHTLSSVSDSDELARLEYEDEHIAIIYKRPKNYSAAEHFQFRVASSGIFMFENLLIVVSDIELPLGDEKKFSKLTSLKMIALKLLSFSTLHFYEHLRIINRMSNELEEKHIYKLKKEEYLIVFGLSKSLVYYMNAISSNEALLKRMQISRNLNFDENEQEILDDIIIENSQCKRLTEIYSSVLENMMSSHEMSHESSTSSDVGSLKILNMLSVVIMIPTSITSIFSMNLKYPFDAEDYRAFWLVLFTM

SEQ ID NO: 91483 - protein, 370 aa, Unknown
  Obtained from environmental sample
  DOMAIN (54)...(370): CorA-like Mg2+ transporter protein
  misc_feature (1)..(370): Xaa is any amino acid
MSFTKNIELPPGSLVYIGDRPALEMDLSITTYDSASAELSHLSTIDELSKYQNDSKISWIIISGLKNVDSIKALGKLYNIHPLTIEDILNTEQQSKVEIFENYRFLSVKTIQREKRFHHNQNKKTKPFLFFKKEEEKIDEFLIDQISIIIMKDTLITIQEIPGDPFDKIRKRILNGIGEIRKSGTDYLIYEIIDAIIAEYFLVLNHLEEDIENFEDRATKTSDDMFIEELQDTKKYLLQIKKAISPLRENVSIILRQNQFLLKNKYKPFIQNLLENLHNAEITVEHYREWLSNIMDVNLSVLSHQTNKVMKVLTILSTIFIPLTFIVGIYGMNFDFMPELRQPWGYPLVLSCMCFIAVSMIVIFKTRRWF

SEQ ID NO: 91484 - protein, 404 aa, Unknown
  Obtained from environmental sample
  DOMAIN (174)...(286): Pyruvate kinase, alpha/beta domain
  misc_feature (1)..(404): Xaa is any amino acid
FFKLSTRDNRYKKILESHSSQIKIIAKIESGEGLENIKEIARLADGVMVARGDLGVQLPPEEIPLAQKHIINECRWAGKPVITATQMLDSMIHNPRPTRAELTDVANAILDGTDAIMLSGETAQGSYPVEAVKTMDKIASTIEQSEEFRKRMRKLHDECHSEVHNPKENLGVIMSRAGVETARSVNAKAIVTPTRSGNTARILSIFKPDEPILAVTTDERSERIVQLYWGVIPCIRTKVADSDSMILDTMKVVSETGVAGLSDKIVLIAGLPLESPNMINTVRVVIIGTVLARSSAGGYANPDNIRAHGKIVHAATADEASKKLMSSGGGILICKEITEEYMPVLRMAQGVICEGVSVIGEEKLRVINPNLVWLTRIREAAKKLEAGLTVTIDGKELLVYEGTI

SEQ ID NO: 91485 - protein, 1156 aa, Unknown
  Obtained from environmental sample
  DOMAIN (190)...(352): Alpha-2-macroglobulin family N-terminal region
  misc_feature (1)..(1156): Xaa is any amino acid
IANMTSGEGIEGAAYRYRLEASVQDAARQEISARALTLVHPASFYIAARLDSGTIKTPIVGTTETPSTYFLSAGQPATLSWALVSPDGDGAQNQGGDLSIQLVRHEWKQARQQGTGGRINLVWERVEEIAAQRNIKITTGNNSGVFNFTPDKSGLWEFRLSSRDQKQRIAATSSRFYVSGAGWVRWDSDDVDTIALNTDRKSYAPGETAKIMIRSPLEKGKYLLTLEREGIISQKIIELNGSALTIDIPIEESYVPVIYAALSSYTVRSAAPHNTYYEPDLDKPKGIFGVTPIYIDNESRHYQIEIVNGKNAYSPAEEAEVKIKVLLNGKPAPNTEVSFLAVDRGVVDLINYHVPDPLASFYNPWHFPLGVRGADSRSLLIDPVTYNISDLQGGDSDDDGKGGDAAGGFNDDMKERKDWRPTAVFEPYLVTGPDGTVTVKFKLPDSLTSYRCTALAVGVSNFGIKEQDLRVSAPLTAIAAMPRKLRWRDTGTVSLILTNLENAAVEAGVTLASSAEADAVIEVDGADSKTVKVLPGASQEVTFKVAAIGTGLAQLTFTLRSPEVNERIIKTLLVDRPSLTETVTTIGNLGPEKLFFEEGMILPSLVPEGTGNVSVSLSASRLATLKEAVRYLLDYPYGCIEQRTARLLPIAAFGEYLDTFNLDSPLAAFGGRPDIIDPAGSTRGLSAWDPKKLVEKELAELARFQLADGSFPYWPGGSTGNLFVSTRMAHIAALAKAKKINVPDSLDTRKLLSYIGTASSEAKLKDPFLKGYSLWVRTMYKERIGSEITAFLRRGDELGISGWAFAGLAALEIDQKDTAASARDRVRRFIRPGTRSLDLTDTYERQGNYWGYDSDRYALALMLFNSLDSQSAREGDDMTTRLATSLIERQRRGVWNNTASSFWAALAFGMLGDTESSEWKSANGTPFTATPLNVTTSLGGAALFNAEFKTYGGVPVSYNGHFTEKPLIDLQRDTLLPLRIERTGPGRLYYTASLRYGIPVELSGARDEGLGVFVETFDSEGKPVKNGRLQAGKTYTRRVTVSSSRDRAHVALRSPIPSGAEIVDAVFVTSSTVPPSAKNEEGDEDDWRYYKPAPVRFLMDDEARFHWDFFNAGREQIEFRFRAVMPGIYPTPPAVAECMYEEEIFGRSAGELIRIE

SEQ ID NO: 91486 - protein, 634 aa, Unknown
  Obtained from environmental sample
  DOMAIN (239)...(468): Methyl-accepting chemotaxis protein (MCP) signaling domain
  misc_feature (1)..(634): Xaa is any amino acid
MIQPTLENVIRTREEISATSIYSSNGFILASYVKERVGKKLTEVDTIYGRHINAANQAVRDGEEYSCTSFSSVLNSEVEIVIMPVTMGNSGKTWSVMIASTRSYILKEVNELTRFTAIIAVITVVIAVLIIYLILGSTTKPIVMVADTLKDISEGEGDLTKTVNISSKDEIGDLAKYFNQTLKKIKDLVVLIKGQAGILKDIGNELSNNMTETAAAVNQITANIQSIKGRVINQSASVTQTNATMEQVIANINKLNGHIERMASNVGAVTKTLLNNADNVKTLLEASEVGKTGLAEVVTDIQEIARESEGLLEINSVMENIASQTNLLSMNAAIEAAHAGEAGKGFAVVADEIRKLAESSSEQSKTIGNVLKKIKESIDKITKSSTDVQARFGAIDSSVKTVSEHEQNIRNAMEEQEIGGRQILESIGRLRDITYSVKKGSDDMEGSGGTLVKETDEFIKISKETVNGMNEIMSGINQINVSINHVNEMSAENNRNFESLKHETDKFKHTSGDEKKKILVVDDEEIDLEMVGSVLQKDYDMFTAKSGKEALGLFYQGLVPDLILLDLIMPDMDGWDTYGRIKVIGGLHDIPIAFFTVSNDPKDIQHAHEIGAVDYIKKPYDKDDLLNRIKKILN

SEQ ID NO: 91487 - protein, 331 aa, Unknown
  Obtained from environmental sample
  DOMAIN (20)...(129): NlpC/P60 family
  misc_feature (1)..(331): Xaa is any amino acid
MRTYQDLREKVIETAKKYEGVPYRYGGLTTAGLDCSGFLNLVFKEALNVPLPRSASAIYSWVEKTTFDRTQPGDFLFFATDKSGKVTHVGLYLGDKRFIHAASSGPKTGVIYSSIDEKYWADAYVGAGRAFPEAASTFKMKNNSITGNSDAKDTKANKTASSKKENRNGRLLAGAAFAPIFNGFLAEGDFFRGFTSQLNLCFDAYPLRMVLGLELRQEYDKSLGVFRLPLTLSFGPNEKIRVFAGPVFSFGDASLSVNGKQRYYSAGSRWFGTAGITVSPFVLKTSAGNIAPYAEAAWQSYYSDNADENIAADFFAKTRFSTGIRWMIKVN

SEQ ID NO: 91488 - protein, 249 aa, Unknown
  Obtained from environmental sample
  DOMAIN (122)...(249): Stage II sporulation protein E (SpoIIE)
  misc_feature (1)..(249): Xaa is any amino acid
MEAILGNLSQEVHSIILVPLLQETELLGVLVLENKIGLDYLTEADFNMARSFANFAAIILNTSRVATQKHENLRMSTELNTGNLLQSALFLNSVPKVAGIDVSFFMSPAKEIGGDYYDFFEKGNKFALTIADVSGKGVSAGIIVAIMQTYLQNQYKRENDLKKLIVDLNKYLSTKITTGMFFATLLFFEWDIKQKKLNYVSCGHEHILHFHAKTGTIECIRSGGLALMMDADIDPYIKNAELDVEKEIL

SEQ ID NO: 91489 - protein, 401 aa, Unknown
  Obtained from environmental sample
  DOMAIN (3)...(278): CTP synthase N-terminus
  misc_feature (1)..(401): Xaa is any amino acid
METKYIFVTGGVVSGLGKGITAASLGRLLKQRGLKVAAQKLDPYMNIDPGTMSPFQHGEVFVTDDGAETDLDLGHYERFIDENLTKFSNLTSGKVYWKVLERERAGGYLGGTVQVIPHVTEVIKEFIYAGAKGTGAEVLITEIGGTTGDIESQPFLEAIRQISLENPRPNCLFIHVTLVPYLKGSGEHKSKPTQHSVKELRSMGISPDVIITRADEPLSRGIKDKIALFCNVKPDCVIENITLSTLYEAPLMLHRNGLDNVVCRGLSLDVPEPDLAEWQSMADRIGSRERTVNIAIVGKYIKLRDAYLSIIESLNHAGFETSANVHIHWIDSENLIGQNAAAALGGLGIDGMIIPGGFGDRGIEGKIAACRYARENDIPYLGICLGMQVAVIEYARNVCGL

SEQ ID NO: 91490 - protein, 471 aa, Unknown
  Obtained from environmental sample
  DOMAIN (82)...(470): CO dehydrogenase/acetyl-CoA synthase complex beta subunit
  misc_feature (1)..(471): Xaa is any amino acid
MLLYNKDRIFAFINAFGEVNAEWAANAAGCVNWGFPTLADTDIPPILPTGVCTYEHVVPNVEHHEIVQRSVEVRGLKTTVSKVDIPVAYGPAFEGERIRKGEYLVEMGGGSHTCTVEWVTSVPMEQVEDGKVELFGPGLESVKPGGSLPLAIKVEVAGRKFQEDFEPILERQVHHLLNYAQGMMHTGQRDIGMIRISNDAVAKGFKLEHIGTILHAKLHQDFGAIFDKLQVKLYTDAKEAEKIRDQARAVYTHRDARVENMTDETTDTYYSCTLCQSFAPNHVCVVSPERTGLCGAYNWMDCKASFEINPTGPNQPIEKGECTDQKLGIFKGANDFIEKASRQAVTNVCFYSLVNDPMTTCGCCECIAAVLPSCNGIMTVDRDYTGDTPCGMKFSTLAGTMGGGGQSPGFVGHAKYNIVQRKFIHGDGGLHRLVWMPKHLKETLREKLIARGKEIGIPDFVDRIADETVGV

SEQ ID NO: 91491 - protein, 296 aa, Unknown
  Obtained from environmental sample
  misc_feature (1)..(296): Xaa is any amino acid
STGNNTLTFYLLPLNSDFGAIHITFTFPKNSGITRVTTNTGETIGLEGEDFTINNGQMEFLYSKNNVSVGDHFIIFRFFRGEEQIRRVSELVLVRKNLTSSKKIELQGFTEDVPGNTLTEQLNWLSQEGNVVDGGEYTLTVKSEEFIGPGNWLGYGPDNEYSVTITLTGGGTVRLNDRGKMFQVWHPVTLILDDVTLIGIPDNWMPLILLDGTLIMNEKAVIKNNTNSEDNSEHIGGGGVSVSKGAQFTMNGGTIFGNISNSSGGGVSIWNGTFTMNGGKISRHNAGYSGGGVYVT

SEQ ID NO: 91492 - protein, 497 aa, Unknown
  Obtained from environmental sample
  misc_feature (1)..(497): Xaa is any amino acid
DSIGQGAVDIAANARLEQSENGMIFSVSMKRSADKNYDSAQRRSVSLNGSFDSKSRSVDANLLLDSFMAGDLIGLAAPFVKNVPLPDVLIELFGNTAITTKIALNTDFTQVSYNTPSLAFSGRTGDRGFSGSASINGTGSRFELGKGQIRRGEETLLLSAEADFAEMNNIGFSVNAGYQGLSCLIQGTVLDGKTVNILGSYGLKVNFTASGNRAYSGVMHTEGFPVPFLGKPALLYLDGRLRYVSSRAWTMDFDRLELTDIISPAGLAQFRASCRADQNGVNFPQLYYKDGFGPLSGNVNLIWPKAAHSAGSEPFSDISGTAYLVDNKESYQMEVSFRNHSLNFWLSGSSMRLGRFSQKANTLQADGEMRLLWNSADSFNAELNLSSLRGKMSEQDINVSAQAVMDNDELTVRRIVLGINSTNGEIPQIVINNKTGTAGSEGNINLLINGKRTAGLLSLKANFNPVNSWTEINEALDFFDGRAHVENFRFGEGADPQ

SEQ ID NO: 91493 - protein, 212 aa, Unknown
  Obtained from environmental sample
  DOMAIN (1)...(173): ABC transporter
  misc_feature (1)..(212): Xaa is any amino acid
MKIIAGLMEPDGGEVFFQGQPLYNKKYARNSTIKRLRGTLGLILQDADAQIVGETVMEDAGFGPENLGWAAPDVKAAAEKALSDMGLIDKSDNSPRQLSGGEKRRLAIAGVAAMGCNIIIMDEPFANLDWPGVVQTLNIIRNLKNSGKTLIILTHELEKALALADRLIILHKGKVRADSSPAEVLNSLDPCWGVRDPRKNYTSIEDCSWLEK

SEQ ID NO: 91494 - protein, 191 aa, Unknown
  Obtained from environmental sample
  DOMAIN (6)...(131): RNA pseudouridylate synthase
  misc_feature (1)..(191): Xaa is any amino acid
CRSGGKGVKTSLDTLLAALRDPSPLLVHRLDKDTSGALLAAKGRENAARFSSLINSRKITKQYIAVCAGRPKNEQGVITDKLLIHGNLKNSETRYKVIKTSVFTEENIEYSVLELELGTGRMHQIRRHLAMNGNPILGDDKYGDFNLNKKLHKIIGLKHLLLHASRLIIKDEPNADIHAPLPEYFSFFYSV

SEQ ID NO: 91495 - protein, 77 aa, Unknown
  Obtained from environmental sample
  misc_feature (1)..(77): Xaa is any amino acid
LPKGYTAIIGNTAFRRKKGLRKIARGKVRLLFLPPYSPGYNPIEKSWANMKRFLRDNSKDFQSVVSGIYGYFGFIES

SEQ ID NO: 91496 - protein, 124 aa, Unknown
  Obtained from environmental sample
  misc_feature (1)..(124): Xaa is any amino acid
MKTDVSKKKAAKPPIKKAKKPAAKKTAVKAKPVKTSKIPAKKTAKPAAKKTVKPAAKKTVSKNTSKTVKKQAEKPAIKIEKSAEIPEEKPIEKPETSQQQDMSLPEGSALQQTGHRRPLIVFPK

SEQ ID NO: 91497 - protein, 391 aa, Unknown
  Obtained from environmental sample
  DOMAIN (3)...(58): TRAM domain
  misc_feature (1)..(391): Xaa is any amino acid
MAVKDVYRLRLESIAPGGDALGRLEGKPVFVEGGAPEETVCCRIVQEHNTWAKAELLEIVEPSPMRVNAVCAYYTQCGGCNLQHIDYDAQLAAKAAILKDSFLRIGGLQPPQTVIVPSPPWEYRNRMQFHCFRQNAKGTDARQYGLMGRKSGEIIDIQDCPVAVTGIRELLREGHELKLPVEKDRFTVFSKDGVLLSEGGRRKGKITLLDKDILINAGLFFQSNCFMLEKLTAELRIIVEEANTNLPMADLYCGVGTFAYFLKDMFPRITLAEENKAAVSIARENLRETDAEFFAVRDTDWPRTLLRRKDVFGFAVVDPPRAGLAPKLATVLAQDGPPVLAYVSCEAASLARDCKILTNGGYALEKLSFFDFYPQTAHIESLAVFRRNRNT

SEQ ID NO: 91498 - protein, 848 aa, Unknown
  Obtained from environmental sample
  DOMAIN (687)...(762): Hpt domain
  misc_feature (1)..(848): Xaa is any amino acid
SYREELLDGFYNRVNKSIPEILSNGQRSLSLDEQLRKTAEEGEAKIETELHFEDGIRKLNVELRKIPYKGSFAIAAYVYDFTEIIKREMQLANTREIKELVELTKLKLVVQASKIGLWDMEIVHDDPVNPNNTFIWSDEFRNMLGYTDENDFPNLLSSWSDLLHPDDKEATLAIFEKHILDNTGQTPYDIEYRLKRKTGEYAYYRACGESIRYQDGNAVHVAGTLVDITETKKMLLEKERQTEEAQAANRAKSTFLANMSHELRTPLNVVIGLTGLIMEDKNLEKHITDNLVKISNAGSTLLSIVNDILDLSKIESGKLELTPDEYYTASMLNDTVTLILARIGEKDIKFHLNIDDNLPYKLYGDDLRVKQIFTNLLTNAVKYTNEGSVELNVSCEHEGDSVWVNAAIKDTGMGMSADDMKNLFLDYHRIDSKSNHHVEGTGLGLSITKKFVEMMGGEIKVESELGKGSTFSFRIKQGFVTNEVLGADVSNKLRNFCFSDDKRIVSQKLVKIDLSYAKVLVVDDITTNLDVAAGILSSYKLHVDCLTNGPAAIERIRSGTPVYNAIFMDHMMPGMDGIETVDKIRALGTEYAKKIPIIALTANAIKGTEKIFFEHDFQAFISKPIDVTEMDAALKKWVRDNTRAEVVIEDKPSETELQSENLIIEIPGVDTNKGLSLYAGEKKLYLPMLHSYAHNTPKVLEKLRSVSAENLHDYVITVHGLKGTSAAIGAEHIRIAALELENLSRGGDLQGVLAKNDKLIADAEIIVKNVQEWLDQNDAKKPRQKAPDRELLARLRQCCERFDMSGIDKVMVELDKFDYDEDAELIAWIREQLIISEIYEVAQRLAQY

SEQ ID NO: 91499 - protein, 466 aa, Unknown
  Obtained from environmental sample
  misc_feature (1)..(466): Xaa is any amino acid
MGRELWRRNIESPICAKIIPGWDGRLFIPVEQKILCYTASGNPLWTVNYEAPILLAPRLDHGGGIIFALENNQVCRINPFGDIRIWALTDKPAALVPLGQQQQVLVLYKDGSMSILGQSDDWFFSAQGEVHPSLLPKLPGIPKAAASRGNNIAVILEDGTAILFTLEPPSGKPAGTLTNENGIIWKGDSHIKEFIRRREKPEPEAEIIYDDRGVYILSKNGATGFSHEGKRIWYTLLQNAAAIPAFGNDGVLYSGGKDWILYAYKIEDRVLPEKNDLYGPVPEGTYGLGRPQVFDTLDIPLFENEKKAKLAEITEAINSGNVGENEPAWTTFLLTTSAGQEDILLRLGALKLLGKIGSLETIPWLVNIFLNENEPTIRTAAVLTIGDIGVDPEGLAIETFLHSLTYDGSLKDETILIALAQATGALCRFSGPPLSGTGVRILTLLNTPKYPQIIRRQANNELASLR

SEQ ID NO: 91500 - protein, 544 aa, Unknown
  Obtained from environmental sample
  DOMAIN (231)...(509): Methyl-accepting chemotaxis protein (MCP) signaling domain
  misc_feature (1)..(544): Xaa is any amino acid
IINTRNNEVVGIVGGLCIIDGIQPTIDNTIKTRKEISAAAIYSSNGFIMASYVPDRVGKKLLEADTIYGDYIKDANQAVLDGKEFDCSSYSSILKTQVEIQIAPIPIGNTGETWSVMIASEDSFILKEVNELTKFTFIIALISIAISAVIVYFTLSRTIKPIVSVADTLRDISEGEGDLTRSIAVSSKDEVGDLALYFNKTLEKIKNLVLSIKREAIGLQEIGTGLSSNMTETAAAINQITANIQSIKGRIINQSASVTETNATMDQVMANINKLNGLVENQAETISKRSTFIQAMVDNINSVNQTLLKNLENVQTLKEASEIGRSGLQEVAADIQEIARESEGLLEINAVMENIASQTNLLSMNAAIEAAHAGESGKGFAVVADEIRKLAENSGEQSKTIGTVLKKIAGSINKIKGATDNVLTRFESIDSGVKTVAEQEEIIRHAMEEQGEGSRQLLQGTSNLNGITQQVKAGSEEMLEGSKEVMKESRNLEKTTEEISGGMNEMATGADQVNIAVHNVNELSTRNRDGIETLMREVSRFKVK

SEQ ID NO: 91501 - protein, 120 aa, Unknown
  Obtained from environmental sample
  misc_feature (1)..(120): Xaa is any amino acid
RFGAIDSGVKTVAEQEEIIRHAMEEQAEGSHELLQGTTNLNGITQQVKAGSEEMLEGSQEVIKESRHLEKVTQEISGGMSEMATGADQVNIAVHNVNEISTRNREGIEILMREVSRFKVG

SEQ ID NO: 91502 - protein, 590 aa, Unknown
  Obtained from environmental sample
  misc_feature (1)..(590): Xaa is any amino acid
MKFDSITRHSPLFVFAVYVIGASLLILIFRNIFPGEISPLPIFAKNWKLVRALIEIITLFPALACSGLVVPFGMPSEDDFLEEEETPQNLFRRFETPIVTAIIASVVYALLFFLVLPIAQNNEKNMRFQGELYRLAKHRAETHRKAHEWVQASQFIGICDSIWRNSPELDDLRIDIKINLDKIDAPDRQQAEKPKSASISALPGYKEPADAGEAIFMGEAAFNKGQFLDAHWLAVLAGRIARPGSPEVVKAAALAAKAWNQIEVLQTSAGEERAYELYKLKKSGYEAFVAGDYIRAFYIFKEHAAKSPNDPDTKRLLEASEKGTKEIAFFMDEIEVTLGDTQINTILSLPVVENGLPGRSVIRIAHLSMTPDVAYGTNIEYMAFDPQSRPLISLSAPNAKILPITIEGRPQVHILMRALDRNSSKEHTEPNWYIRSANLNHPDDAQLILDLSYETFLEVVKLRQGLRSLGINELFIAARMANKAGYIPQVYEAEIINRFGGCLFFLPMAVVAIAMGWYFRARRRPRYFFVPLLPVFPVVFYGIVFLYRKAISVLGASLVFAVGYSNAVVTLIIFLALSFFVSLIVLVKQH

SEQ ID NO: 91503 - protein, 326 aa, Unknown
  Obtained from environmental sample
  DOMAIN (5)...(246): Beta-eliminating lyase
  misc_feature (1)..(326): Xaa is any amino acid
NAGYPHVREALAKKVCKEQNVNIDGSHIVMSVGAAGGLNTVFKTICNPGDEIIVTQPYFMEYRAYTANHGAKLVEVDALADFNLDIAAIGAALNEKTAAVLVNSPNNPTGKIYSAKSLASLASLLTEHGKKTGRYPYLVSDEPYREIAYNVDVPPFLSCYSESIVVTSYSKSLSLPGERIGFIAVNPDASGKDDLLNGLIYATRILGFVNAPALMQRITASLTEARVDVSIYARRRDAFMKVLNNAGIEYSMPQGAFYLFCKVPKSKTNRQEADDKAFTEHLKKHLILGVQGSGFGISGWLRFAYCVDEKIISASQDAFIKAMETW

SEQ ID NO: 91504 - protein, 188 aa, Unknown
  Obtained from environmental sample
  misc_feature (1)..(188): Xaa is any amino acid
MNMSKGSNNVSFLPKRDSWLEDSTMLFPAIFMPSSNPADAGLMTAQVAFNKVRVGNLLGTSGWYGRDFLVNAKKQAEGSVFSIAFYSDGNEQKFFTEKFKSKWQRDPDENKVAGLSYDAIRIVNQALQSLAQSENPQSLPVEILQKREYKGVYGKIILADNGANKNTGLISVEQGKLVEKSPWCEVSH

SEQ ID NO: 91505 - protein, 74 aa, Unknown
  Obtained from environmental sample
  DOMAIN (17)...(39): MORN repeat
  misc_feature (1)..(74): Xaa is any amino acid
MTETVKGKLTYRDGSVYEGDMVNGKPHGKGILTYIYGGVYEGDWADGEQNGKGKMTYPDGKVDQGRFANSEFAG

SEQ ID NO: 91506 - protein, 571 aa, Unknown
  Obtained from environmental sample
  DOMAIN (379)...(571): Glycosyl hydrolase family 3 C terminal domain
  misc_feature (1)..(571): Xaa is any amino acid
CKGVSSKKYKQKPVQWNTLEELLSQMTLEEKVGQMTQAERGNLQKGDVEKYFIGSVLSGGGSTPWENTPQGWLKMINGFVEESLKTRLGIPVVYGIDAVHGHNNAQGATILPHNIALGAIAAGNQQRGAQAAYTAGKITAQEMIAAGVRWTFAPVLGIAQDVRWGRTYESFSENESIVTIMGAGFIKGLQENGAAACMKHYLGEGQTIDGRNQGNAILDRAGIEKILPPYRAAIKEGAMSLMPSFSSVNGIKMHQNKELLTDLLKGEMGYKGFVVSDWSAVKQLTGDSYRMQIANAINAGVDMCMATDGRSNWIDYINNLTKLVEDGVVPMSRIDDAVVRIIRFKQKLKLFETPMITQAGEIGTEENRAAARELVSDSLVLLRNEKNAIKKLSECKRILVTGQGANNIGMQCGGWTITRQGGHGKITNGTTILEGIKTAVKGKADVYFSEEGKADGRFDAVIAVIGEDPYAETEGDRTQINIRQRDMDMLREVYGYNCPVIIIMLSGRPMTIGDEYKKWDVFIAAWLPGSEGGGIADVLFGGKDFTGKTPYTWRKTINGEILFPFGYGLTK

SEQ ID NO: 91507 - protein, 290 aa, Unknown
  Obtained from environmental sample
  misc_feature (1)..(290): Xaa is any amino acid
VFGPALYGVGAYANFQSAPDWYKYSDIYRWFIDAYLDEMRKAGEEKGRRLLDVLDVHYYTEARSPLNHRVSEDRDTNEECVYTRFQSTRTLWDKSYREKSWVAQSLGRFLPVLPALKASIEQYYPGTKLSVTEYNFGGENHVSGGIAQADALGIFASEGVYYASFWPFSEKLDYIYAGINLYTNYDGKNGAFGKTLVESSTDNIEQSSVYASISEDGALHVILLNKNIHKPEKFLFTINSDAHYTNFVYYGFNAKSSVIKKYGSGALPGGAGGFSLQIMPMSAVHLVFTL

SEQ ID NO: 91508 - protein, 487 aa, Unknown
  Obtained from environmental sample
  misc_feature (1)..(487): Xaa is any amino acid
VETTGRLNTKLTLRDRFGGLSKSQSGNGVGRNALVVEFFLPGDYLAIAETVGESAGRMGISLSKGELRKGGTLQDGVDKRAAVKANSAVVYDFKANKKARYRFESFGAAGGQDIRLEDSDGWPLVRHGSEAPQELALDKGSYKLYSLPCQYENYRVTRVDAVKEPLKFTGAGPHNIAVNEPIAATWLESGTGAPARFLFEVSAPIDAKVSLTPDFKGTLKQQGNKDAKPINVSGGYGGMLQKGKYELTVTPLKPQNYSPYEVSVTTEDLVAGIGYDVNRDQTLRVQVGERGGYEIFSQGRSEVAARLYASDKKTEIARSGGDQLDWNFFISERLDSGSYYLELTGFESNPAKVFMRRAEDTVTTQIKLADAAVEKKSVPLSWKQVVIPIENQTGDILNVSVSSGSQLVCNLEAVNNPNPAKLLGANIGRRRGKRVNMSAVIVKGASYILRIWSEDRVEDAAAIEIWATEAMPLTFENARSGVPDKYR

SEQ ID NO: 91509 - protein, 281 aa, Unknown
  Obtained from environmental sample
  misc_feature (1)..(281): Xaa is any amino acid
FPDIDLSETELKLLIPAGNQVINFQKNPKNGIEVLNTGNKTDEDEDLPEDYSGLAQGKEYKIVTVQTLGKKTEPKKHYTFASLLQLMENPRGDDGKHLTGLGTPATRGAILQKLVDRKYVLLKGKNVLISDDGNFLIENILKNDGLAAFVSVPETTRWEEQLHDNTAAFIEGIKEFVRGAVKNTGMEAYNHEKKSLGKCPLCGGDVYESNRNNYYCSNYKAETPCKFVIWKNICQASVTHSDLQALLAGKQTKVKKCLSSKTGKEFYAKFELVAGSCRSCR

SEQ ID NO: 91510 - protein, 395 aa, Unknown
  Obtained from environmental sample
  DOMAIN (266)...(341): Hpt domain
  misc_feature (1)..(395): Xaa is any amino acid
MLFLDYYQVDSKVNRSIEGTGLGLPITKRLVDMMDGEINVESEYGKGTTFRLRFRQGFVDDAVLGPEVSDKLRNFCFTGDIRVINKKLLRLNLSYARVLVVDDMETNLDVATGILSNYKIQIDCVTNGPAAIERIRDGIPVYNAVFMDHMMPGMDGIETTERIRALGTEYAKKIPIIALTANAIHGTEEMFYEHGLQAFISKPIDLMDMDTVIRKWVRDDKHEDVPITDEPSVYDLQIENMAIEIPGVDTKKGLSLYAGDTKIYMSLLRSYAANTPGILDKLRSVSADNLPAYVITVHGLKGASAGIGAEGIREEALELEKKSRAGDLQGVLEKNNKLIANAQKVVANIVAWLEQNDVQEAKPRLKTPDRELLVKLREYCENYDIDGIEEVMSKL

SEQ ID NO: 91511 - protein, 317 aa, Unknown
  Obtained from environmental sample
  misc_feature (1)..(317): Xaa is any amino acid
MNIKTSRTKLNSEQKKAAYCTENAVVAAGAGSGKTMVLANRFAWLLTEKGYKVNEILTLTFTKKAAAQMFRRIYSLVSEIAESDTGIRAERARQALNDFVHARIQTLDSYSSSIVKQSALRYGISPDFKIDQDRCRKLALEVSYPYIITHRNNPVIKTLYSANSPDGIACNIFADTLFNYSRIDKTLDFTSDIKKQFDSLCIEWEKYCNELKTILEETASHLYENKTLLPSLVPIMEKYKKGEIKILKYSDIREYLDQALASPPEEVIEKTESSPIRKILVNFLYFLSYINDLNLKEGKRSDNPVKDNVKKIRELLT

SEQ ID NO: 91512 - protein, 223 aa, Unknown
  Obtained from environmental sample
  DOMAIN (1)...(222): Domain of unknown function (DUF323)
  misc_feature (1)..(223): Xaa is any amino acid
MSKYQVTQEQYQAVMGSNPSNFSSNPQAGETQGKRPVETVSWYDALVFCNKLSIKEGLTPAYSISGKTDPAAWGTVPTSSDATWDAVVIVAGSTGYRLPTEAQWEYACRAGTTTAYNTGDTISDDTGWYNENSEDKSHEIGLKSKNAWGLYDMHGNVWEWCWDRYGNYSSGSQTDPTGAVTGSNRVVRGGGWGEFGRDLRSACRFSRIPYYRNDIIGFRLARP

SEQ ID NO: 91513 - protein, 87 aa, Unknown
  Obtained from environmental sample
  DOMAIN (4)...(87): Plasmid stabilisation system protein
  misc_feature (1)..(87): Xaa is any amino acid
MLQLKYSKKAAQDIQKLKNAKLDKKAKALVDLISENPYKNPPPYEKLLGELSGKLSRKINAKHRLVYQVFDDKKTVKIISLWSHYEF

SEQ ID NO: 91514 - protein, 340 aa, Unknown
  Obtained from environmental sample
  DOMAIN (18)...(251): MutS domain V
  misc_feature (1)..(340): Xaa is any amino acid
AEVDTAQSLAKAASIRNWTRPVLNESSKLEIYEGRHPVVEEHISRGEYIPNDILLNTEKGISFAMITGPNMAGKSTYLRSAALITIMAQAGSFVPASQASIGICDRIYCRVGASDNLARGESTFLVEMNETAFILNTATEKSLVIMDEVGRGTGTNDGLSIAWAVSEELLNRIGCRTLFATHFHELSLLSHPNLANYSMEVLEQGEKIVFLRKLKNGPAAESYGLFAAMLAGLSRNVLDRAGQIMKLLKERDADLSDTFGENIVNRIKDKVNTDKQEGQNEQDKFDKLLQEIDPEKMTPLEALNTLCQWKKLQKSGISFIPEKKVKKRDDGKENDPSLFD

SEQ ID NO: 91515 - protein, 326 aa, Unknown
  Obtained from environmental sample
  misc_feature (1)..(326): Xaa is any amino acid
MKTLNRYGWPLLSAALLFAVVAVGTRWLSERGDKLVREPISETREMFIDNKNGETGDGCGAADILMESVDPAGAPFLTFTDSRDCRRYRAVKIGGDVWMAENLNYKTPRNSWCMENEESNCEKYGRLYDWETAKAACPVGWHLSTAEEWDSLLTTVGGKRMDDNEGRWMGASKKLRAKSGWIMDDDYKDVTGNGTDDYGFAALPGGERYGNGEFENPDSSDSRGHWWIADENNGSSAHRREILNYDLVFEGTGFKEAGHSARCVSDDSYIAKAGERGAFSLTVTAGSGGTAVAAPRKNTYAAGERVTLTAVPDDGYVFAGGRAPAS

SEQ ID NO: 91516 - protein, 470 aa, Unknown
  Obtained from environmental sample
  DOMAIN (5)...(35): Flagella basal body rod protein
  misc_feature (1)..(470): Xaa is any amino acid
MLRSLNSGVTGLMNHQVRMDVIGNNISNVNTVGYKGRRVTCEESFNQLVKGASRSESKAGGTNPMQVGLGVAVGSVDVMTGQGNLQNTGRIFDLAIEGNAFFGVSDGTGTYYTRNGAFQLDSEGYIILPTNGFVLQGRMADSFGNFPPGTAIGNLQIPLSQQAPAKETTEVTIARNLNSEADAKGSVTYSQRMLHPADEARIPETNTINDPGKESTTLNSLYNSKGQSLNIKENDSLTISWYDQASITAGTPAFSELIIKVSEQAGPMTALGQPTTVWTIDDFKEAIKYALNHDKNGKAVTYEDPSGSVHETNHDVLINDDGSFSVVYDPAMLSYSATNFDAPQIFNLQIKSSNPLSDSYVNKAFYFGSHIGPQIGNYPDNTDPNIVKTDTLLRPAEQFDYMYMLRDANGNRLYPGLDAGDPIDVFGSVGKTSIEDGKSDPVKFYPQGAWDVSVSPRQPVFITDAASIKE

SEQ ID NO: 91517 - protein, 265 aa, Unknown
  Obtained from environmental sample
  DOMAIN (92)...(263): DNA gyrase B
  misc_feature (1)..(265): Xaa is any amino acid
MVSVRRDGKRYRQHYVRGVPQDEVTVVGEIEPDNHGTSVRFKPDEDIFETTEFSFETLKKRFEELAYLNKGLEILCVDERLDEKHLFRADGGIPQFVKDLNSGEGGIHAVISAEGRFENVLVDFALQYNAGYKENVLAFANNIRTKEGGTHLVGFRTALTRAVNGYIKSQADLNKKFKGTVLSGDDVREGLTCVLSVKLPQPQFEGQTKTKLGNSEIAGIVAGIVYERLNTHFEENPKDARLIIDKAADAARARDAARRAKELVR

SEQ ID NO: 91518 - protein, 109 aa, Unknown
  Obtained from environmental sample
  misc_feature (1)..(109): Xaa is any amino acid
MGNGWTLGSLFDGIGGFPLAAVREGIVPVWASEIEPVPVSITKRHFPDMRHLGDIRNINGADIEPVDIISFGSPCQDLSISGKRAGLDGERSGLFIEALRVINEMRSAT

SEQ ID NO: 91519 - protein, 227 aa, Unknown
  Obtained from environmental sample
  DOMAIN (3)...(137): Polysaccharide deacetylase
  misc_feature (1)..(227): Xaa is any amino acid
MFPQGKMKALTLSYDDGVEQDRKLVEILNRYGIKATFNLNSGIQSGSSQWERNGITIRRMNVESLPALYRGHEIAVHSLTHPHLETLDDETVLNELEQDKINLERIFDTKIFGMAYPYGTFNDEVKKIVGRCGLLYARGVQSTFSFDIPKDLLAYQPTAIHTDTGLMELAETFIKLKPESPQVFYLWGHSYEFDTDNNWHIIEDFCKLMSNRDDIYYATNAQALLGV

SEQ ID NO: 91520 - protein, 611 aa, Unknown
  Obtained from environmental sample
  DOMAIN (478)...(610): RNA polymerase Rpb1, domain 3
  misc_feature (1)..(611): Xaa is any amino acid
MRDIQDFDSIMIQLASPDMIRAWSYGEVKKPETINYRTLRPEKDGLFCERIFGTTKEWECYCGKFKSIRYKGVICDRCGVEVTHFKVRRERMGHIELAAPVSHIWYYRSVPSRMGLLLDIPMTALRSVLYYEKYIVIEPGETDLRRMQLLTEEEYYEAQERHSGSFTAGMGAEAIRTLLENTDLDKLAAELRAKMIEKGPKSDKRLLKRIDIVENFRNSKNKPQWMILDVIPVIPPELRPMVQLDGGRFATSDLNDLYRRVINRNNRLKRLQVLNAPDIIIRNEKRMLQEAVDALFDNSKKKRVVKGASNRPLKSISDMLKGKQGRFRQNLLGKRVDYSGRSVITVGPDLKMWQCGLPTKMAFELFKPFIMKKLVDKDVVYNIKKAKMLLEAESVEIFAILDEVVKEHPVLLNRAPTLHRLGIQAFEPVLVEGKAIKLHPLVCHAFNADFDGDQMAVHVPLTQAAQMECWTLMLSARNLLNPANGRTIVFPSQDMVLGINFLTRVKPNGKRPESLNPESKNHIPYYSSPEEALMAVENKFLDWGSLIRLKPVKFPIWDKIDHEMEIPKDGIIETTVGRLVFNEEQPKEIPFINYEMKDKELRALMSMSQEK

SEQ ID NO: 91521 - protein, 291 aa, Unknown
  Obtained from environmental sample
  DOMAIN (30)...(259): alpha/beta hydrolase fold
  misc_feature (1)..(291): Xaa is any amino acid
MKLNFRNVPYGDDISQRFDIKCEGNDVHAVVYIHGGAYFTGNKDEYPLFLTDYSENYLFASVNYRVINTENTIHMGNIISDIDDALKEIREFSKAKGVNIKDFILVGHSAGGQIALLYGYKYFQKNEHIKIAACISLAGPTDFTDDTGWSSMTMWGNDEEERLSFLSWMGTRLTCHPITLKQRNWTKQADYNEFEKYIMDISPIAHVSKEGKIPPTLLVHARNDDQVPYSNAIRLKEILEKASVPHKLITPGGSGDSHMLGGIVYNENEPIKFFGQAWVKEAKEWMEAYLR

SEQ ID NO: 91522 - protein, 246 aa, Unknown
  Obtained from environmental sample
  misc_feature (1)..(246): Xaa is any amino acid
MNLSKSRYCKGIQCQKILWLEEHKREVRDESLLNKNKKVFETGNKVGDLAMGYYGPFTEVPDNNDKSVMIAETKRLLDNKTEIICEASFAYNGNFCSVDILRFCGGKFEITEVKSSTDVKLIHYDDIAYQYYVLSSCGLDIKKTFIMHINNKYERNGDIDLNGFLTARDCTKKIRAMQKDIAANIERLKKSAEGENELNTNIGIYCLKPYECEYKTYCWKHIPQNSIFDISGMKKEKKFEIYNRGI

SEQ ID NO: 91523 - protein, 87 aa, Unknown
  Obtained from environmental sample
  misc_feature (1)..(87): Xaa is any amino acid
MKYVIIGNSAAAIGAVEGIRHVDKKGEITIITSEPHHTYSRPLISYLLLGKVTREGIKYRNDNFYEDYKCTLLANTIVTGIEAEAKK

SEQ ID NO: 91524 - protein, 543 aa, Unknown
  Obtained from environmental sample
  DOMAIN (1)...(542): Phosphoenolpyruvate carboxykinase
  misc_feature (1)..(543): Xaa is any amino acid
LFRSDPSDVARVESRTYIASKSQDDAGPTNNWIDPKELKKEMTALYKGCMHGRTMFVIPFSMGPIGSPIAKIGVELSDSPYVVINMHIMARVGTKVLDVLGTKGEFIPCLHSIGKPLLSCQDDNGKWPCAPIEKKYIAHFPEERTIWSYGSGYGGNALLGKKCLALRIASIAAKNEGWLAEHMLILKITRESDKKVKYIAAAFPSACGKTNLAMLVPTIQGWKVETVGDDIAWMRPGKDGKLYAINPEAGFFGVAPGTSMDSNPNAMHSIEENTIFTNVALTEDGDVWWEQIGHDAPGKLIDWNGNEWVQDKANKDQKPAAHGNSRFTAPAKQCPVIAPEFEKLEGVPIDAILFGGRRPSTIPLVHQAKNWNHGVFMGSIVGSEITAAALDLKVGDVRRDPFAMLPFCGYHMGDYFKHWIEVGKKIPEAGRPKIFFVNWFRKKDGKFAWPGYGENSRVLKWIFEQCDGSGKSVDTQIGLMPDPASFDKPDSVSEDTLKEILSVDVEGWKKEIADIKEKHYPKFGNKLPKELQEELAAIEKRLG

SEQ ID NO: 91525 - protein, 311 aa, Unknown
  Obtained from environmental sample
  misc_feature (1)..(311): Xaa is any amino acid
IEDGVFSGTSITSVTIPKSVTSIGESVFGNCTKLSTINLEAGNSVYLLQDGVLYNKAKTTLIQYPPGKTNTSFTIPNTVTSIGSGAFFGCTSLKSVTIPNSVTSIGSAAFADCTSITSINIPNSVTSIGDWAFVYCTSLTSVTFQGTITQDKFSGYAFDGDLRDKFYSVAPNGTPGTYRISNPGDVVWWNINGKIETNIYEPVINEDSELILEMWYKDDLPLLYDRLNTLKLQGLDPGDAVRFLMIAHYAGAQTPNGGNHFIGPEPFAKMGVNMDGILALRYAVNGSGAFASSETIHAFILMDPAFPGSYR

SEQ ID NO: 91526 - protein, 484 aa, Unknown
  Obtained from environmental sample
  DOMAIN (271)...(413): Phosphoribosyl transferase domain
  misc_feature (1)..(484): Xaa is any amino acid
MNLDDDKLCEECGVFGVFLNDPQHDAAPLIYQGLFSLQHRGQEGAGIAVVHDNVIDVHKGMGLVGEVISSDALAKLKGHSAIGHVRYSTTGENNMENVQPFISHFKLGSVAVAHNGNLTNADVVRELLEDAGIGFASSSDSEVIINLIAKNYKKGLEKAFTDTVKFIKGSYALIVLTGEALVGARDPNGIRPLCLGKIADGKNSGKHGDQSGWILSSESCAIEAVGGTFVRDIEPGELVIINREQVLSYSFCEKTRRAVCSFEYVYFARPDSVIDGNDVYHSRIRAGEILGKESAVAADLVIGVPDSGVPAAIGYGRATSTSFGMGIVKNKYIGRTFIAPGQIERERAVSLKHFAIRSEVNDKRIVLIDDSIVRGTTSRHLVSLLRGAGAREVHIRICSPPVRFPCYFGIDTPHRKDLISNGNSAEELCKSLGADSLAFISVKGLLESIDVSCDAGNPANCGYCLGCFTGEYPIAVAYKNSETA

SEQ ID NO: 91527 - protein, 62 aa, Unknown
  Obtained from environmental sample
  misc_feature (1)..(62): Xaa is any amino acid
FIGYSAMAGAIGGGGLGSLAINYGYYRFRTDVTIGAVIVILVLVEAVQMIGTAISRSLLSKR

SEQ ID NO: 91528 - protein, 280 aa, Unknown
  Obtained from environmental sample
  DOMAIN (175)...(271): Region found in RelA / SpoT proteins
  misc_feature (1)..(280): Xaa is any amino acid
DTVIAALLAEASGKAVEAKDQEEKLSSLFGSQTAMLIMNYAKISRLSATNKTILEAENIRNMLLAMTDDIRVILITLAEKLYSLRTPDLIPPEKLKNFAQECLDIYAPLANRLGISKIKDELEDLSLKFLNREVYQQIKDIVSVKRAERLKFLSQAREALITEAEKSGIKISVSSRPKHFYSIYMKMRKRNKSAEEIFDLFGMRIICETIEQCYTLLGIVHSLWKPGAGRFRDYIANPKSNGYQSLHTSVIVEGWLLEIQIRTKEMHSMAEKRYCKPIGV

SEQ ID NO: 91529 - protein, 449 aa, Unknown
  Obtained from environmental sample
  DOMAIN (14)...(374): AMP-binding enzyme
  misc_feature (1)..(449): Xaa is any amino acid
GIPLYIAEVKMLITVADAGLLADIAAVRPKCGNLQHIAVVGKVPPDGAYIDLLREMETTSENFQRIPGKTEDPMLIYFSSGTTGMPKMVLHNNSLPLGHIVTAKYWQCVEDNTVHMTQTDSGWAKFAWGKIYGQWICGAAIGAYDTEKFTPQGMLDAIIRLQPATFCAPATIFRYLIKEDLSAYDFSFIHHTSVAGEPLSPEVYHRLKEKTGLELREGFGQSETSVMAAVFKWLPVRPGSMGKPAPLFGISLLDENGETCDDGIAGNMSITMAGKNMYEIAATQNGAGQVGAPQIGLSDFPGLFRGYWKDEEVTKSCWNRGTYQTGDVAWRDGDGYLWFVGRNDDVIKCSGYRIGPFEVESALMEHPAVLECAVTAAPDPMRGQVVKASIVLTRGFSPSDELIHELQNHVKHVTAPYKYPRIVEFVPELPKTISGKIKRNVIRELYQKA

SEQ ID NO: 91530 - protein, 493 aa, Unknown
  Obtained from environmental sample
  misc_feature (1)..(493): Xaa is any amino acid
MPQIELYSLLRGYAANAKSATVNIRQFLSFVSQYAAKKKIEQAEFARWADDAEAEFKNEINALVANGKCLLLADSKDGNIFLPDFCREIISLAYENPDKQAAIPFLSASRMNLKIPEGYARTVGLLSDMESFFGKMESADSDQIINLQFPQDYGSTLLLASMIPRVLMESALIKIQYFLAHGHSMTHIVNTLNVQIKDKERALKDYIDKIIFRPFECINEMERFDDFVYVFWVHFCALVKKDMNAKGEIREPDLAVLQSVYVIEVCCSLYRSSVVKKREVDAAYARLEELMDLPPYRYSTGDISKFTTDKGIPLLNYISRQEMEAYIRSKITESKNGAFPAWFSIQGATGERLYFKKEQYLPICAGMIGDAQPQVKAALVKRWTRLIKDYSSEPAMEKDTEYEKLLKKLTNNVNPILLTVLEDPKLRWAYEELERALGTVPPDMRLFNRGAPLSLYVLYALRRRDIIADIKFELPIWYSNPFLHAFLKFFKNL

SEQ ID NO: 91531 - protein, 386 aa, Unknown
  Obtained from environmental sample
  DOMAIN (79)...(259): Trypsin
  misc_feature (1)..(386): Xaa is any amino acid
GKLTKKPAEPQHDVVQETAVDEVPNETVRVLSEGQPGNPPMSIEVQTNASYTEDERENISVYERFNSAVVNITTETMAVNWFLEPVPQEGGSGSGSIIDTRGYVLTNNHVIRNAYKVYINLADGSQYEGTVAGADPENDLAVVKFDPPAGTVLKTIPYGDSGNLKVGQKVLAIGNPFAMERTLTVGIVSGLGRPIQITRQHIVRDMIQTDASINPGNSGGPLLDSRGRMIGINTIIFSPSGGSVGIGFAVPVDTAKRVVNELIQYGKVRRGWFDATMVQLFPALVRYAKLPVGSGLLVSRVKRGGLADKAGLKQGGERVLYRGSEIYIGGDIITSVEGMKIASLADLFSALEHSKPGDKVKVGILRGDAALTLEIQLADREEVMNN

SEQ ID NO: 91532 - protein, 419 aa, Unknown
  Obtained from environmental sample
  misc_feature (1)..(419): Xaa is any amino acid
RVLPKARVMNTLPGGGRVELRVEAARDEFMVIFARELKNSNGNGGANSSFPGWAQGSWILTRRRDNGEPERIRVFLRSDPYTYIQFRPFPFNPDKCQMDVVLYDAYIVRSLPLPVTMERLYTMHLGDVLKLAGDQFPRRYFEPNPADYRLQRQFINKVRENIKGLEFADDGAIDQRGNYVYINTGLEQKGRPGLNCSGFAKWLVDGILKPVTGERLEIPPLKEPYGVRGSSFTDIWEEKRDPFFGLDWIRNLASTAWSKLLAPSFGNLDEIEVRSDRFSQLTLRTRNNKTEYSYPGFLENAGYGVEGLLPLLYTLAIDEPGKFYLAAVNNETGPPATEDNPRGPPRMRQYFHIVAFVPYFSESRVFHVAVFESAAETSIGDFRNRYPLSEKTVDGEKRLFPNGHYVNLVRIPVEAAFEP

SEQ ID NO: 91533 - protein, 159 aa, Unknown
  Obtained from environmental sample
  misc_feature (1)..(159): Xaa is any amino acid
LKKRAAFFVALRYLWGRANEGGRYLRGAAAGIAVSLVPIIVTLIVADGMIRGITDRYIELGTGHMQVFGAFTGESEGVIDEIKSYEGVKGVWPEIRSTGVLAGKTGKTGVTVRAIEPSFWTDPEGGRFLKIISGSQNIETDRGILLGETLAANTGAKVG

SEQ ID NO: 91534 - protein, 208 aa, Unknown
  Obtained from environmental sample
  DOMAIN (3)...(206): SRP54-type protein, GTPase domain
  misc_feature (1)..(208): Xaa is any amino acid
SCGLTAILILGVNGTGKTTTAAKLASLYKEEYNKKVILAAADTFRAAAIDQLKIHGQKLDTRVVAHKQGGDPAAVVFDALEAAMSSGADVVIADTAGRMHTKSALVEELRKIDRVVEQKAQSARYLKYLVLDATTGRNAFAQAEVFHSAVALDGVILTKYDSSAKGGVVFSLASELHLPVVYLCTGEKYGDIEIFDPQKYAKEFTGIR

SEQ ID NO: 91535 - protein, 895 aa, Unknown
  Obtained from environmental sample
  DOMAIN (128)...(198): HAMP domain
  misc_feature (1)..(895): Xaa is any amino acid
MLYISDSTLIDYVLKTTKEHADHLLIRLKEYVAIQDQFSDVFSPGEMQDMANLLEIYTDAYTPLANNIFDLVEQGRREEALSVYINRLTPIFNTFTYYLNLGFLKNLEISDVRMKENNDKASFNVSLMLTLVVMSLIVSVLLALAVTKSIAVPLTELGSAAEELASGKLDVQFEDSKSDDEITRLSLRLRETLYLLNQIQQLKLEAVEAQAEKEKAEAASKSKDEFLAKMSHEIRTPMNAIIGMAELALREERRETAQEHILTIKQAGANLLSIINDILDFSKIESGKLEIVPINYQLSSLINDTINIIRMRLMEKPIRFFTNIDGNIPNSLIGDEVRMRQIFLNLLTNAVKYSEKGHIGLTITADKRDDKQVWLRIAVADTGKGIKQEDQEKLFREFAQIDTKKNQGIEGTGLGLVITKRLCVAMGGDISMESEYGKGSVFTAVIPQSIESEEPFAWVENPEKKKILVYEGRSIYAGAVCWTLRNMNVPHTLVTNQDDFAAALYREEWFYVFSSYGLYEKIKPVMGQSDTAFYNGKKPPMALMIEWGTEAYIPGVRFVSIPVQSLSIANVLNGKADSKDYIKNSSVIRFSFPHARLLVVDDIATNLKVVEGLLSPYKTTVDTCTNGLQAIELVKRSVSEKREYDIVFMDHMMPGMDGIEATAAIRAWEKEQQEKGSLSKQVPIIALTANAVVGMREMFIENNFNDFISKPIDVSKLDEMLNRWIPKEKRDTRKNASSGNGASSDNAASGNGASSAVDDTQKSSSKSAKADTADIKEMYIPGVDTAKGIALTGGVFETYKQLLFMLSKDIDERLQFFRKELTTDNLPDFVTHVHSLKSASASIGAGEISSLAAGLEAIGKAGDAAFIRESLPDFTKKLEELKKDILSGLTQISIV

SEQ ID NO: 91536 - protein, 552 aa, Unknown
  Obtained from environmental sample
  misc_feature (1)..(552): Xaa is any amino acid
MSLDRRVSTGMPGLDGAIDMLRLGDNVVWQVNSIEDYLQVVRPYIKQAKKDGRRLVYFRFGNHEPIMKDDEPSVLYKLDTSEGFELFAAKMHNIIEKEGLEAFYVFDCLSDLLTSWRSDMMVGNFFRVTCPFLFILDTVAYFALIRGTHTHDTIARIRETTQLLMDVYIVDNKIYIHPLKVWERYSPTMFFPHLIENDGAISITSSADTATLFSQVSGSGQPSDYWNITLDHARTLLNGNKEEQDEMKKLLISLVIGKELRITELALKYFTLRDVLDIARREIGTGFIGGKSVGMLLARKVLETDAQDAMRGHWEPHDSYYLGSDIFYTYIVQNGWWDLRMRQKTAEGYFTLAKELHEKMLQGKFPDIIREQFKQMLEHFGQSPIIVRSSSLREDNFGNAFAGKYESVFCANQGTPERRYAAFEQAVRTVYASTMNEDALAYRQNRGLTNLDEQMAILVQRVSGNHYGELFFPHIAGVGNSSNLYVWDKTMNPDAGMLRIVFGLGTRAVDRVSGDYARLVFLDQPEKTPPVSHNDEKRFSQHNADVLNLSGN

SEQ ID NO: 91537 - protein, 462 aa, Unknown
  Obtained from environmental sample
  misc_feature (1)..(462): Xaa is any amino acid
MEKVLPETDIVLSRCIAELTYLVEIEKSFPDVRVPDHYGFFTGYLREVTYLAQQASSGVAILPYRTAASAPFDCHIVLGASQSGLSAVFSPLAFLPKSKREKLGITDNDASLTFIKLHRLNSRLPAAFFCSEQTFSGYTIPHSALNAPAKPRQRYGDDPQFSAQFAADLYREESNYYASLHSPAQDQTETAVSSELHQNQKQGFEKWQARRQYAEDSNNTLTQDHPLLRMIRDRFCYNEEYKDKFSVSSSSLEPYFQCPLIWIFSRVLNLENVEAETGLMAYNISGDIYHAVLNLFLSELKQTGDAIAAPIIGGDEKKPVLQLPEYYSKLLAEKVEIVFESFPRLPAGEYQRMSMLTARLLRAQKPLFLSRLENFLAEFIFCFAGFKVIATEETYSLPKDNYFLNGRIDCVLEDIRGDSPQKDSLVIVDFKTKYKIEEGLAHFQLPLYLRLAETKYKKNVDT

SEQ ID NO: 91538 - protein, 217 aa, Unknown
  Obtained from environmental sample
  DOMAIN (167)...(213): LysM domain
  misc_feature (1)..(217): Xaa is any amino acid
ERHILNVSLQNIDSPSIGEAPDYNINGQEYKYDTEKNAEEERKFPWLILGFATLFVALVIAALWYFFLGGSDVFSTASTASTGSATGAYESSAPPPARQETQPAQPVQEIQPLPPLPPLEPLPPEPVVIKAPETPATPKAVVKRARPPAPVKSYKVPAVIPKNGVVYQIQWGDTLWDISAAFYRNPWLYPRIARDNKIRNPDLILAGRNLRIMPKPK

SEQ ID NO: 91539 - protein, 264 aa, Unknown
  Obtained from environmental sample
  DOMAIN (5)...(192): PHP domain
  misc_feature (1)..(264): Xaa is any amino acid
MSYLYETHLHTSPVSKCAISRGADYISGYQDLGYSGIIVTDHFFNANCSLSKRLPWNEWVNRFCQGYEEAYNEGLKHNFDVFFGWEETFDGFDDYLVYGLDKKWLIEHPEVRTWTRREQYTAVKNSGGCVVHAHPFRQRHYISKIVLSPNCVDAVEIVNGGHDDVSFDALASRYAKKIGKTVTAGTDIHDSSDLEYNEIFGIYSDKKLNSILDYVNMVLNNEITGLKVNEDRIKYNGTENVRMPVEIIDINDEITDKHWKDYII

SEQ ID NO: 91540 - protein, 154 aa, Unknown
  Obtained from environmental sample
  DOMAIN (1)...(154): Orotidine 5'-phosphate decarboxylase / HUMPS family
  misc_feature (1)..(154): Xaa is any amino acid
MPAVAKPNSAYYECVSIGAMQVLAEIIATYRREGILVILDAKRGDIGKSSEAYAKAAFDVYGANAVTVSPWMGSDSVKPFLREENGVYILLRTSNAGAADFQDLKLASGEGKAYRAVAEKIIEWDNSSVGAVVGATNVRELAEIANFFCSQKKE

SEQ ID NO: 91541 - protein, 80 aa, Unknown
  Obtained from environmental sample
  misc_feature (1)..(80): Xaa is any amino acid
VYDPTYMMIILLGLVLSGVAAFMVKSRFKKGEKIPISSGYTGAQVAEQILRSMGITDVSIHQHSGFLSDHYNPLNKTLNL

SEQ ID NO: 91542 - protein, 316 aa, Unknown
  Obtained from environmental sample
  misc_feature (1)..(316): Xaa is any amino acid
MANYRSQFVDSGENNEKTETITNADMYRTVIPLFFAGKAKKIEDAYICDIRPVSDPRPYYTGYLKMGELSMYLDQLRDISEEWGYLLLFAMLIQACIFGLIVILIPVIGKRKTLFTRRRGTVGIILYFAGLGLGYMLIEIYLIQRLAVFLSNPTYSTSMVITVMLISSALGNITSGLLKRYRIFVVPAACVLIAGGFMFYIFGLDDFLAIFHSSSMLTRFLVSALIIAPPAFFMGIPYPNGLDNLHEIKPHLLPWAWGMNGGLSLVGGSLARLLSVSSGFPLLLRVGIIVYAAVGCLFPINLVMTRDDGAKAADNA

SEQ ID NO: 91543 - protein, 668 aa, Unknown
  Obtained from environmental sample
  misc_feature (1)..(668): Xaa is any amino acid
ISDNLLLIPLVVIVVLAMLFFSFRRFTFVALPLLTVIIAVVWTVGMAALFGIKLSIITTILPVILVAVGSAYGIHIVTHYMEDTRGKTLTVTEHRELIIGLVRKLIKPVFLAALTTMAGFISFCFTPIVPMREFGYCASFGVFASFAVAVLFIPSIFLLRGPRVLKPDHWSGERQKNQAGSSFNNTIALFFTRIAEKKRLVLVLAALVVVISLYGLSKVIVDNAVVEFFQKETDISRSDRFIREYFGGSKDLNLAVVADTTEELLHPDVLQAVDNLSAYLTANVPAVGKVVGFTDIIKRINQVFNVGESPEGLRNIVSHNASDGFGFNDNASGDFGFGNFDSDDAHYIETPRQENGFQESGFNITQYNTADILRFLDSAAGKSPHLSGNELVRELKRLTNYEGMAYYEIPSNPRRYGKETPEELQRLIANYLVLLSGDDDSGYSNDPLEPTAIRTMIQMRTTGSIDSQAVIDIIKEYIAVNFPKNVRIIIGGGVTYEMAITDLIFNSQLISIFISVLIVFLIIAISNKSLIAGVIGAVPLTLAILCNFAVMGFIGIKLGLGTALISSLAVGIGIDYTIHFIEFFKHEYQSGKQNYLHLTFIGCGKAIMINALAVGAGFGVLAFSQFKIIADLGLLIALSMLITAFVSLTVIPALLMVIKPKFIYGVNK

SEQ ID NO: 91544 - protein, 418 aa, Unknown
  Obtained from environmental sample
  DOMAIN (260)...(359): Methyltransferase domain
  misc_feature (1)..(418): Xaa is any amino acid
MEDSASLGPALAKTLADHQNIEITLLKGKLSKKENYSSLLIPNSSLKESIPNLNEQLTDYDLIITHFGLTSFEALYAGVPVLLASPTVYHEKLVKKAGFWKLGKRNAKKKLSAMLKKNETFFSYFHDLKNHCVKLANKFGLDREPQQSLAELVNGFSPDVSRNCPVCGAALNGPVLARFPERSYLRCKGCGAISMNRINPMPIEYGKEYFFEQYQKQYGKTYIEDFPNLIAMAKRRLAEIKKLGIRSKPRTPNPEPRTLLDIGCAYGAFLAAAKEEGFSPQGIDPAEDAVRYVTQTLGIPAQQGYFPSPNPVPQGGNAAPPYPGYEVVTLWYVIEHFRNCVPALEEIRKQLKPGGVLAFATPSFAGVSGRSSLKRFLENSPQDHWTVWSPAVCRKALEKAGFKVKKIVSSGHHPERFP

SEQ ID NO: 91545 - protein, 271 aa, Unknown
  Obtained from environmental sample
  DOMAIN (32)...(172): ATPase family associated with various cellular activities (AAA)
  misc_feature (1)..(271): Xaa is any amino acid
MTVLSVGKAMELLRGAFIKIISNNLPMNLLPSVMLWGAPGVGKSQGVRQLASDIETKTGKSVHVTDVRLLLFNPIDLRGIPTANADKTLAVWLKPKIFQMDDSADVINILFLDEISAAPPSVQAAAYQITLDRTVGEHKLPDNCIVIAAGNRVTDKSVAYKMPKALANRLCHFEIEVDFKSWKEWAIRSGINEKVVGFLTFRPNHLMNFDPASDDLAFPTPRSWEMASKILNFVSDDINKSYALIAGCIGIGAAVEFRTWCAVYNNLPDIK

SEQ ID NO: 91546 - protein, 359 aa, Unknown
  Obtained from environmental sample
  misc_feature (1)..(359): Xaa is any amino acid
FRAKYRNELAKELKKIGYDIEVTDPVKGFFEIKEVEPDIIKTYSKRRQAIEKKLEEYKEKDSYAHQPDGKKAQNACLATRKKKRKKKPEQMLNDLQKELAEIGQSLESINEAALRCGQKAADAPPPRTAEQCVRAAIDDVMDKQAAATEKLVIDLALKGGMGYYTAEELSAVLRDQTDWELLGPGAGDDYPTNYYTTTETRRAEQAVVDYARHDRGQYGRAITPDKMDEHMARIAAEGTQLSTGQYKTVKMVCTARDRMSIVQGDAGTGKTFAMTTAKTILAAEGITVRGFAPTGKAAEELNAVGVKSMTIHSYLESPNAQAEAGTGEVWLVDEAGMIGSRRLDEFLKKADEKQARVSS

SEQ ID NO: 91547 - protein, 305 aa, Unknown
  Obtained from environmental sample
  DOMAIN (1)...(41): Phosphoribosylglycinamide synthetase, N domain
  misc_feature (1)..(305): Xaa is any amino acid
KEGVGLTVVGPEAPLAAGIVDRFRGAGLAIVGPGQKAARLETSKVYSKSFMGKYGIRAAASRNFTSHADALKYAEKYFSKAKKTTPPPLVVKADGLAAGKGVVVAANLTEAKQTLSAFMKEGSLGDAGKSVILEEYLEGLEVSVLAAVSVSPGKKGTIKPFISARDHKRRFEGGSGPNTGGMGAIAPVPDFTEAARNDFETAILAPTLKGMVAEKMDYRGFIFFGLMVREERCYLLEYNARLGDPETQAVLPLMDSDFAELCTAILNGTLQNFPLKWKKGAVCAPVAVAESYPGSYRKGDPIAIN

SEQ ID NO: 91548 - protein, 79 aa, Unknown
  Obtained from environmental sample
  misc_feature (1)..(79): Xaa is any amino acid
NTGARRVAGAIAEVAKGSHDIARNASEAAIGATNVSRNVSSMREAARKSSMGASQVNGSAENLSKMAEQLRTVMNKFKV

SEQ ID NO: 91549 - protein, 273 aa, Unknown
  Obtained from environmental sample
  DOMAIN (46)...(217): Calcineurin-like phosphoesterase
  misc_feature (1)..(273): Xaa is any amino acid
MRKEPLFASGVAALTLAFFLIGGPLHSNFLMVTVKETLQTAPKKTLRIALFSDIHFNALFQKSKLEKIVDSLRILRPDAIFFSGDLADLPKDKLQERGYDSLFSQIRAPLGFYVTTGNHESYMNPGGKTIEWMQSFDNVTLMMDSTACNDFFCVTGRLDHQYAKRHSNGRTALMELMPAANIIPWFLIDHQPKGLDVEDANITRKPDFAFSGHTHAGQFFPITILVKLIWHLSYGLGELDGIPWYVTSGIGQWGPPVRIGSRAELVLFEFSTP

SEQ ID NO: 91550 - protein, 213 aa, Unknown
  Obtained from environmental sample
  DOMAIN (8)...(198): Metallo-beta-lactamase superfamily
  misc_feature (1)..(213): Xaa is any amino acid
MDNVSENGHPVGFNPCAVIDPGEEGGRIIALLDQLKLFPSYIILTHGHFDHIGAVSALAKEYRPKCRSEQSSGITIAIHEADAEYLGPDAYSAHNRGIKAVFGDSVKAEMFLEPQPSPDKLLQEGDTLGPLTVLHLPGHSPGSIALWDEKAGVMFTGDTLFCGGYGRTDLPGGSDKLLLASLKRLFAMNGDIQIYPGHDGISTIGQEAGDFQI

SEQ ID NO: 91551 - protein, 174 aa, Unknown
  Obtained from environmental sample
  misc_feature (1)..(174): Xaa is any amino acid
MSLEVRHIDTDFLIIGGGTAGCYAALTFCEHSNAQVLIVEKADIRRSGCLAAGVNALNAYIGPGKTPQDYVDYARRDAENIVRGDLLLTMAEGLNRVAAKLENLGLTILKDSKGQYATRGWRNIKINGENIKPILADAVKKQERVTVLNRVNVFEYIIQENRILGVYAVGIEEP

SEQ ID NO: 91552 - protein, 276 aa, Unknown
  Obtained from environmental sample
  DOMAIN (56)...(272): Binding-protein-dependent transport system inner membrane component
  misc_feature (1)..(276): Xaa is any amino acid
VKVKSGRGKIPGFGLSLGLSLSYISFLILIPISALIIYAAKIPPAEYFKIISDERVIAAFKVSFSSAIAAALLNFVFGFIIAWILARHNFFGKKIVDACIDLPFAIPTAVAGISLAMVFSSNGFMGKFLSLFNISLEYSRVGIVIALVFIGLPFVVRTVQPVIEEFDSGVEEAAASLGANYFQIFFKVIFPSVLPAIITGAAMAFARGLGEYGSVIFISSNMPYESEIVPLLIIKKLMQFDYAGASAIGATMLVIAFIMLFVTNILQNYMIKERSS

SEQ ID NO: 91553 - protein, 164 aa, Unknown
  Obtained from environmental sample
  misc_feature (1)..(164): Xaa is any amino acid
LQLLRLKWRKIFLPYYYMRIALELVPKTLDSFLEESKTHINNFPKIAAINIPELRSVEIKSFEASEHLLKNSVPAIPHFRLIDRTLENLENLIEKLISLGLKQTLLISGDPPLDPQGFVPSGIKAPQAIKHIKTKFPGLKVYAGQDPHRQSFKKELDYCQEKLD

SEQ ID NO: 91554 - protein, 274 aa, Unknown
  Obtained from environmental sample
  misc_feature (1)..(274): Xaa is any amino acid
MERLIDKELVLWKNDEEHKVLLLRGARQVGKSSSVRKLAEFFEHFVEVNFEKDKKVHQIFDGDLNAYEICEKLSVKFKKTITPKKTLLFLDEIQACPNAISALRFFYEDYPELHVIAAGSLLEFALEELPSFGVGRIRSIFMYPLSFAEFLNACGESLLWKEVCASSPDKPLFEPFHEKCLEYLKKFLLLGGMPAVVVKYTENKNILECQKTLNDLIISLKSDFSKYKKRVPNLHILTAFEAVVNQSGNRFNYSNVEQLNYRQLKDSLELLQKA

SEQ ID NO: 91555 - protein, 365 aa, Unknown
  Obtained from environmental sample
  misc_feature (1)..(365): Xaa is any amino acid
LETGWELPHPRHIKLFEKYDAYPVFAQQSIRELTLTNRSYEDVLDAATFAVFREGFKKEWGADGDHLKTEKDVKYALSLGFTMITLDCSDHIRNDINAANAPLPPRKILQKYLGKQFDIGEGIILTFTEEDLKIIYGIYGKAVFFAVDMYRRFFKHGKYNADFEISIDETSTPTTPLQHYFVARELINSGVSFATIAPRFCGEFQKGVDYSGDLEQFNKEIKVHAIIARHFKYKLSIHSGSDKFSVFPSIGTETRHIFHVKTAGTNWLEAMRVVAQIDPTLYKDIHKYALSVFEQACKYYHVTTDLDNIPDVDSLENEQLPKLFENNDSRQLIHITYGFILNKRTSTNETDFTFKDNLYNLWHKH

SEQ ID NO: 91556 - protein, 325 aa, Unknown
  Obtained from environmental sample
  DOMAIN (41)...(231): ATPase family associated with various cellular activities (AAA)
  misc_feature (1)..(325): Xaa is any amino acid
MKDSQPIAEFARRIRENIETVFLGKTAVVDMLITAFLARGHILLEDVPGTGKTILARSFASSLNLRFARIQCTPDLLPADILGVSVWRHNEEFEDRKGRFVYRPGPLVNQFVLVDEINRATPRTQSALLEAMAEGQISVDGERHALPEPFFVLATENPVEFEGTFPLPEAQKDRFLLSLGIGYPDTGSEALILENQRRLTHPVTDLKPVAQAEEITPLQDAVSHIHVDPMVRDYLLSLVTATRNESRLRVGISPRGSLALYRSAQAYAAVQNRGYVTPEDVKKMAGSVFRQRLLLSSESIVRGIQPERIIQTILDTTPIPEYRTS

SEQ ID NO: 91557 - protein, 246 aa, Unknown
  Obtained from environmental sample
  DOMAIN (1)...(167): Type II/IV secretion system protein
  misc_feature (1)..(246): Xaa is any amino acid
MDELGLPQAVQSLCDRPRGLVLVTGVTGSGKSTTLAAMVDKINSNEYCHILTIEDPVEYIHQHKKSLVNQREIHSDTSSFKKALRSALRQDPDVVMIGEMRDLETVESALTIAETGHLAFATLHTNSAIQTINRIIDVFPAHQQQQIRAQLSLVLEGIICQSLVPKASGKGRVVAMEILVPTPAIRNLIREDKIHQIYGAMQAGQGKHAMQTLNQSLSELVLKGEIAQDTAMSFSSNQDELMELIN

SEQ ID NO: 91558 - protein, 573 aa, Unknown
  Obtained from environmental sample
  DOMAIN (1)...(573): tRNA synthetases class I (I, L, M and V)
  misc_feature (1)..(573): Xaa is any amino acid
KEFKVSGKFGKRDIEKLGIHLFNEACRSIVLRYTSQWEKVVNRMGRWVDFVNQYRTMDPPYMESIWWVFKQMWDKGLIYRGFRVQPYCPRCATPLSNFEVNEGYKEISGPSITVTFPIVKGGVNNAIADEFVNDNVKILVWTTTPWTLPSNVALAVGEKIAYVKIRDGENVYIMAKERLGAYYKDLSKIEILKEMTGGDLVGLRYAPIFDYFKDRDPRFFTVTAADFVSTEDGTGIVHIAPAFGEDDFIVGQKMELPIVCPVDDEGKFTDEVPQWQGQIVYTADDEITRQIKMSGRLFHKTTVLHRYPHCYRCDSALIYKAITTWFMKIEPLKANMLENNQQIRWVPPHLQNGRFGKGIESAPDWNISRNRYWGTPIPVWLCDCGHRECVGGLDDLHTLVGNGDKSAGESIHAQTAQRVQESLKAQDAAQRLSDAGIDSAWIERLANVNISPVDIHRHIIDNFEVKCPKCGAVMKRTTEVLDCWFESGSMPYAQQHYPFDNKEIFEKNFPADFIAEGLDQTRGWFYTLTVLSGALFGKPAFKNVIVNGIILAEDGKKLSKRLRNYAPPEDILN

SEQ ID NO: 91559 - protein, 299 aa, Unknown
  Obtained from environmental sample
  misc_feature (1)..(299): Xaa is any amino acid
LPRPQDWEDLEEALGGGFEASYRLRAQSGWSEEFYDEDDEGTEMGDDSGFASMPGGLYAPESSEPFYGLGRFGFWWSASEDGGSAYSRSINCCGDDGVGEASPNTESFGYSVRCLLDDKSNERKEQRLREETRKKEIEARKKMEAEQKCMEEERQRKETAERETMEEGQERFGKTSVYFTDSRDGQKYRAVKIGGNTWMAQNLNYKPENGKSRCYKDSASYCGKYGRLYDWETATNACPAGWRLPSNKEWSGLMSAVGGKFKKYEHNPGWFGAGAALKTNAGWDCYKDRNGNGTDAYGF

SEQ ID NO: 91560 - protein, 96 aa, Unknown
  Obtained from environmental sample
  DOMAIN (6)...(94): 6-O-methylguanine DNA methyltransferase, DNA binding domain
  misc_feature (1)..(96): Xaa is any amino acid
FRFPCRDGFSQAVWKLLLEIPYGATSTYGAIASRLAGTGRKASAQAVGGAVGHNPISLLIPCHRVIGSDGSLTGYAGGIDRKRALLELEGNLNLAY

SEQ ID NO: 91561 - protein, 1157 aa, Unknown
  Obtained from environmental sample
  DOMAIN (1)...(269): Alpha-2-macroglobulin family N-terminal region
  misc_feature (1)..(1157): Xaa is any amino acid
ATGNPVAGAVVTVLGLNGNPIFSVSTDSGGRARIPDFGNTYKNERAPTVYTVVSGEDMSFMAYNTNGRNLDYSTFDIGGIYGASDPKTLRAFLFSDRGIYRPGDEARIGLVIKSGDWAGNLGGTPIEYRVTDPRGAEIYNKRIRLSAEGVEEIRFSTHDWSPTGTYTASVYVIQEYKQGDELRERHVFLGSQTVKVEEFLPDTLSVSAVFNPVPQDGWIAPGELKARVAVRNLFGTAASGNEVKAQINLAPGHQYFRQYRDYQFRDPYLGKNSFQEFLGTKTTNSEGAAEFNLNLAKFEKATYRLSFYTEAFEKGSGRNVSAEAAVYVSPLPYLVGYKADGNLNYISRNSVRALSLIAINPKTEKTSVNNLTLTITEMRYVSALVRQPNGVYKYQSIQKEYPVTTKQITIPAAGLEYRLPTNNPGEYKLSITGDGDLEYNSLSFSVAGSDNVQRSLNRTAELEITMNKNDFRNGEEIELMIKAPYAGSGLITIERDKVYAYRWFRSGGETSMQTITVPADLEGNGYVNVHYLRSQDSPEIFMSPLSYGAVPFSISKENRTNRIKLDIPGEAKPGEDFVIKYSAARKGKIIVFAVDEGILQLAGYRTPDPLAFFFRKRALEVRTAQILDMVLPRYSIVQSLAAMGGGAGFEELAGNLNPFKRKQNVPVAYWSGIIDAGPEVKEVRYRVPDYFNGTLRVMAVAVNDSAIGAADDRALIRSTFIISPNAPMLAAPGDEFDVSLTVTNNQKGAGEKGKVSLKAVPSEHFTISGNKEFNLDIPEGKDKTLTIQVKAAGKLGAAQIRFIASNGGETSELSAYMSVRPAVPYRVSLYSGAIKNKSAETAIDRNLYEEFNTREVSLSYLPMGIAKGLSFFLNNFPYGCSEQITSAVFPFLYPNLFKELGYTRAQANEGINRAIGILQARMKEDGAIGVWTSRSHDDPLITTYAAHFLTEARSANYYVSPAMMEKLLNACRNIASYPGTSHYDFTTRAYAIYILTRNEIVTTQLVESLKRDMNRFDESQTGIAGLYLAGTYALLQKTNDAALLLGKIKRAMAKDSSFRYIDELMYHSIYLNILSRHFPNRLRDISESLLVDMAGQMERQSYTSISANHALMAIDAYLKAVPSAETGRYTIQEVSKDNQRKELKAAGNTLFSASFSR

SEQ ID NO: 91562 - protein, 255 aa, Unknown
  Obtained from environmental sample
  misc_feature (1)..(255): Xaa is any amino acid
MKSITKLTATLALAITLTFTACEEKKKQDGADTKPPESASEAAAATQEPVAVAAEKAAQEVASESDEEECADVCGPAWTAEDEAAAEAMKAALAEATAATKVEKAEEVVKGTFTDTRDNNIYKTVKIGKQVWMAENLNYEAKDSKCYDNKPDNCNIYGKLYNWDMAKTACPKEWHLPSNVEWEVLTVAVGGNETAGKYLKSTSGWTDFDGKSGGTNDYGFSALPGGYGNSNGIFIDVGGYSPSDGYFGYAGAHGG

SEQ ID NO: 91563 - protein, 185 aa, Unknown
  Obtained from environmental sample
  DOMAIN (12)...(170): short chain dehydrogenase
  misc_feature (1)..(185): Xaa is any amino acid
MNANQDKNECPKSVVITGASDRIGLELAKECLDLGYYAVIHYRTSAEPAKSVFKDNGRVTFIQADLAESPEKFMDDVKRSSAGPLTGLINNAAIFEAGDMADPNHFMDILTVNALTPLRLSAAFAKSVTSGWIINITDAHADSKSERYQNYRVSKLFLDEITRQQAYLYAPAIRVNAIAPGAILP

SEQ ID NO: 91564 - protein, 222 aa, Unknown
  Obtained from environmental sample
  DOMAIN (3)...(214): N-(5'phosphoribosyl)anthranilate (PRA) isomerase
  misc_feature (1)..(222): Xaa is any amino acid
VRIKICGLSREQDIDYVNEGHPDYAGFVFAQSKRQVTPGTAEHLRSRLADGIVPVGVFVDAKIDEITALYRSGVISIAQLHGGEDDDYIIKLKEKNSGLPVIKVYKFLTIKRKKKPAEKEEVKQDFAYSAYSGIINNKNSDYILIDSGAGSGKTFNWELLKKLKIEKPWFLAGGINTDNIARALALNPFAVDISSGAETDGIKNREKILQLIASARKGNKHE

SEQ ID NO: 91565 - protein, 149 aa, Unknown
  Obtained from environmental sample
  DOMAIN (7)...(149): Indole-3-glycerol phosphate synthase
  misc_feature (1)..(149): Xaa is any amino acid
VKSPPDILGKIASQTVLRVAKAKEALSYEQARTHALSLAAKDTRASVLPFDSAIAASGLSFICEVKKASPSKGVIAPDFPWLEIAKDYEEAGAAAVSVLTEPEFFLGSDMYLREISAAVKIPTLRKDFIIDEYQIYEAKIWGAKAVLLI

SEQ ID NO: 91566 - protein, 339 aa, Unknown
  Obtained from environmental sample
  DOMAIN (1)...(66): Glycosyl transferase family, helical bundle domain
  misc_feature (1)..(339): Xaa is any amino acid
VIKEAIIKAANRENLSFECAESVMNEIMEGKASEIQMAAYLAAMSVKGETIDEITASATGMRKHCVRILHDMDVLEIVGTGGDHSNSFNISTTSALVISAAGIPVAKHGNRASSSRTGSADVLESLGVDITASPERSLHLLKTINICFLFAQNYHISMKYVGPVRRELGIRTIFNILGPLVNPAGAKMELLGVYEPELIEPMAKVLCNLGVKSGMVVFGHDGLDEISLSSPTTVCELRDGFIKSYDIEPEQFGMTRCKKEDLLGGTPSENAQITRNILNGEKGPKRDAVLLNSAAAIHIAKPSITMKDAIAVAAEAIDSGKAAQQLKKFIEMSQQKEPV

SEQ ID NO: 91567 - protein, 385 aa, Unknown
  Obtained from environmental sample
  DOMAIN (1)...(382): Aminopeptidase I zinc metalloprotease (M18)
  misc_feature (1)..(385): Xaa is any amino acid
RRGKAVVLCNIGKKSFTQGISIIASHIDSPRLDFKMRPLYEDSGMAFFDTHYYGMIKPYQWTGIPLALHGFLILKDGQELNIQIGEGHDDPRFFITDLLPHLAEEQMKKSVKDAVPAENLDILAGLNSAPGESGAGAVKLNILRLLYEKYGITEKDLVSAEICAVPAFAASDIGLDRSMIGAYGQDDKACAYPALTAFLSVNEPEYTSCLVLADKEETSSFGISGMKSAFFPCFINELVEAAGETATRHEVFSNSFCISADVNTCWYPLYKEVFDEHGEAKLNHGIVLFRCWGEKGKENTNDADTQTVAALIKILEEADIIWQTGEGGKVDAGTSGTLSRFFTTLDIPTVDLGVPLLSMHSPFEGAAKADIYMAYLAFTAFFKRR

SEQ ID NO: 91568 - protein, 115 aa, Unknown
  Obtained from environmental sample
  DOMAIN (2)...(115): D-isomer specific 2-hydroxyacid dehydrogenase, catalytic domain
  misc_feature (1)..(115): Xaa is any amino acid
MKLVADKQIYKVEEAFADMGDVTAVSGGMISRELLSDADILLVRSVTQVNAALLEGTPVKFVASASIGVDHVDVDFLRENCIGFAHAPGSSADSVAEYVVAALIEICAKSGRALG

SEQ ID NO: 91569 - protein, 97 aa, Unknown
  Obtained from environmental sample
  DOMAIN (45)...(96): Phage derived protein Gp49-like (DUF891)
  misc_feature (1)..(97): Xaa is any amino acid
VYDIQQTEVFSAWLHGLKDNQAKARIRARVERAGLGNFGDWSPEGGDIRAMRIDYGHGYRLYFTIRDNRIIFLLCGGDKRTQEADIKQAHKLAKEID

SEQ ID NO: 91570 - protein, 437 aa, Unknown
  Obtained from environmental sample
  DOMAIN (385)...(410): The GLUG motif
  misc_feature (1)..(437): Xaa is any amino acid
LNVNAGGTVVITAKISNGIAKGKDFTQDFKIVIGAGVPPITKEDQEYTIVILTFDNESGDTLTVSPNKGVEGAAVTLSYTVADTAHYNQLDFGGVSTNIASVTSAGSGTRTYTINASDASSSNVITITAIFTHTDLEIDHIAFSEHDGGHITKVYGDEPFTNAITTAHKGTGAITYHSSNESVATVDSAGTVTILAVGSTVISAEKAADDKYAHAITTYTLTVNYKPGTAENPFLVTNEADLRKVGTGTDGWTLSAHYRQTANIMLTSSFTRIGNNTNKFTGSYDGGEHTITNLSMTISSTYTSLFGYIGASGTVKNVNVTSGTISVSTGSYVSIGGIAGENEGTIDNCSFSGTLSVSPHDQIGGIVGQNNGTVKNSRNFANVTGGNQVGGIAGTNQGKLDNSYSAGTVRGSQQVGGIAGTNVGSGNYIKNSYNTGN

SEQ ID NO: 91571 - protein, 767 aa, Unknown
  Obtained from environmental sample
  DOMAIN (349)...(377): The GLUG motif
  misc_feature (1)..(767): Xaa is any amino acid
TGNVTGTTNAGGIVGSSSSGTTVQNCVSLGVKVTGASVGRVAGSIGGSPVSGNLARIDMKTGASGSEALVTTGAAGNKEGANVSLGTALSTVFNTNWLSSLWNIPTGDLTTGDNLPTLKPNTQTPAPTLPAAYNAPGTAENPFLVTNEADLCKVGTGTDGWTLSAHYRQTANIMLTSSFTRIGNNTNKFTGVYDGGEYAITNLSMTISSTYIGLFGYIGASGTVKNMNVTGTVSSDSTNRTCIGGIAGGNEGTIDNCVFNGTINGSATTNDNVGGIVGENSSTGTVSNSINNATVKSRDQVGGIAGQNNGTVINSSNNGSVTGNNQTGGIAGTAQGKIENCYNTGTVTGSQQVGGIAGTNVGSGNYIKNSYNTANVTSTAGTSSNVGGIVGFNQANTTVEYCYNTGNLFGSSAVGGIAGNVAAGSTVRYCVSLGERVTGNGTNVGRIAGIYNATLTGNMARELMRIGASGSEAVVTGATTQGNGLDVSLGVGQQGSVFSGWNYSTIWNISGNLVVGGDLPTLKDNPQSPAPTLPGSNPALGTAANPFLVTNEADLRKVGTGTDGWTLSAHYKQTQNITMTTSNFTPIGNDANRFTGTYDGDGKTISGLNITGTGNNLGLFGFIHSAGTVKNVSASGTVTQNADTSFTGGIVGQNNGTIENCSFSGTVTASACDMVGGIVGQNNGTVINSRNSATVSGRSQVGGITGRNQGTIDNSYNTGAISGSRYIGGIAGVNTNLGMYIKNCYNTGDITAAEATTASYGRRHCRV

SEQ ID NO: 91572 - protein, 486 aa, Unknown
  Obtained from environmental sample
  DOMAIN (288)...(339): Putative Ig domain
  misc_feature (1)..(486): Xaa is any amino acid
GKIAHSPDGVTWTAASSNTFGIYENIYAIAYGNGKFVAVGSSGRMAYSSDGVSWTAITNKEFGDGIYAIVYDGIGKFVAAGDYGKMAYSYDGISWTTVPDSTFSRVGINTIAYGNGMYVAGGNYGGMAFSSDGVYWTAVSDSKFSIASICAIAFGNGKFIAGGSGSIMTYSMNISAPVGTAPTITTTSLSGGTVGMAYSQTLTASGDTPITWTRDNGTLPGGLTLSSAGVISGTPTTAGTSTFTVKAANATGSVTKSLTITIVAGGTAPTITTTSLPNGTVGTAYSQTLTASGDTPITWTRDNGTLPGGLTLSSAGVISGTPTTAGTSTFTVKAANATGNVTKSLTITIVAASSGGNPTPSGGTFTLTGIPSDYNGLYAYLFGGTENKEVLVLGVQSIDLNNEIITLPKISNERVSIPMWKIDQDIGSFTGYSGNDTLVIAVYISSDDMYSDDDSEDDAEVLIYYFSVPFSKGSATKAWSQADLIQ

SEQ ID NO: 91573 - protein, 263 aa, Unknown
  Obtained from environmental sample
  DOMAIN (56)...(263): Penicillin binding protein transpeptidase domain
  misc_feature (1)..(263): Xaa is any amino acid
MLSGTEDFAKGDVKGNAKSNTDVKGSHVMLTIDTNVQHILERIASKTLNETRAEAVMLLAMDPRSGDIIGSASLPNFDLNNIRSSDETSRMNRPVIWAYEPGSVFKVFTLAALMDSGAITNNSVFTCNGYYVTGSGSHINCLGAHGRVTAREIIIHSCNAGAAYASDQISSGGFYKLLTDFGFGSRTGAGSPGETSGYLLGSEQWSDRSKPTIAMGQEISVSAYQMLQAASVIANDGVLISPRIVSNIISPDGRVTEWKPIER

SEQ ID NO: 91574 - protein, 400 aa, Unknown
  Obtained from environmental sample
  DOMAIN (50)...(263): Binding-protein-dependent transport system inner membrane component
  misc_feature (1)..(400): Xaa is any amino acid
MTKKNAAFLLALVPALAAAFSFILPYAASFAPAVLKFPYVFKTFLNNTALINITLFTFKQAFFSVLVSLALGLPGAWFIGNSRSRFTPFLKTLTAIPFAMPSILVVLGFVLFFGNSGWINRLFTVRILYKPQAVILAHGFFNFPLVIRLAGDGIARARRAYAHAAASLGASPVKTVLTVILPLTLPSIMAASFLVFMYCFTSFAVVLVLGGGPNTTTLAVEIYRYARIFLNYDSAGFLALIETLIAVCVFITYVFAGKKSMSVKTNIIEYAETRKKSAVSRIAMIAYFIIIAFFILGPLFSIPLESFLFRPSRATAQVLSIRWWINLGGACLPALGRSLLLAFFAATTACILAFFAAGAVKLLETENKESSIPSNLIRFFAASPVISSGIVLGLGWLILY

SEQ ID NO: 91575 - protein, 541 aa, Unknown
  Obtained from environmental sample
  DOMAIN (138)...(173): UvrB/uvrC motif
  misc_feature (1)..(541): Xaa is any amino acid
INSFETIIVQSEYDALLLENTLIKQHSPKYNISLKDGKSYPLIRITHEDFPRIFRTRRIVQDKSLYFGPFPNMQSVNTMMDLIDKLYPLRKCKTIKKNGPCMYYHIGRCMAPCSKKISIEDYSLHIQRVQKLLSGETDALIIDLTAKMHEAARVMQFEQAAQIRNTIRAIESLTREESYVEDLNPEDRDYIAWAASGVFATFTVFSMRGGRMTGRDLYRTRSAADEWESLEIFITSYYEPSRRPPAKIYIQNDISENSQLIQNWFKERFGFEPQLLSPTEKHHAVIMAMAKQNAMEDLRKRLKERGAGPAIDELMRALNLKSRPERIEGFDIAQLDGKHPVASLISFKNGVPDRKNYRYFKLRTVIGIVDDFASMREAVKRRYSRLIREGKELPDLILVDGGIGQVNAAKGVLDELGADCGLVGLAKREEELWLPAAKEPLVLSRQSEALKVLQHVRDECHRFATGFNQRLRSKDLFFPILESVEGVGPKRAAAIMKEYGSIANIAVAQPSEIAERCQISENTARAVRAVARLEADSIKLG

SEQ ID NO: 91576 - protein, 366 aa, Unknown
  Obtained from environmental sample
  DOMAIN (22)...(366): Carboxyl transferase domain
  misc_feature (1)..(366): Xaa is any amino acid
VSEKFEQLKEIRKKVEEAGGQKRIDKQHESGKLTARERIALLFDEGSFVELDAFVKHRCVNFDMATTEAPAEGVVTGYGKVNGRLVYAYAQDFTVIGGSLGQMHAAKICKVLDLSAKMGAPMVGLNDSGGARIQEGVDALSGYGQIFYRNSVNSGVVPQISVIMGPCAGGAVYSPALTDFVFMVDKTAHMFITGPQVIKAVTGEDVSAEALGGAMTHNKVSGVAQFVSPGDRECIAEVKRLLSFLPSNNRENAPCYQAPSGVNDVIVELNDIVPVEPKKGYDMKEIIKKLADNADMMEVSPHYALNIITCFIRINGKTVGVIANQPSWIAGCLDINASDKAARFIRTCDCFNIPILNLVDVPGFLP

SEQ ID NO: 91577 - protein, 327 aa, Unknown
  Obtained from environmental sample
  DOMAIN (5)...(322): NQR2, RnfD, RnfE family
  misc_feature (1)..(327): Xaa is any amino acid
MTDMELILKQNPLVNISRPTAARMWLVAICAFIAVLQSAIGDSLLSLIIASVALVSALLTELLITYKTHGFRKIKDGSAAASALVLALLFPNQIHPVYAALSAVFAIAVVKHSFGGLGANWMNPALGGWLFARFSWPQAFSIALNGSINSLDESGTAVGNMVNSSLNRTIFSFLGSELPPGYIDLFALKTPGIIADRAVLVLVLATAVIAASQISRSWLSFVYLAVFGLLTRMLGDITLWNGDVIYAFLSGGTLVTAFILITDPSTGAKSMPGGVIAAVLAAILGFVFRFYGREFFGCIYAAALVNILIPLLYKAERRLLYPVKEAA

SEQ ID NO: 91578 - protein, 456 aa, Unknown
  Obtained from environmental sample
  DOMAIN (358)...(448): Anticodon binding domain
  misc_feature (1)..(456): Xaa is any amino acid
MSELTEYTGKATMEKITSLAKRRGFVYQSSEIYGGQNGAWDYGPLGVELKNRIAGAWWKEMTRLHDNIVGLDAAILMHPRTWEASGHVENFTDPLVDCKKCKSRFRADQIPQENLTAKKCPDCGGELTDTRKFNLMFKTHIGPAEDTASIIYLRPETAQGIYVNYKNIIQSNRMKIPFGIAQIGKAFRNEIVTKNFIFRTCEFEQMEMQYFVKPGTDEEWFSEWRKQRWAYYEKLGVKMDHLRWHQHGPDELAHYAKDAYDIEYLFPMGWRELEGVHNRTDYDLGRHTQFSGKDLQYIDQDNNNERYIPYIIETSAGLTRNLLMVFCDAYDEEKVADKGNEDDWRTVLRFHPDLAPITVAILPLMKKDGLAELAQDIRAELKEDYATDYDQAGAIGRRYRRQDEAGTPFCVTVDYQSKEDGTVTLRFRDSMEQVRIPKAELAARIRSEIKAYKRIK

SEQ ID NO: 91579 - protein, 71 aa, Unknown
  Obtained from environmental sample
  misc_feature (1)..(71): Xaa is any amino acid
MNEYVILLTWDDEASVWTAVNDDIPIALESESLDTLIERVRKATPELLELNDKKHTDITLHFSMEYEKVVA

SEQ ID NO: 91580 - protein, 168 aa, Unknown
  Obtained from environmental sample
  misc_feature (1)..(168): Xaa is any amino acid
SVTTIEQEAFKGCENLVSVKMPNRITVIRDSVFSECRNLTDITIPDSVTGIGLDAFCDCYNLVSVTFKGKIKREFKNKTDEEKANYRKIKYYADDDEENVNYKKFEYFDDDDETEDINDYFISVFDGAFIGNLHEKFYEEDAEYGTPGTYTAEASAPLYHGTGWIRQP

SEQ ID NO: 91581 - protein, 97 aa, Unknown
  Obtained from environmental sample
  misc_feature (1)..(97): Xaa is any amino acid
SFAGSNNVDDVAWYYNNSDKSTHEVGTKAPNGLELYDMSGNVSEWIWERYKFCGGSTDVSLNTLYSTNGCRIVKWGATSSPTTENDCLGFRIVRPAD

SEQ ID NO: 91582 - protein, 58 aa, Unknown
  Obtained from environmental sample
  misc_feature (1)..(58): Xaa is any amino acid
MSAKKYLNENVYEASVARIDIIFKKFEKIYLAFSGGKDSGVMLNLVVDYMKKHKITKK

SEQ ID NO: 91583 - protein, 328 aa, Unknown
  Obtained from environmental sample
  DOMAIN (94)...(253): Mur ligase middle domain
  misc_feature (1)..(328): Xaa is any amino acid
MQVPVGILGYGTEGKSTQKFLQEQGIENILVFDKKDGENYLENLPKCQTIVRSAGVYPLQKEILNAQMKGAILTSQIELFFEIMQHDYPHIQIIGVTGTLGKGSCVSMIAHCLNTFNIPHLIGGNFGIPALDLLQNKDLFSNNNTVIILELSSFQLMTLGTSPHIGVVLQVTSEHLDWHTSVEQYRDAKANLVRWQKRSDFCIYNATSEGAVQIAMLSRGIKKPFNSLKILLDEFKVIGAHQLQNMAAACLVLECLGMDTNICLNALKLYEGLPLRLQNIGTKIYKNKTLTFYNDSYSTRPEATIAAAKAMNKPFTLILGGSEKHADF

SEQ ID NO: 91584 - protein, 590 aa, Unknown
  Obtained from environmental sample
  DOMAIN (19)...(104): OB-fold nucleic acid binding domain
  misc_feature (1)..(590): Xaa is any amino acid
MKRTHNCGELRKGDVKKTVTLCGWVDRRRDLGGVIFVDLRDKYGKTQIVFNPEWNAEVHKLADTLRNEFVIQVTGEVQNRPAGMENEKISTGDIDVKINELVILNKAETPPLEINNAKEESKENDDLRLRYRYLDLRRPWIQKNLMLKSRFLGEAHAFFRKNGFEEIETPVLCKSTPEGARDYIVPSRVNPGKFYALPQSPQQYKQLLMIAGMDRYYQIAKCFRDEDLRADRQPEFTQIDLEMSFVNQDDVMELLDGFVKEVLAHIWEFEIGEIPRIKYADAMLTYGSDKPDLRFDLPIFDVSDIAANVDFAVFKNAVANNGVVRGLAAKGCVDFTRKQIDDLTEFVGRYGSKGLVWMRVKDNHEVETQVAKFFTKEQLEALRNAIQGKTGDMLFFIAGSEKVAATAMGHLRLEIARIKGLMDPKLRKFAWITEFPMFEYSDTEKRYMSMHHPFTSPLPEHLDMMLGGNLKDCNAQAYDLVLNGVEIGGGSVRIHNPEVQEKVFRLLGLSEEQVKQKFGFFVDAFKFGAPPHGGLALGLDRVVATLEGQDSIRDFIAFPKNTSASSPMDQSPSEVDPIQLLETHISLNIS

SEQ ID NO: 91585 - protein, 48 aa, Unknown
  Obtained from environmental sample
  misc_feature (1)..(48): Xaa is any amino acid
EKRLGISVLGDVHEAFMKSTIPFRVDVLDYNAVSEKFQKLIDAKYEVI

SEQ ID NO: 91586 - protein, 460 aa, Unknown
  Obtained from environmental sample
  misc_feature (1)..(460): Xaa is any amino acid
AKNPKSLAFAELADLLRMASSGDKQKLDEALLTANNGLEANSDFLPGRLVRGRILLEKGDLAGARADFEVVAEHDSFCSSAQKLFLETSEKLGQSVETEVYQKILGTLEPGVVVKVKVKTESGGGGGVNAALDDLLSEDDNVVDKEDNVISDLLLQTFTNIFEPSKQEQPPDLVPYAPPTPKSQPAPKPQPAAAKPPPAPKPAPDIDALINEQLASKVEDIPDLTGDMDSLLASAPEVLSASGTLSAGPPDLDALINEQLASKVEDIPDLTGDISSLLASPNLEPSLSASYSKNNQSQSSIDVDALIKEQLSSKVEDVPDLTGDINSLLVSNTPSSPSVPNIDDLVNEQLASKVEDIPDLTGDIDSLLASSTPSSSNVPNIDDLVNEQLASKVEDVPDLTGDIDSLLASMPSGSAEPELMPYVPPTKADIQLAHKPTVTLAELYMDQGLPQKAMEFIRSY

SEQ ID NO: 91587 - protein, 394 aa, Unknown
  Obtained from environmental sample
  DOMAIN (63)...(160): Glycosyl hydrolases family 2, immunoglobulin-like beta-sandwich domain
  misc_feature (1)..(394): Xaa is any amino acid
IGTHDGASTPFNADITDIVKEDNRIVVSVDASRSPVRVPMHNTDWFNYGGIYRDIYLVRLPSVYIKDWFVRLAPDGKYSTVLADVYLAGADGASVNGEVRMEIPELGICQDIPVESGRGEASVSVKPELWSPENPKLYNVIFTYNAGSYIDTTRDRIGFRTISVNGQEIFLNGQKIFLSGVCVHEDHFASGKTTSEEIIRATIRDLKDMNGIYFRLAHYPHDARFARIADEEGVLLWEEIPVYWAIAFDNPETYNDAENQLAELILRDRNRASVIIWSIGNENADTDPRLEFMSRLAKKAKMLDSSRLVSAACLIKHEKLKIEDRLADYLDIIGINEYYGWYDPDFEKLPKILTNSNPGKPVLICEFGGDARLGQRGTTDELWTEDKQKRIYEQ

SEQ ID NO: 91588 - protein, 66 aa, Unknown
  Obtained from environmental sample
  misc_feature (1)..(66): Xaa is any amino acid
MKTPGFGAHGHIAIKTNSLSRATAYLERAGIAFDYESAKKDTKGNITALYLKEEILGFALHLVQSK

SEQ ID NO: 91589 - protein, 213 aa, Unknown
  Obtained from environmental sample
  misc_feature (1)..(213): Xaa is any amino acid
MSIKNTVIIGLTIMLLAVSCSANNGREITDRTGKTVTIKNQINRIVSTAPSNTEIITDLGQAHKLVAIDRHSANVAGLPEGLTQLDFFYPDAEAIIKLEPDIIIASGHNPTGTGEDPFKLLRKVGIPVVYISMSASIDEIYNDIAFIADILRVQKEGEKLIGSMKAQIDEIAQRAAGIENRVTVYFEISAAPDMMTFGKGSYINDMISVIGAK

SEQ ID NO: 91590 - protein, 192 aa, Unknown
  Obtained from environmental sample
  DOMAIN (1)...(188): RecF/RecN/SMC N terminal domain
  misc_feature (1)..(192): Xaa is any amino acid
MLEELTIQNLGVIARAEFPLAPGFTALTGETGAGKTMILNALALLRGGKSDPALIRTGADELVVEGRWEAAPWSGALEVVAEAGGIADDDGAVITARSVSKTRSRAHLGGRSVPAATMAEFTADLVTVHGQSDQTRLRTPARQRAALDAFAPQTHRETLADYQKAWELRGEVARKLESLTKERHSRQQLATL

SEQ ID NO: 91591 - protein, 462 aa, Unknown
  Obtained from environmental sample
  DOMAIN (54)...(170): Histidine kinase-, DNA gyrase B-, and HSP90-like ATPase
  misc_feature (1)..(462): Xaa is any amino acid
MSKIEANKFELAPIEFDLEKMLQRVVNVVNFRIDEKHQKLSIHIDRAIPRMLIGDDQRIAQVITNLMGNAIKFTPENGSITLDAQLAGIGNEICTLQISVSDTGIGIKPEQKERIFDSFEQAESSTTRKYGGTGLGLAISKKIVEMMGGTIWVESDPGKGSTFSFTAQLERGTNGTHALLSDDINLDNLRILTVDDDPDILTYFLEIAQSFGIMCDVSISGEKALELINQKKGYHIYFIDWKMPGIDGIQLVREIKGINTAGQHVAENPVVIMISAAEWGVIADEARAAGVDKFLSKPLFPSTIAEVINECLGVDKKQAEKSQDADIAGIFEGRHILLVEDVDINREIVLTLLEPTKLEIDCAENGVEAVRMFINAPNKYELIFMDIQMPEMDGYEATRHIRSLDNPKAKTVPIIAMTANVFKEDIEKCLAAGMNGHIGKPMDFEEVIKILRSYLGLKKDEV

SEQ ID NO: 91592 - protein, 231 aa, Unknown
  Obtained from environmental sample
  misc_feature (1)..(231): Xaa is any amino acid
MDTSISSIICIADMNIIPALDQVLTELAIPEVFVQRAKQIFLQDKRGFLGLRPVTKLEESRALIYRMYVPAMYEESVMRRIIEATDLGIGGRGSIFSHYISLSRGTPPSFDMEKLDKLCVKSDKMIHEEHALITCTVSRGSGDALARAVLELGIGVPVVFYGTGAGLRDRLGLMRITIPIEKEIIWFVVPRSDAELVEKNLIPRAKLDVPGNGFLYQCYVHAPVVNLRIRH

SEQ ID NO: 91593 - protein, 497 aa, Unknown
  Obtained from environmental sample
  DOMAIN (1)...(497): tRNA synthetases class I (I, L, M and V)
  misc_feature (1)..(497): Xaa is any amino acid
RRFGWDCHGLPIETLIEEELKLNSKTDIEKFGVAKFNEACRASVLRYVKEWRQTITRLGRWVDFDNDYKTMNSDYMESIWWVMKTLWEKGLLYEGHYILPYCPRCSTVLSNHELNLGGYKDVHDPAITVRFKVLGNGELGVGSREGASKLLIPPNTYLLAWTTTPWTLPSNLALTLGSDIDYVLIEDIPTPHSPHPTPHDHYILAEARLPAYYKNDTEYKIVWRKKGAELKGIQYEPLFPYFKDAPNAFRTFLGDFVTTEDGTGIVHTAPGFGEDDARVLKGTGIPVICPVDAECRFTQEVPDFAGVFVKDADKAIIEKLKNEGKLVKRDQILHSYPHCWRCSSPLIYRAVGSWFVSVEKIKKDMLDANSQIYWIPEHIKEGRFGKWLEGARDWAISRSRYWGNPLPIWRCPDCGKTICVGSRAELKELSGVYPDDLHKHFVDEIKIPCSCGAKMTRIPEVLDCWFESGAMPYAQNHYPFENKEFFDSHFPSDFISE

SEQ ID NO: 91594 - protein, 523 aa, Unknown
  Obtained from environmental sample
  DOMAIN (7)...(521): Protein of unknown function (DUF1703)
  misc_feature (1)..(523): Xaa is any amino acid
MGIDINKKQLPIGKSFFDNVIESGSYYVDKTLFIKDLIDKNAAVTLCTRPRRFGKTLNQTMLKCFFEDTAQIGGKNTRTLFRGLKIEEAGERYMEHQGKYPVIFLTFKETKGEDFKETCGIFKDMLSTEFRRHGYAKEKLGDTIDLKKFESLSSGEGDISSYKESLKFLSMCLEKYHGKKVIVLIDEYDVPLENSWSCSPRFYDEMVSFISPLLGSVLKDNPHLQFAVMTGCMRVSKESIFTGLNNLQVISILDKYYSEYFGFTQAEMDNMLEYYGLFEKRQIVRDWYNGYLFGNTEVYNPWSSVFVVDNWLADINELPKPYWANTSGNSIVRDLIDRATVEMKTDIETLMTGGTISTIVREDITYKEIGDNVENLWNFLFFTGYLKKVGNKRMVGVQTFLDLSIPNLELLYIYETQIQEWFNKQITIKSLDILSAILDGDTETFQRELSTLLSESISYMDNAENSYHGFMVGVLGVLSRLNGYMVVSNRESGDGRSDMVLYRINGNESRAVIFEFKVAKELT

SEQ ID NO: 91595 - protein, 298 aa, Unknown
  Obtained from environmental sample
  misc_feature (1)..(298): Xaa is any amino acid
MNMKLIFLLRKNIFTALFVFIVGVSLYAQSGGNTALIGKWALVEGPTRNNPENMELWADGTGIVDRAEISWRTAEGRFYLTHPLLTASWSYQVSGTTLTFTDNNGTILKYNKMSNSSSQEYDPESVFRAEPVSGGDSVRITGYQGSKWAVRIPPSIQDLPVTHIWLGAFRDKKLISVTIPNSVTHIFDAAFADNQLTGVTIPGSVTSLGQYAFFNNQLTSVTIPNSVKEIEAGTFARNKLTSITIGAGVELAIYKNFDEFNIYPSFDNGFEEAYINGGKRAGTYTRSDINSTAWTRQP

SEQ ID NO: 91596 - protein, 524 aa, Unknown
  Obtained from environmental sample
  misc_feature (1)..(524): Xaa is any amino acid
MKTKNVLPIERHGYDFIPAEYLPPGADEYWQRNAQQTELFSKNKDSWRRLKPEEIEVLSQNKNYCAKWEDFLVTDPFDPSLICDSNFYGLVRIGSLQNVLLKHHDFCIPAGIRNSTIISCDIGNDTAIQNCAFVCNYIIGNNCILSEVNELQTTNHAKFGNGAIKDGEDEEVRVWIDVMNEAGGRSILPFDKMIAADAYLWAAYRDDTELTVKLAEITQKQYGGYRGSYGIIGSNAVIKSCSIIKDTMVGECAYIKGANKLKNITIQSSADEPTQIGEGVEMVNGIVGYACHVFYGVKAVRFVIGRNCNLKYGARLIHSVLGDNSTVSCCEILNNLIFPVHEQHHNNSFLIASLIQGQSNIAAAATIGSNHNSRANDGELRAKRGFWPGLAVTLKHPSVFASFVIIAKGEYPSELNIPLPFSLVANNVHKNRLELWPAYFWLYNLYALERNSWKSKARDRRVVKLQHLETDYLAPDTAEEIISGLSILEGWLADAGYSSTDLTGMEGAHEIRMIPCRHLERGKR

SEQ ID NO: 91597 - protein, 437 aa, Unknown
  Obtained from environmental sample
  DOMAIN (202)...(285): Cache domain
  misc_feature (1)..(437): Xaa is any amino acid
MKIKTRILIQTLSASLALILVLGLVFFISVAGIRRMVIANSNDLGGSSAEISGHTLEVRLTEMINRVAGDMALILDERMNKIENHTRMTADITGSFYTAGQGWSPKPLPRISAGEIPPPWPHMYIPPGVDYSRIRAEAELAGNISEMLRQITVVDRGIATTTITGESGYVIAMDAYPWPWADYDPKKFQWYKAARDTEGLYWTDVYEDHRGRGPVITCAVPFYEQSGGNRILRGVARSTVMLSDFSRIIESTEAGKSGRLFILNREGIKFYSSEGAAITVGEGGAVTGDNFLESQNPRQRSLGYSMVLGATGMTELEMDGLPVYVAYAPIRTLGWSLGVAVSVQEVSAMAMLIENQIWKITDNTKAGMDRYIFLSACLIALLLVLTLLGIAAFAIRFTRSITGPILALNDGVREVAGGNLERAVTVKTGDELEQLAA

SEQ ID NO: 91598 - protein, 76 aa, Unknown
  Obtained from environmental sample
  misc_feature (1)..(76): Xaa is any amino acid
CLPGKTDFENAIRLAVSIGGDSDTIACITGGIAEAFYRNIPDKITDNVLKILPGELISIIEEFCSACLKSAQDVPG

SEQ ID NO: 91599 - protein, 354 aa, Unknown
  Obtained from environmental sample
  DOMAIN (107)...(274): GTPase of unknown function
  misc_feature (1)..(354): Xaa is any amino acid
MEEREELEQLRQSLDMIKSIVSAKDDSSQRNNVEKADRVCGFIYDFAEGLYKECLVYINAMEEELFHDSGKIINWSEQDIDSRVDALQRKAIELARLERKTWLKNKTAVAFIGGFSSGKTSIVNKLLGEEHQMPVDRRATTAVATYVSYSPIGMVKFARIDHTVKCLDDSDILKKFTKFNDALKDFPTSELVRNFIVEEDNPMLEKLPNISILDTPGFENDKEDTEKAMDVIDETDAVFWVIDINKGDINASSLNIIKEYIKRIPLYIVVNKIDLKSPDERKDVYKRVRETLSKNDVDVIGIIPFCRTMDIKDITDVIQSVEPRKSKNSEELFAFIEQEFTYIIGRLQDRYVSC

SEQ ID NO: 91600 - protein, 337 aa, Unknown
  Obtained from environmental sample
  DOMAIN (130)...(303): Integrase core domain
  misc_feature (1)..(337): Xaa is any amino acid
MTRFREILRLNSQGISNRIIAVSLECSRNTIRSVLERAKELDIHWPLPDNMSDRALEEALFGKRPISKKCKIPDFEFIHQELAKNGVNLSLLWNEYCETCRMEGSRPLMYTQFCYHYQEFAAKNKATLHIEHKPGERMEVDWAGDTASFADNVKGQPIAVYVFVAVLPCSGYAYAEGFLNQTMESWITAHVHAYEFFGGTTRLLIPDNLKTGVEKADWHSPVINKTYHEMAEHYGTAVIPTGVRKPKENASVERAVGMLSTWMIAALRNRQFLSLWELNEAMRQKLSDFNRKPFQKKPGNRESTFAEELPFLMPLPQKPFELSAWKIATVQLNYHIG

SEQ ID NO: 91601 - protein, 303 aa, Unknown
  Obtained from environmental sample
  DOMAIN (148)...(169): MORN repeat variant
  misc_feature (1)..(303): Xaa is any amino acid
KQKIFDIDKNIDKNINKNINKNINKNINKNKKINKIQNKTERGTSMRLKSVITICGMLTLAIGTYNCGGGGGGGSLKEVTEETHPNGAKKKVSYYGSGNSLARTTFFFPDGTTQSDQFFKNGQPDSTKIIYNQDGKPNKLSTFSNGKPNGPEKSWYPNGNIKSEAEYADGVPVGSSKIYFEDGAVELEVNYREGKKDGEEITYYADGKKKRVRTYVLGDQDGPQIDYYETGAIKGEQVFAKNALNGPFKTYHKDPKGAQGKVEESGTYVNGKYEGERFQFDKNGKKISRAVYKDGVMDFGERF

SEQ ID NO: 91602 - protein, 432 aa, Unknown
  Obtained from environmental sample
  DOMAIN (140)...(431): Alpha-2-macroglobulin family N-terminal region
  misc_feature (1)..(432): Xaa is any amino acid
VPLEYQKNYNVRIAAELKDLYGRSLGRAQKIEAKTGEASSYVYIHNWGPRMLEAGYPPKIVWEAQNPVMLRKLIAPAQNPYERLPLKNLVNADLSKRFFMEDLSPFLNAAGKGTAALRWEYQTKSSWQPGKIDKNDSWLTVQVTNIGITLRYAYNMALVWASHLSDGTAAANADVELLEGEKVIVSGKTDAQGLAVFNFSAGDFISRFTEPQNNYWSNEYSAKGLRIRVSEGKGNSLDRAEFIPNDSHNLWRFDIKASASPFTAERERPVIFLFTDRGLYRPGETVTFRGIDRNIRQGNFEAYQGPYQIEVNTGEYQAPMIASLNGNSTPNGGTYGSFTLPANIDPGQYRIIYRRAGQNRSVDEQKNPAPFDKQHIETSILFTVASFERLRFESSLRFSDIPVYHGEKLNASLSASYLAGGGLSGAPYTWHL

SEQ ID NO: 91603 - protein, 182 aa, Unknown
  Obtained from environmental sample
  misc_feature (1)..(182): Xaa is any amino acid
MDTVTLDRPPPTGEGLTFEKVWAMFQETREQMKETDRKIGELSNRFGELAEHLVAPAIHERFNELGYHFSGVAAGGYVVRDNNGKTLTEVDILLENDNYIMAVEVKAKVHINDIKHHIKRLEILKEHRNKHHDTRKIQGAIAGAIFGNAEKKAVIKAGFFVLEQSGDTVKMEIPEGFVPREF

SEQ ID NO: 91604 - protein, 497 aa, Unknown
  Obtained from environmental sample
  DOMAIN (42)...(226): Peptidase M16 inactive domain
  misc_feature (1)..(497): Xaa is any amino acid
MEEYRTRLGAWERLRQKWLPALFRGSPYANRMPIGLPEIIEGAPASRLEGFYRKWYKADNMALILVGDFDGAALEASLTDHFLIEKPAEPVNRPLYDLPPPKKGNVEVLTLTDSELTAAYINLYFKRDPQARRDDLAYYRGEIIDYLIDTMLSLRFEEALLKPETPHVSVNAGTVSYAASSRFYVLLSQPKTGNAEASLEDLLRIKETMLRYGFTDSEIKTAADTLVSDLQKLVQEKDKQQSHKYINSLTDYYLKGGNYADVEWEMDAVSRMLPHIKARDINAVIKDYFASGDIQVFIFAPDSEQDSLPDEARIKQMIAESKKMKISAPKSKAVERGLLSSLPERGAVVSESIDAETGAILWELSNGSKVVLKSTKNKNDEIVMHAMALGGTSSAAPEDDVSASLAIEMAQVSGLGPWSRPELTIKLAGKQVSLSQYVYSYYRGFRGSSNLGDLKTFFEMIYLSFTAPRIDSEAVQAMIDQYKTSLALRREDPHAVF

SEQ ID NO: 91605 - protein, 287 aa, Unknown
  Obtained from environmental sample
  DOMAIN (1)...(270): ApbE family
  misc_feature (1)..(287): Xaa is any amino acid
IIDPNADGENAVSTLVSGVLAINRQAGIAPVKVRADLILVLETALRYAELSGGAFDPTIGPLVKLWDIGTESQRIPSNEEIAAALELVNYRDLIIDRNAGTAFLRRTGMEIDLGAIAKGYAADEAARIAREGRVKRGIIDLGGNIFALGWRNERGSVPWRIGVQNPFSDRGESLGALAVHDTSVVTSGVYERFFESGGKRYHHILSTVDGYPADNGLLSVTIVTERSMEADALSTAVFAMGYEKGKTLIDSIPGAQAVFVFADRSVKITEGLSGIFTLTNDEFRIRN

SEQ ID NO: 91606 - protein, 299 aa, Unknown
  Obtained from environmental sample
  misc_feature (1)..(299): Xaa is any amino acid
VTIRAVPKSGYVFDKWTGGRVADAGSAVTAVVMDSNMTITANFRPIAYGMLSDKRDGRTYKTVKMPDGMVWMAENLNYAPSEGNGWIYRNNTAYSDKYGRLYDWPTARTACPEGWRLPTRQDWNRLGAAVGGKQRVDSDGNITWRGAGRRLKAVSGWGKYNNRGSGDWNGTDDYGFSALPGGYLCGAECYGGGYYGAGDDYTLSSTESGNWWADSPAPKTKRGGKQAYYRRIFYNSVDLKENNTYMSDGRSVRCVTGADGFAASTGAASYSLTVKAANGGSVTIKSVKTAYTSGEKVSI

SEQ ID NO: 91607 - protein, 171 aa, Unknown
  Obtained from environmental sample
  misc_feature (1)..(171): Xaa is any amino acid
MAITADFNKSKAPPVVYGSLTDARDGKKYETVSIGGKAWMAQNLNYETPDSSWCYGDSAVNCVKYGRLYAWNAARTACPAGWHLPTVQEWDALVKAAGGEKTAGAKLKAASGWNFFGNGWIRTGNGTDDYGFSALPGGKRTGDFYDVNREGYWWTATEDEKQDGRAHYREM

SEQ ID NO: 91608 - protein, 59 aa, Unknown
  Obtained from environmental sample
  misc_feature (1)..(59): Xaa is any amino acid
MLPMTYCLDLTRAVVYAGTPEYDHVVMFNPFINCVVIVALTVLCLIIGTFFFARSEKNR

SEQ ID NO: 91609 - protein, 124 aa, Unknown
  Obtained from environmental sample
  DOMAIN (7)...(73): ATP synthase alpha/beta family, beta-barrel domain
  misc_feature (1)..(124): Xaa is any amino acid
MANKGYITQVIGPVVDVRFEQGQIPLILNALKVKTDRSVTLEVLQHIGDNRVRCVAMSAAEGLSRGLEVEDTGKPISVPVGKEVLGRMFNVTGEPIDDKGTFSAAQYESIHRNAPGSANSVRRL

SEQ ID NO: 91610 - protein, 506 aa, Unknown
  Obtained from environmental sample
  DOMAIN (23)...(91): ATP synthase alpha/beta family, beta-barrel domain
  misc_feature (1)..(506): Xaa is any amino acid
MANYDDLTKVLKERIENWKGQASSGSSGFVVQVGDSVATVYGLNDAVYGELVEFASGAQGIVFNLEEENAGCVILTGEELVKDGEEVKRTGKVVSIPSGNAFFGRVINPLGETLDGKGPITAEVFMPMEAPAAPVIDRGSVDTPLQTGCVSIDAMIPIGRGQRELIIGDRQTGKTAIAIDAIINQKGKGVTCVYCAIGQKSSSVAAIVKKLEEHGAMEYTFVVLATASDSAALQYIAPYAGVAMAEHFMHQGKDVLIVYDDLSKHAVAYRTISLLLRRPPGREAFPGDVFYLHSRLLERAAKLSPEKGGGSITALPIVETQAGDISSYIPTNVISITDGQVFLDSELFNSGFRPAIDVGLSVSRVGGAAQSKVIRGISGRLRLDLAQYREMAAFAQFGSDLDKATRDKLAQGERLMEMLKQAQYSPYPLEQQAAILFLAINGFLMDVAVEKTAPCITAYLEYLHLNHADLMRNIGETGKFSPEQEKELRDAIDKFKSSVWKPADRG

SEQ ID NO: 91611 - protein, 618 aa, Unknown
  Obtained from environmental sample
  DOMAIN (354)...(574): Methyl-accepting chemotaxis protein (MCP) signaling domain
  misc_feature (1)..(618): Xaa is any amino acid
MNNKKYTFLALIIGTGLAMIAADFLILLFFENTFSQLRFRFGLPALLFLALYCLILGRGARYFDYTWFTKLDGEHYLLWLKKIGAVPIKRIALNVVSHAAFLGIVFSGNYLGINPSIKVTLFLAALSFGMLVGTFVYVAGDGLVSSTLLAHNFTRYPNDCREKRQEAKAWIVPIAAILVTLCFTYSVTMLGLHKAGVSLDVMKGSAMSSILIPLVVFFISISALALTLKKNIGTLYTSVIAQLENLSSEQKDLTKRISICSVDELGTIAGMVNAFCEHLGGGIKNIRSETDVLSGIGNALSSNMNDTAAAVNQITANVQSIKSLILNQSAGVSETHATMEQLVVNINKLNNHVGNQSGDISRVSSSIEEMIANIDSVTGTLVSNAGNVKTLQDASEVGRAGLHEVAADIQEIARESEGLLEINSVMANIASQTNLLSMNAAIEAAHAGETGKGFAVVADEIRKLAESSGEQSKTIGTVLKKIKGSIDKIKHSTENVLNKFEAIDSSVRTVAQQEENIRNAMEEQGTGSKQILEGIGRLNEITRQVKDGSNEMHEGAKEVIRESENLEKATQEISSGMNEMAAGADNINSAVNHVNEISGRNREAIDVVIKEVSQFKAE

SEQ ID NO: 91612 - protein, 340 aa, Unknown
  Obtained from environmental sample
  DOMAIN (9)...(340): AMP-binding enzyme
  misc_feature (1)..(340): Xaa is any amino acid
MIYNPTAECMDEEARKKLQLANLKNLVETLYTKVEFYRKKMDEMRLKPADVRSLKDIEKLPFTTKDDLRINYPHGLRACPPDRIVEVHMSSGTTGKPVVNEYTLKDIDIWRQVMARTLSGAGCTRDDIVQNCYGYGLFTGGPGAHYGALTIGAEVLPMSSGNTERQLMVMSDFGSTMLTCTPSYALYLAEEAAEAGIDLKKLPISKGCFGAEPWSENMRIEIESRFNMKAYDIYGLTEIIGPGVAFECEAQNGMHINEDMFYPEIIDPATGKVLPAGEKGELVFTTLTREGTPLLRYRTRDITYLMEEPCSCGRTTVRMHRLFGRTDDMLIIRGVNVFPS

SEQ ID NO: 91613 - protein, 279 aa, Unknown
  Obtained from environmental sample
  DOMAIN (8)...(268): Glycosyl hydrolase family 57
  misc_feature (1)..(279): Xaa is any amino acid
MSVSLSPALCHMLTDELLVKRYLEYTDKQIDFGDQELHETGDDPALNSLVKFYYDRAIEKKAFFTERCESNILKAFDHYQKKGRLEILTTAATYAFLPFYTEYAEAIQAQFEAAISVYKANFGRYPQGFWLPELGWKSELDSWLRAYNLGYTIVDTHALAFARPFAEKGSFYPVKTPQGIIVFGRDFYSAEDMTKIARDPVYRYNFRDQGFELPAKRLGPFLGPQGNRNSTGYKYWALGEDSSGGVLYDREKACRKAESHARSFLDGCVSRLRTASGLM

SEQ ID NO: 91614 - protein, 286 aa, Unknown
  Obtained from environmental sample
  DOMAIN (73)...(189): CBS domain pair
  misc_feature (1)..(286): Xaa is any amino acid
MLPFTLPTIKFNSFFNSKVRPEIDDSNITEEELHDELRNTLIEGEKSGVVENGERGMVEGVFYLGDRPVRAFMTHRSEIQLLDINAPYDEIRAKAVEYREQRCFPVVNASPDEIVGAVYTVDIILDYALDAPLGLRAIMKKALFVPETMPAIKAFESFKQGRSNFLFVMDEYGGLSGLLSITSLVEEIVGELSVPAASEKPLLKQEDGSFLADGTLNIDDAAKALGLTGFGEEKDFHTLAGLVLNIAGELPRVGDSFNYQGYKFKVIDKDGNRIDKILVTKLPVKE

SEQ ID NO: 91615 - protein, 143 aa, Unknown
  Obtained from environmental sample
  misc_feature (1)..(143): Xaa is any amino acid
MTETQPNRNHKDSVFTCLFSEKSNLLELYSAISGKSYPESTKIEIVTLSDVLYMNQINDIAFVMEDRLIVLVEHQSSINNNMPLRMLQYLSAEYDMIIDRKSLYKQKRMMIPAPEFIVLYNGDKKFPDYKELKLSDSYRLKHQ

SEQ ID NO: 91616 - protein, 79 aa, Unknown
  Obtained from environmental sample
  misc_feature (1)..(79): Xaa is any amino acid
SILDSINADYLLIDDKKARTIAEEMSIACIGTIAVLIKAKSKGIIKELRELFIEMMNKKRYYSVDLLNKVLLANDEKII

SEQ ID NO: 91617 - protein, 397 aa, Unknown
  Obtained from environmental sample
  misc_feature (1)..(397): Xaa is any amino acid
VIDDIASGKALKSQFSSSDDLTESYILSPPDRVVAEKKSDNTVTVKWEPAIGSEGERLLYTYNVYADRSISGSFTTLVRSGFSSIVDGEGFISAEGLSVSSGAFFKVSTVNGDVESGKSAVVLPTPAAAVIQGATQRAYFTGASAVPNSGGVYPVKITWKKPADEEPEFYNVQRSTRSGGGFSTINETALSASGPYNDVYSYDSATGVYTYTDKNEIAKVGRKFFYRVLSLNELKQGNFYSVEAIGYGALTHEQFIIEYNKTMTAALKKLTYMNKPGSTEKLGTETKNGAISGTIYYNAAMEGLGARIIIKLDNYADYYIDNDPDKGVYFILNGNSNTSAKMDSSGTMDGTVTCTGMYPGKISYDRIQIKGGGAGGGTYGVEPDGGGRREITFSILN

SEQ ID NO: 91618 - protein, 328 aa, Unknown
  Obtained from environmental sample
  DOMAIN (286)...(319): Tetratricopeptide repeat
  misc_feature (1)..(328): Xaa is any amino acid
MIISGMLRVISSPETIILQGISSVLGTTGVPHEWIDYYRRFVLAVKPEIYHEFTSASIIKARNGEFAMALEINAVLEGLFPGSPGVLLNKALILEDRAAALEKKGREADRENAEALQAYETALSMEPVLPDTLFNAGFFFLHRNSFARARDCFLLYIAEGEKSDIPEDKKKQAEKIIKDLGNFDDNSFQEAYDCVNKGKDEDALKKIRALIEKYPKVWNGWFLLGWTLRKLKRYGDGLESLKKAEELGGTNSDVKNEMAICLMELGDLKGARKELEKALYDEPENIKIISNLGVLALKAGKREEADAFFRTVLELEPEDALARRYLEH

SEQ ID NO: 91619 - protein, 617 aa, Unknown
  Obtained from environmental sample
  DOMAIN (1)...(425): DNA gyrase/topoisomerase IV, subunit A
  misc_feature (1)..(617): Xaa is any amino acid
RAIPDLEDGLKPVQRRILHSLFEMDDGKFHKVANVTGHCMKYHPHGEASINPALVVLANKELFIDRQGNFGNLFTGDDASAPRYIECRVTPLAKDIFYNPKLTTWADSYDGRNKEPVLFPAKIPVVLVMGVEGIAVGMSTKILPHNVLEVLEAEIACLTGKKFELYPDFPTGGYVDVSAYEDGNGKVLVRAKMDTSDPKRILITELPFGSTTESLINSVDSAARNGRIKILGINDFTTDKVEIEIKLARGVYAQETIDALYAFTECEQSISVNLLVIKNGLPAVMTVSEIIKYHAKQLVKILTKELELEKKELLDKLHLRTLERIFIEERIYKAIEKMKTAKGVQEAVLTGFNPFLKEVGPRKITDDDIEHLLRIPIRRISLYDINKAREEMEQIQARIKEINNHLKNITAYSVSYLKGIITKIKANEEIGRGERKTLVGEFDKVIAKEVVKRDVELKYDSKTGYLGTNVSGAKIAEVSPYDRILAIRKNGMYTVMDLSEKTFIGAEAWFIGAADKDILSKTIFTIIYKEKDTGYPCIKRCVIEGWIMNKDYFLVPDGAEVLHIDIKPKFTFTVKYKPKPRLKVLSETFKAQDYNVRGLKAGGIRLSAKEAEKVSDV

SEQ ID NO: 91620 - protein, 280 aa, Unknown
  Obtained from environmental sample
  DOMAIN (13)...(195): Outer membrane efflux protein
  misc_feature (1)..(280): Xaa is any amino acid
LYANENAQQTLTFAQAAKLAVSASADLKHSRASLALSKGAWKWGVRSYFPQISVSVSENDRLQQLGADSFMKNYSVSLEQPVWDGGKLSMSRKLEKMELDLSSSKLDRTANEIAESAIAAYRNLLSSREILKIKKSAFTVLEEQRNILDEEVKLGLALSVDLASADINLLNAKIDIYSLQLDLGEMEKQFMELLGLESMPILTEKVDINRSVLLPSSSAAETLAKEKNPDLIDARYSITKKQMEYKYISHSWIPSLRLTGNFALTGQHYPLTRYNWSVGI

SEQ ID NO: 91621 - protein, 204 aa, Unknown
  Obtained from environmental sample
  DOMAIN (1)...(198): DeoC/LacD family aldolase
  misc_feature (1)..(204): Xaa is any amino acid
MTASWEEIKTLCDEAVKFKTASVCVPPSYVNSIHNEFKNLNICTVIGFPLGYSITASKVLEAEQAILDGANEIDMVINVGDVKNGRFDYTLTEIKLINEVCGGKILKVIIETCYLTEDEKIRLCNVVTEAGADFIKTSTGFGTAGATLADVQLFKKHIGPGVQIKAAGGVKTREDLEAFITAGASRIGTSSAVKLLAGGVATGY

SEQ ID NO: 91622 - protein, 156 aa, Unknown
  Obtained from environmental sample
  DOMAIN (1)...(156): Bacterial protein of unknown function (DUF853)
  misc_feature (1)..(156): Xaa is any amino acid
EAAATSFRSNPEFSSEKVLGELSTGEALISVLDEKGAPKIVQRAFMLPPKSFIGPAELERISGIIKNCPIYSKYSVAIDRESAYEVLQAQKKQAEAQQQKPPPVTTRQAQPVKTPKTTSVRKTSSPANKALSSAMTQIGRAAGKALVRGLFGNIKI

SEQ ID NO: 91623 - protein, 459 aa, Unknown
  Obtained from environmental sample
  misc_feature (1)..(459): Xaa is any amino acid
MAKLPATYDPRSLASVEKYSSAVTLSDMEVFIFPELMYALVLANIMSNRLWAWKGDPWFSKSRAQGEMKRVQRLKQYIMDRFSFNLDLDTWGLTSKEREIGRFSAFISEEILARSNALFGYEGDKYYFDIDIRRHFGLDKYTSNIIPYWKTETIEAMEAFKFKEGYAGGAGECVSFAALYAAAAFAVADIPLDKIFLLATPLHSQNFLDIGEGVITNNRRIVTKNMWYNGTELSAKARRALENETVTIVAHNTGSIHTVFPNASIDRARYGQLKSKLAKFLSTDITYEILANFLRHKSGLQRYFQISYGRHGKTLYIEAEKVYSYEHSSKLRVGDATQENLLLEIEDDEFYTDLCPHRFDLGKLQAFLGGNSISIDCADGINKLKAQLADGPLSGSHLVNELIKFCRTEPVMPNEEPKTWAEPGSVPPIKLDGVTSAQEAREALMGQRGDDETVDLAFM

SEQ ID NO: 91624 - protein, 167 aa, Unknown
  Obtained from environmental sample
  DOMAIN (23)...(167): Caudovirus prohead protease
  misc_feature (1)..(167): Xaa is any amino acid
VTKKIQLTRFARFDRASANKEAKTIELSVSSDSDGIRQWVPGIGPVREVLGHDPTEVILDRFQEPHGGPLLFNHNFSELIGRFTATAITGGKLRGIARFGNSPLAQDLWRDLCDGILVDVSITYDYDARDIEITETDGEGHPAAIRVKRWTPYEVSFVTVPADAALA

SEQ ID NO: 91625 - protein, 351 aa, Unknown
  Obtained from environmental sample
  misc_feature (1)..(351): Xaa is any amino acid
MEAQLNKIAITGDAPIEADLILKGDSLVRELVVQRSRTFVKKSLTVSEGAEVLFPNRAPPNVAAYSLKASYGKLIDDFVHSFERKDALGRKVSILSLAIYSPYEDAYYKGDKSKIDDFKQGRQAQIVNLIRILLLKRFESSASAFEETCIRIFVRLRKFVDDYKEYGNERAIERFYQHQDRVIEHISKFIAENAPYTEEELEDDLPDYVWEAEEKFDIGDFDIPMMIQETLGDLEILADFIEDLMGIEPSKDDKLNALKKLLKDDKRLVGKKVIIFSEFRSTARYIERELKNCGFTGMYELDGQSDVDRREIIERFAPYYNGKTSKEVNSEIQLLIATDVLAEGLNLQDAT

SEQ ID NO: 91626 - protein, 134 aa, Unknown
  Obtained from environmental sample
  misc_feature (1)..(134): Xaa is any amino acid
MKIGIKLTALMTALGLFTIASISTTLLLRSRASITGLSEEYSVSMANDSAADITNFIDAYMHRVETLSDVMKQYRNMIIANRRTFFNYILEGLTRENPDIIAAWCVWEPDALEGDDRHFLGTKGNSKTGRFAPY

SEQ ID NO: 91627 - protein, 610 aa, Unknown
  Obtained from environmental sample
  DOMAIN (221)...(435): Methyl-accepting chemotaxis protein (MCP) signaling domain
  misc_feature (1)..(610): Xaa is any amino acid
MKETEADMCGPYLYDLLNAVQAGKPYTFSNYIAALKTQMHMFFIPITVGETKNSWSYAIAVMQNTIMAPVYQMMKIAIAISAVVLALLILAAIFLSSSISKPIVNVAGTLKDISQGEGDLTKRIAVRSADEIGDLGRCFNVTMEKIRSLVGSIKYKINGLNHTGFELSTNMGRTSAAVQQITSHLDNMKNLMVKQESGAEEAGKAVGDIKENIDSLKKMIEQQTESVNRSSSAIEEMTANINSVTKTLVDNSKNVSALTEASENGKTGVQTVAQEILEIAHDSEGLLQINSLMNSIASQTNLLSMNAAIEAAHAGEAGKGFAVVADEIRKLAETSGKQSKTTAAMLKKIKASIDNITKSSEDVQARFGAIDSSVKTVSEHEQNIRNAMEEQEIGGKQILDSIGRLRDITYSVKKGSDDMEGSGETLVKETDEFIKISKETVDGMNEIMAGINQINVSINHVNEMSIENNNNFESVKQETQKFNVTDDNEKKKILMVDDDEIHLEMVESVLQTDYDIVTTKSGKEALGLFYQGLIPQLILLDLIMPDMDGWDTYKRIKAISNLHDIPIAFITSSDDPKDIKHAQEIGAVDYIKKPYNKDELRKRTARILKK

SEQ ID NO: 91628 - protein, 495 aa, Unknown
  Obtained from environmental sample
  misc_feature (1)..(495): Xaa is any amino acid
MKLKPSITAIFIFFFIALTAVYSQNTTFPRIQPEPKALEYHRLGEKGGYSWTELAEISLWASGDTSTANLEKIRAAAETIKNAVDLPESYEGKAEYVLMFMHKNLIRSYSLNQTRIDTMLSSGRYNCVSSAVLYMILCESLGIHTNGVMTKDHAFVSIPIGDTVIDVETTNAYGFDPGNRKEFHDQFGRLTGFSYVPAKNYRDRETISQIELVSLILNNRIADHERLNQFADSVPIAIDRASLLEGNALKVEPATETHRAIFTDPRIDLLDRLFNYGAMLLRAGKEEDGLRWAAAASPVYPDEKRWQEFIMAAVNNNQTKLLKANKFADARKFLEGQKNVLSQANYDKLETILIESELLGKANQIRTAADGDSVINAIDLARNGGKMPEKRAVELITFAVQKTASSVSAPPGGNWRAAIQYIEASISRFGANRELEQALNVYRSNLATDYHNRFATEWNKKNYDEAERILNEGLAEFPKDRQLLSDKQIVTKQGR

SEQ ID NO: 91629 - protein, 150 aa, Unknown
  Obtained from environmental sample
  DOMAIN (2)...(146): Integrase core domain
  misc_feature (1)..(150): Xaa is any amino acid
AKEGWLYLTVILDLFDRKAIGWSMSEELTAGQTCLALEMAVGNRHPREGLIFHSDRGAQYCSGEFRSALKRLCPLVRQSMSRKGNCWDNACAESFFKTLKAELDILEKGGSARQIKTAVFEYIEAYYNRCRRHSALGYATPLALTHNNAA

SEQ ID NO: 91630 - protein, 263 aa, Unknown
  Obtained from environmental sample
  DOMAIN (7)...(263): impB/mucB/samB family
  misc_feature (1)..(263): Xaa is any amino acid
MPCYIHADIDAFYASVEQLDNPDLRGKPVIVGGLPDDRRSVVSAASYEARKFGVHSAMPITQAYKLCPQGIFLRGRMSRYREKSDEIMKIFNGFSPVVEQLSIDEAFLDITGTDKLFGPPEIAAKKIKGKIRTETGLTVSTGIASNKYVAKIASGMSKPDGLYEIKNGEEERFMRSLPVTKIWGAGEKTQEIFSKHGLKKCEDIYRLSRESLASMFGNAFGNFLYQAVRGEPAENFDREPGSRSISAERTFAYDLSDEFAIET

SEQ ID NO: 91631 - protein, 471 aa, Unknown
  Obtained from environmental sample
  DOMAIN (35)...(469): AMP-binding enzyme
  misc_feature (1)..(471): Xaa is any amino acid
MKYIEETLGEVLREKARVQPDRDFLVYADRNLRFTYAEFDKRVDNFAKGLLSMGLKKGDHLGIWATNVPDWNTILFACARLGVVSVTVNTGYKLHELEYLMKQADLACLCIIDGFKDSDYVAMVNELVPELKTASRGNLKSEKFPFLKYVVYIGQQKHRGMYSFNELLLLGQHSYEKEFRLIEASLDRNDVVNMQYTSGTTGFPKGVMLTHRNILNNGLGIGDNQRLTNKDIVCLPVPLFHCFGLVLGMMAILTHGSTAAMVEWFDPLIVLATVQKEKCTALYGVPTMFIAVLNHPMFKMFDLSSLRTGIMAGSPCPIEAMRKVIDLMHMSEVTICYGLTESSPVMTQTHFDDTIEVKVETVGRALDGVEVTIRDAETGEECQDGIHGEFCCRGYSTMKGYYKMPEETAKCIDETGWLHSGDLGVKTSDGNFRVTGRIKDMIIRGGENISPKEIEDFLYTMPGIKDVSVVG

SEQ ID NO: 91632 - protein, 308 aa, Unknown
  Obtained from environmental sample
  misc_feature (1)..(308): Xaa is any amino acid
MALPESNFFELLRSVFGNIKTPFSKHKLLEDLFAFLSKKENQKTIAAFISEQDHKVIAAIALLNEPETVNLEKFFAGEMTAAELHAVIINLEERLILYRFRDEKCQRLALNPVLEEVLSPFIADTRPLFRSFPKESGFPLESFDETETTSQAACQPYYISDPRIMAALFTFIIEEEELFKTEAGTEVKKSSFQDTPIPELRKKVLDSAKKIFPGLDFELAVNNLIQLGLFRRTDRYIIPNSEKITEYSDLSDTERREYWAAGLYICFRETEKKAHNSHFAADNFAFSFSWNRLRLIASFIHRFRSLLD

SEQ ID NO: 91633 - protein, 445 aa, Unknown
  Obtained from environmental sample
  DOMAIN (49)...(428): Citrate synthase
  misc_feature (1)..(445): Xaa is any amino acid
MIDLKEHLSEISGNDYIDSDLFRKFSVKRGLRNDDGTGVLVGLTRVGDVHGYIVDEGEKIAIPGKLYYRGIDIEDITNEASKNNRFCFEETIYLLLFGKLPNQNQLENFNKLIGENRILPKNFVEDVIMKVPSRNIMNKLSSSILALYAYDEDPENQTPENVLRQCVELIARLPAIAAYSYMSKKHHFDRESLIIHPSDPSLSSAETVLSLIRPDKKYTPYEAMLLDLALVLHAEHGGGNNSTFTVHVVSSSETDTYSAIAAGIGSLKGYKHGGANAKVIGMMDEIMKNVKNWESEEEVSAYLEKILKGQAYDRTKKIYGQGHAVYTLSDPRAILLRDKARALAEEKGMIKEFNLYCLIEKLTPIVFKKVKGSDKDICSNVDFYSGFVYKMLDIPQDLNTPIFAISRIAGWCAHRLEEIIAGGRIIRPAYKCVQPRLKYTDVNGR

SEQ ID NO: 91634 - protein, 160 aa, Unknown
  Obtained from environmental sample
  misc_feature (1)..(160): Xaa is any amino acid
TSREKAQELRLEQWGTPEEVKAMSAPLRQASSRRTAMDYLKEIALNSPFTSRSGLSARLSNRSLGKIVSHAAVVSSFCPEAHYLATANIDKLYANAIEPWEFELNPNKDNAGLKARRYLYAPMEYEGKITIVKITVKEYEDADLQNKLYSIAAVDVELRA

SEQ ID NO: 91635 - protein, 95 aa, Unknown
  Obtained from environmental sample
  misc_feature (1)..(95): Xaa is any amino acid
MNKTNNLLDNEEHNMIKSLETEEWKPVKNLELWKTMLSKAATSTLTKDQRMNIRITKNDLEGIKVKAVEEAIPYQTLVASIIHKYVTGRLMEKRI

SEQ ID NO: 91636 - protein, 81 aa, Unknown
  Obtained from environmental sample
  DOMAIN (3)...(81): RelB antitoxin
  misc_feature (1)..(81): Xaa is any amino acid
MAQTNINIRMDSQLKDQFEAFCNNAGLTMSTAFNVFAKTSVRLQKIPFEITAYNEANMNILRKSIKQLEEGKGVEHELIEA

SEQ ID NO: 91637 - protein, 70 aa, Unknown
  Obtained from environmental sample
  DOMAIN (2)...(69): Plasmid encoded toxin Txe
  misc_feature (1)..(70): Xaa is any amino acid
LAKAEKKTIEKINDLIKDIERKPFEGLGKPEPLKNNLSGWWSRRIDDTHRIIYRVEKGNLEIAQCREHYN

SEQ ID NO: 91638 - protein, 129 aa, Unknown
  Obtained from environmental sample
  DOMAIN (27)...(126): Histidine kinase-, DNA gyrase B-, and HSP90-like ATPase
  misc_feature (1)..(129): Xaa is any amino acid
ADFEKRAAVECRAIIDKDFTADTLSPQMQLQVYRVVQEALSNIEKHSGAKEVTLTARNKDDKALLICVTDDGKGLHRNMANTQSPKNGDGLGIRGMRQRAAMLGASLSFVEGAGSGLTVRLEVPLSGNR

SEQ ID NO: 91639 - protein, 393 aa, Unknown
  Obtained from environmental sample
  DOMAIN (6)...(361): Phage portal protein
  misc_feature (1)..(393): Xaa is any amino acid
LTADEDFYSLYIDPFNDNYLCNAWVNIAVNILIRNVARADFILERNGVELKSGPLYSLFHRPNEHLSRYDLWKETAAWWFIEGEAFWWFGPDYSGGLPTQLHILNPRKLQLEGEGLDVCTQSLQGEFVKNNRRWFYHAGTELVPIFSDELIHFKDWNPWNPLRGVNPLVSLTLELEQDYFANKANSTLLKNNAVPQGLLKTDQTLRPEEADAIERRWESKYGQVKAGRKIAVLGKGTSFEALSFNPDVVKLFELKRWNLYTILAKFGIPPRVANISDRSTALSGKDTKEQHSAFWQYTLIPLLRQFEQTLESQFFMRFNLKETGRFDLWDVPELQDNEDAQSRRDIAEINAGLKTINDVLKERGKEPKPWGDVWHKPKNLITTAGKPGEKEGE

SEQ ID NO: 91640 - protein, 516 aa, Unknown
  Obtained from environmental sample
  misc_feature (1)..(516): Xaa is any amino acid
YGYDFIPPEFLPAGKDEYWQRNAQQAALNGVKNWRRLTPSEIETLIQNKNYCPDWNNFLVSDPFDPSLICNSHFYGLIRLGALCNTLLKYHDFCIPSGIRNSTIISCDIGDNAAIQYCSYISHYIIGDGCILFRIDEMQTTNHAKFGNGALKDGEDENVRVWIEVMNEAGGRAILPFDRMIAADAFLWAAYRDDTGLMDAFKKLTQEQYGGRRGSYGTIGVNSVIKSCSIIKDVAVGCYAYIKGANKLKNITILSSAEEPTQIGEGVELVNGIIGYGCHVFYGSKAVRFVMGRNCNLKYGARLIHSVLGDNSTVSCCEILNNLIFPVHEQHHNNSFLIAGMIQGMSNMAAAATIGSNHNSRANDGEIRAKRGFWPSLAVSLKHSCCFASFTIIAKGEYPSELNIPLPFSLINNNVHKNRLEIVPAYFWIHNLYALERNSWKALDRDRRTVKVQHIETDYLAPDTAEEIITALYLLEGWLGEAGYSPGDMTSADDVHDVHLIHCRHVERSKRKHVVI

SEQ ID NO: 91641 - protein, 144 aa, Unknown
  Obtained from environmental sample
  misc_feature (1)..(144): Xaa is any amino acid
AVVARSYTNVAKAEQVRVDGWTYSPEHLRVGDKVLLVDDIFDSGRTINHLAQIILDKGIPRNDLKIAVHDYKYFYDKPEQYPIQPDYWCRRHDVSINDDTYWIHYMSHELMGLTEKELEENYYSHDPSLKDALHIITEKNDLRN

SEQ ID NO: 91642 - protein, 154 aa, Unknown
  Obtained from environmental sample
  misc_feature (1)..(154): Xaa is any amino acid
MKTNDEKTTEQSQMFANRLQKRFRHLKKWAQRKNIGAFRLYDRDIPEIPLVLDFYGDVSQVGEAAISGALYKRPYEKDEEDETQWLSEMKNAASAALGMSPERIFLKQRQRQRGDAQYEKTGDTRFEKVVSEGDLVFKVNLSDYLDTGLFPDRR

SEQ ID NO: 91643 - protein, 152 aa, Unknown
  Obtained from environmental sample
  misc_feature (1)..(152): Xaa is any amino acid
TYLNWARENFSLNGFSAQILQIWDFFSNKEPQGAHNLIRADVLDFLEKAASSKKRWNIIVLDPPSFSNSKKMANDLDLQRDFYDLTGKCIKLLAPNGKFFISVNQKQFKINVNEMEEKLGLHVTDLQNKITDEDFHGKKTPQSFLISLPPVK

SEQ ID NO: 91644 - protein, 386 aa, Unknown
  Obtained from environmental sample
  misc_feature (1)..(386): Xaa is any amino acid
MLIKAMEQTGLLISDSNKRWQKYQPAPEGASAINAVAKNAVARIAMDSPFTLVMYPEIAYNDAIELASISRVTGTGLNVSFEIDKDAAVSAFNRGISAAAAIELLQRLSGNRIDGNAAFTLLDWEKRYREVGLSKGLVLSLSPERDYLAETKPLSKYITAKLATGIYMIPENMEEKVYIALKKAGVTIFAKPDSAGAPNCQADDGDALTADSRVYFPRISTPHAEKLRQFRTEKKEDGSNSASDPPSSVPASSALIEGFHSIINKMRLGTEQRDELTARVNRRLVLCEAQLKDAVVRYEKLEARGLDYNGKIMIAKQAIARRTPVEVSWPGRQKQESVIGIPKALEKKGDESVLVIESPEGNIIRIPLGKVSLLRRIKKSIFENNN

SEQ ID NO: 91645 - protein, 272 aa, Unknown
  Obtained from environmental sample
  misc_feature (1)..(272): Xaa is any amino acid
MSKNSWAEYEALPSSIQVMDPRKEEIFVIENPKGYPLFLDNRSFIVGSEQNSIIALNSAGEELWTHDFPAPLTCVDAAGGYFLAGTLDGAVELLDSTGKMVFTPFEPGGSRLSVILGCAISQDASRLALISGVEKQRFLLLEHSGDTYKVAYHEFLSDGFRRPVHIKFINNDAEIVFEREEGLGLYVIGSRTSTKVNLNGEIMILDDSGENGFLFLITSQSQNEKRFIAIRHPGLIVNETPFKSKNAFLARKRDRIYLGGDLLMASFELEKN

SEQ ID NO: 91646 - protein, 91 aa, Unknown
  Obtained from environmental sample
  misc_feature (1)..(91): Xaa is any amino acid
MAAVVKDLVQLNADLQEQKERIDTVDFKMITFSLAGKAYGVDIMNVKEIAKADKFTFVPNAASFVRGVYNMRGDIIPIIDLRQFFHLPQDK

SEQ ID NO: 91647 - protein, 62 aa, Unknown
  Obtained from environmental sample
  DOMAIN (1)...(62): Tetrahydrofolate dehydrogenase/cyclohydrolase, NAD(P)-binding domain
  misc_feature (1)..(62): Xaa is any amino acid
VIDVGINRVPDSSTEKGYRVCGDIDPAVAEKAAFFTPVPGGVGLMTVAMLLHNVIQAAEAQI

SEQ ID NO: 91648 - protein, 351 aa, Unknown
  Obtained from environmental sample
  DOMAIN (79)...(230): Anticodon-binding domain
  misc_feature (1)..(351): Xaa is any amino acid
MSSRRHGIDPLELVNEFGADAMKFTLAFMCAQGQDMLVDKESFKMGTKFANKIWNASRYILMNLEGRELVKNPQLSSADKWIYSRLNNAAKNMREAFFSYRFNDAAQASYEFFWNDFCDWYVEATKLSIKGGDNPEKDRVTTVLLDVLAQSLKLLHPLLPFVTEEIYLKLPQTEGKSLLIISEYPDYDVKRDDPLQEKNFADMQTLVGMVRTIRSECGITPEKKLRVLVRTAGVQAQVFNQNCDLIKLLAGIGDLSVEGAKEDKPSGSIGLAGPGFEVFVFVAEAVDTCALKKKLSGDLERDNKYIEGLRAKLANEQFVKNAPETLVAEQRSKLEETLLRTEKLKLYLKDL

SEQ ID NO: 91649 - protein, 687 aa, Unknown
  Obtained from environmental sample
  DOMAIN (18)...(574): tRNA synthetases class I (I, L, M and V)
  misc_feature (1)..(687): Xaa is any amino acid
MNSIELAKAYDPKSFEDRIYSMWKNSGAFAPESAADSTGKPFVVVIPPPNVTGVLHLGHGLNNSLQDIIVRFHRMRGASTLWVPGTDHAGIATQNVVERKLKEEKKTSRRELGREKFLEETWKVKNEHHATISKQLEKIGASVDWKRERFTMDEGLSKAVREVFVTLYERNLLYKGNYLVNWCASCGTALADDEVDYKDTKGYMYHIRYYFSDDKEKYIEIATTRPETLLGDTAVAVHPEDERYSALKGKTLRLPLTERVIPLIFDAYVERGFGTGALKVTPAHDPNDWELAKRHNLAVINILNPDGTLNSEVPEKYRGLPVSKARAVVIEDLQAGGWFVKDEPINHSVGHCYRCHTVIEPFLSEQWFVRMKPLAEKALASWQKGEIIFYPKKWENTYKHWMENIRDWCVSRQLWWGHRIPAWTCADCGKMTVSRNDIDACPHCKSKKIEQDPDVLDTWFSSWLWPFSTLGWENADCNTDDFKKYYPTTALITAYDIIFFWVSRMIMAGLEFTGKAPFRDIYIHGLVRDKQGRKMSKSLGNGLDPLELVDEFGADAMKFTLAFMCAQGQDILVDKESFKMGTKFANKVWNASRYILMNLDGRNLQENPALTPADEWIYSRLNDAAKSMMEAFLSYRYNDAAQTAYEFFWNDYCDWYVEATKLSMKDGDSAEKDRTTTVLLDILSQSL

SEQ ID NO: 91650 - protein, 130 aa, Unknown
  Obtained from environmental sample
  misc_feature (1)..(130): Xaa is any amino acid
MRYLFPDDYMADPAVHVFKGKLFIYPSHDRESGIAENDNGDHFDMKDYHAFSLEDPDNGMAKDLGVILDIKDIPWAGRQLWDSDVACKNGKYYLYFSLKDKNDIFRLGVAVSNHPEGPLRRKRPDSRQLQ

SEQ ID NO: 91651 - protein, 137 aa, Unknown
  Obtained from environmental sample
  misc_feature (1)..(137): Xaa is any amino acid
MGMDSSKILIIIPTYNERENITLLIPEIKKSLPGAHILVVDDSSPDGTSAAVKEVAAGKDGGGVFVLDRAAKQGLGRAYIAGFKWALEHGYEYMFEMDADFSHNPEYLPKFIEAAQSADLVIGSRYINGGQHSQLAD

SEQ ID NO: 91652 - protein, 253 aa, Unknown
  Obtained from environmental sample
  DOMAIN (7)...(253): Aldo/keto reductase family
  misc_feature (1)..(253): Xaa is any amino acid
MQYVDFGKTGVKVSRLGMGCMRLPSDMKEGKTVYDEEKSIALIHRAIELEINYFDTAPYYCDKLSEVILGKALKGGRREKVFLSTKNPVENDSGDDYEKRLENSLKKLDTSYIDFYHFWGISLDAFIKKVRAKDGPLDRAKKLKAQGVIRHISFSFHDHGAGTKEGDNLMEILKMGEGVLETVLCQYNLMDRNKEKGIALAHDMGLGTVVMGPVGGGRLGTPTKAILDLLPGKFTSSAELALRFVLANNKVDI

SEQ ID NO: 91653 - protein, 212 aa, Unknown
  Obtained from environmental sample
  DOMAIN (1)...(212): Fumarate hydratase (Fumerase)
  misc_feature (1)..(212): Xaa is any amino acid
TGTCNVILEIGQEVSWEGIPLLEAVNMGVRRGYEEGYLRKSMVADPFDRINTGDNTPAMLHTEIVPDDRVTVTVMPKGGGCENMGAFCTLLPSDGAQGVKDFVIQTIDKAGGKPCPPLLVGVGIGGSMDKCVWLAKKALLRPVGSRNPSPFYSNMETDLLEKINNLGIGPMGTGGRITALDVHVEYCPCHITALPVAVNLQCHAARIARTEL

SEQ ID NO: 91654 - protein, 172 aa, Unknown
  Obtained from environmental sample
  DOMAIN (22)...(172): Carboxyl transferase domain
  misc_feature (1)..(172): Xaa is any amino acid
VSEKLEQLKEIRKKVEEAGGQKRIDKQHESGKLTARERIALLFDAGSFVELDAFVKHRCVNFDMATTEAPAEGVVTGYGKVNGRLVYAYAQDFTVIGGSLGQMHAAKICKVLDLSAKMGAPVVGLNDSGGARIQEGVDALSGYGQIFYRNSVNSGVIPQISVIMGPCAGGAV

SEQ ID NO: 91655 - protein, 231 aa, Unknown
  Obtained from environmental sample
  DOMAIN (33)...(226): Glucose inhibited division protein
  misc_feature (1)..(231): Xaa is any amino acid
VNQIDGLLAEGLLSLCQKDSAIENIIAPRREEIIALLGGYVAEIMTHNPVLSLVGTNDPRELVIRHILDSLAPLGIISRKCNVSRIADVGSGAGLPGIPLAIVLPDSEFTLIERKGRRSGFLRNTLAALVNKNHKLSYVSVEEQEMEKVKPHRFTMVTFRAFKPLEPKSLKKLFRLCAEGGVLAAYKGRRSKIEAEMAELETSSQTIQWELIPCPVPMLDEERHIQIISKK

SEQ ID NO: 91656 - protein, 506 aa, Unknown
  Obtained from environmental sample
  DOMAIN (4)...(169): Peptidase C26
  misc_feature (1)..(506): Xaa is any amino acid
MSELVLVLDFGGQYKELIAGSVRKLSVYSEIKPGNLTAAEIRRLDPIGIILTGGPNSVYKADSPKCDPEIFSLGIPILGICYGMHLMCYTLGGKVESGDVGEYGRVPVTPVRKSKLLNEVKKPFTALMSHRDSVTRMPEGFYITAKTSSCIAACENPARKLYNTQFHPETKHTKGGKKIISRFLFDICDASGDYKLGDYIDTQIKKIREKVGDKKVLLALSGGVDSSVCAGLLSKAIPGQLTCIFVDHGLMRLNEGDEIERAFSKRNLNFIRVNAQKRFLAKLEGVTEPEKKRKIIGEEFIRVFEEESAKLGDIPFLAQGTIYPDVVESGGKHGAVIKSHHNVGGLPENLKFTEIVEPLSRLFKDEVRELGKKLKLPSSLVNRQPFPGPGLAIRVMGEITEQKLDVLRHADAILREELDALKRRPNQYFCVMTGTRSVGVKGDDRTYDFVIAVRAVTTDDFMTCEYTPLPHNLLSRISSKVTSEIPQVSRVVYDITSKPPATVEWE

SEQ ID NO: 91657 - protein, 60 aa, Unknown
  Obtained from environmental sample
  misc_feature (1)..(60): Xaa is any amino acid
AYKGIRANNTVHRVPIIAMTANVFKEDVEKCLEVGMDSHVGKPLDLDEVMARLHSYLVNK

SEQ ID NO: 91658 - protein, 92 aa, Unknown
  Obtained from environmental sample
  misc_feature (1)..(92): Xaa is any amino acid
MNVQTKTGTKNAKWQLQEAKAMFSEVIKASGRRPQIISVRGKETAVILSIGDYQKLVRPKQTFFEFIQASPLRDLNLELPPRLPEKMRDINL

SEQ ID NO: 91659 - protein, 366 aa, Unknown
  Obtained from environmental sample
  DOMAIN (156)...(361): Binding-protein-dependent transport system inner membrane component
  misc_feature (1)..(366): Xaa is any amino acid
IMVFLGLLAVVPIYFLLLNATRSTEQINSGFVIIPLKDAFFSSTKNIVSDWDSNLESGTVRYFDLVMGKTLKEEVNKKTGNNETIALKRFTENTTPRLTVFNDEDQIIANYNLDNNTVIYVKNGQRIKKGETLAMHIKPSNVVYNWGILTGRGFQIFQGFGNSAFIAICATVLSIYFSALTAYGLHVYRFKGRMALWTVILIIIMLPSTLSIIGFYQFMAMLKLRDSYIPLIIPGIAAAGTVLFLRQYMMSVLSTELIDAARIDGAGEYRIFNVIILPIMTPALAAQSIFTFVGSWNNFITPFILINSEKKYTLPMLVQSLRGNIYRAEYGAIYLGIAVSLIPILIFYSFMSRFIISGITMGGIKE

SEQ ID NO: 91660 - protein, 162 aa, Unknown
  Obtained from environmental sample
  misc_feature (1)..(162): Xaa is any amino acid
LKIIDKEIAATGENEQAKAREAQKAQERKEAEEAEKKKEKERNEAAKLKAQEDIKQKQQAEKDKEMAKRQLDKSKQEAAKAKEKEKLQKEKEKEEAKKAQEKDRLQKEKDKEAAKRQAEKDRLQKEKEKAAEQRAKEQEKRETDKAAAAAKREADRAIQQKK

SEQ ID NO: 91661 - protein, 85 aa, Unknown
  Obtained from environmental sample
  misc_feature (1)..(85): Xaa is any amino acid
MVQRVYEQAKQVFERCYVATDDERIYAAVQSFGGKVVMTSSTHQSGTDRCAEAIVKIETEFDEKFDVAVNIQGDEPFIAPAQLEQ

SEQ ID NO: 91662 - protein, 252 aa, Unknown
  Obtained from environmental sample
  DOMAIN (40)...(241): Polysaccharide biosynthesis protein
  misc_feature (1)..(252): Xaa is any amino acid
MLNISQFIASNITLRTKSMFAEDIEANKENLRAEIENKSVLVIGGAGTIGSSFIRAVLKFKPSKLFVVDTNENGLTELTRDLRSTADGYVPENYITYPINFSDSIFEKIFRNENGFDIVANFSAHKHVRSEKDLYSVEALIKNNVINARKLLDLLTEIPPKHFFCVSTDKAANPVNIMGASKKIMEDMIMAYSTKYPITTARFANVAFSNGSLLDGFIQRVMKRQPFSAPNDVRRYFVSPDESGENLHVGLY

SEQ ID NO: 91663 - protein, 264 aa, Unknown
  Obtained from environmental sample
  misc_feature (1)..(264): Xaa is any amino acid
VPGVRYDYYPELDYEGSVLPAFWDYGFMDNRRGWSGEPSFRISGRYRLTDKHTLKAATGAYSQSPEPTGIVINKDFGNPDLPSTKAAHHIAGFEWQINDLISLDAQTYFNRIWDVARSYDERIDYDPTLDRQRRYFSDGKQRMYGLELMLRHSRSEKFFGWISYTLAKSELWSKQEEKYILSNRDEPHNLQLLGSWRLKDNWEVGTRARFVSGKPTSPIIATIESENGRNIRPVYGAQNSTRQDPFFQVDARIDKKFIFDKFIL

SEQ ID NO: 91664 - protein, 510 aa, Unknown
  Obtained from environmental sample
  DOMAIN (43)...(77): Gram-negative bacterial tonB protein
  misc_feature (1)..(510): Xaa is any amino acid
ASPQSEAVIDLSDEAPIELTDEIEYLDPEGALEKMPVLTQFVEAKYPDSLIKSGIEGAVLLELLVSESGAVDSAAVVRPLHPALDASALAAARKFKFSPARALGGEAVAVMLQYEYRFSLRDVVAAPKSYVNLSGTLVERGTRRPIADALVVLQFVDTLSDTSLSMPFSLYMEQIDKIEGQSWEDSRLVAATDSAGAFRFYSLPAGKVMVNVQAPDYVPYTTYESISELEEVKVLYYITRLDYTGYELVVYGKAEEKEVSRHRISLAEVKRVPGLGGDAVRVVQAMPGVARPSFGGTEVVVRGAPSWASRYYIDGMTVPLLYHMSGLDAIYPSDALDGVDFYPGGFSSRYGGAVAGVIEMNTRKPKTDRLQGYVDLSMLTGAVFLEGPVNERVSFMASARRYFAGDLLSLYFDISDPEHTSISMAPYYWDYLFRIDADINKNHRLSVSILGSRDSIGVFVPTMNRGSSEIDGQLDEMTMMLTFHTLTAGLSSRLSNQLTNTLRLSGTYIA

SEQ ID NO: 91665 - protein, 371 aa, Unknown
  Obtained from environmental sample
  DOMAIN (79)...(329): Methyl-accepting chemotaxis protein (MCP) signaling domain
  misc_feature (1)..(371): Xaa is any amino acid
MGEGDLTGRIETDKDDEIGELAGYFNLTLEKIRNLIITIKGEAANLHRIGDDLASHMRQTAEAVHHITANIEAVNEKVTGQSASVSQTSATMEQVTANIDKLGKNVEAQTEGVSRSSSAIKEMIANIESVTQTLGRNAESVQELIRVSDDGRGSLQKVTQDIQEIARESEGLLEINSVMENISSQTNLLSMNAAIEAAHAGEAGKGFAVVAGEIRKLAESAAQQSKTISEVLKKIKSSIDTITGSTNTALDNFKVVDEQVRAVSEQETNIYTAMEEQGRGSKQIHEAISKLKDLTQMVKSGSTEMLDGSKEVIMESRNLEKATVEISTGMNEIVNGAEKINSSVNQVEAISKTNKDCIDTLFSEVSKFKVD

SEQ ID NO: 91666 - protein, 352 aa, Unknown
  Obtained from environmental sample
  DOMAIN (49)...(352): Citrate synthase
  misc_feature (1)..(352): Xaa is any amino acid
MIDLKERLTEISGNDYIDANLFKKYSVKRGLRNEDGTGVLVGLTRVGDVHGYIVDEGEKVAIPGKLYYRGIDVEDITAEASQNNRFCFEETIYLLLFGKLPNQQQLEGFCKLIGENRVLPKNFVEDVIMKVPSRNIMNKLASSILALYAYDSDPESQNPENVLRQCIELIARFPAIAAYSYMSKKHHFDRESLIIHPSDPSLSSAETVLSLIRPDKKYTPYEAMLLDLALVLHAEHGGGNNSTFTVHVVSSSETDTYSAIAAGIASLKGYKHGGANAKVIGMMDEIMKNVKNWESEEEVSAYLEKILKGHAYDKTKKIYGQGHAVYTLSDPRAILLRDKARALAEEKGMLKE

SEQ ID NO: 91667 - protein, 201 aa, Unknown
  Obtained from environmental sample
  misc_feature (1)..(201): Xaa is any amino acid
MPEVAFQYQVPKKMIGTFVVDCFMVERYKFSNSVTDIPVEEGSNISDHIVEEPDVIYVEAFIGNTEFEVIVNDGNSISNLQAPDRMARVMQAYQALKKMVKEKKTVDVVLGLETFTGMAITKFDIDRDAETGANLPFTMEFKKLKIVHSETTTINASTAKAGAAGDQIAGTANQGTAGTEQPQNNIAEEEWRRQIAAGGPA

SEQ ID NO: 91668 - protein, 198 aa, Unknown
  Obtained from environmental sample
  misc_feature (1)..(198): Xaa is any amino acid
MNMEEAVECLSEIAKKSGAEQFDILAGNNESRGISVFNGALQNTEISNSGGIGIRIFKEQKPGYASTEKFSKESISQTLADALSNCEYSEPIKAELPEPVTINETLPIYNPELENIDINHLLNTCLDIEKQILAASEIKNVPDLGAEISSSTTIFANSKGIFFKDKRNNFGIGAGAVAERSGVVKMGWYGRGGRDFGI

SEQ ID NO: 91669 - protein, 332 aa, Unknown
  Obtained from environmental sample
  misc_feature (1)..(332): Xaa is any amino acid
LQTGGKLPTFVKPLVALLISILLFAGFIYLVNVELFDYVETHYYNPSVINSYVNENAADARIVQNHINNLKSKFYATLTVPAIRRSFLYNQSSDDIFERSRIYGILMESTVGLQSVQFVDSNGIRIHYSTSPRDIMSQNQNSTAYRNYNENPASLSYEIVGVEDVANVKLTMDDQNDRIIFSFPFRDSMDVFHGTALFSVSIRTFAERLIETGRLKISDNISLINEPSGILLGSPETSKSVIFSRVAEIWKKGIQGHITLDAEDSGVAFSLISTKTDQNLFFGRLVDSNLFSISAQMKFILQVSIFLTFFLAFFFLLNLKPSHAAIVRNRIT

SEQ ID NO: 91670 - protein, 164 aa, Unknown
  Obtained from environmental sample
  DOMAIN (2)...(163): Methyl-accepting chemotaxis protein (MCP) signaling domain
  misc_feature (1)..(164): Xaa is any amino acid
MASQFKTVGEASDEGKRIQKKSGDRIREIVEQSQTLQEANKIIASIAANTNLLAMNAAIESAHAGEAGKGFAVVADEIRKLAENSAAESRKIRTELKQISATIDHIVQDAAVSENAFAEVSRRIDETGKLVVEVDNAVHEQKTGASEVIESLQVMRDLTMKVKD

SEQ ID NO: 91671 - protein, 284 aa, Unknown
  Obtained from environmental sample
  DOMAIN (121)...(265): SpoU rRNA Methylase family
  misc_feature (1)..(284): Xaa is any amino acid
MFPLSKLATLPRHQRLRKAAKIFEGAELRLVTFGKLPADEIEYLRCLAKQLTHEEGFSPAAEDLLANAQSILGNGAQSEIRRTLNSVYHFLLSETGRTKADWDFLDSRGILDPSKRLPFAGMQVYLEDIRSPFNIGSIFRAAESFGVEKLWLSPFCADPRHKRAERTAMGCVDVLLWERLLYDPFNDQHEKPFIEESIFALETGGTPLEDFSFPTRGILIAGSEELGVSPAALAAADASLGRVSITCYGAKGSLNVSVAFGIVMQAWSSNKRKWYNQNKSIQQV

SEQ ID NO: 91672 - protein, 348 aa, Unknown
  Obtained from environmental sample
  DOMAIN (141)...(327): Protein export membrane protein
  misc_feature (1)..(348): Xaa is any amino acid
MGVGIESRTLDFPFSEHETVGSLVQALGEVEGMEVKSSIPEETSSQWLVRSAQGNSQLGSEPYLVHYLDPQSQEIPIAKVREALVSLGQSVSAQPLGQKRDRHFMIRLQDKEKEMEKETSTADGNVSTDVTAAAAARITRVLENYFGSGEVVVLRSDYVGSRFSKNLTDQAGILIACTLLLVLIYASIRFKPQYAIGAVLGIIHDCLVITSFVVWTRMEFNTTTIAAILTILGYSINNTIVIFDRMRENRRLYPEDVFVTILNRSLTETLSRTIITTLTTMLAVVSLFIFTTGSMKDFALALLVGLVSGVYTTTFIATGFVYLWDKEKVKRAKKKIVAPAAKAALAKA

SEQ ID NO: 91673 - protein, 300 aa, Unknown
  Obtained from environmental sample
  DOMAIN (1)...(300): Polyphosphate kinase
  misc_feature (1)..(300): Xaa is any amino acid
EDVIITWGAYLFSGYRVKESMLFKINRDADFSVDERRDEDFVEAMAEVIEGRDKSDVMRMVYSSGSEKLRDELARRFSLETDDLYEVDGPINPVDFLELTNIAGLEKLIEEPWKIHKSKEFSEDIPIWDRISQGDVMLHLPYQSFDPVVRFFQEAADDPNVISIKTALYRTGGAIPGSGMQVSSSAFSPVVKALEQAALNGKHVTAVVELKARFDEERNISWAKRLEKAGVIVVYGLSLLKVHSKITMVMRRENDRVRRYVHLSTGNYNYRTARYYEDICLFTCREDIAYDASLMFNMLT

SEQ ID NO: 91674 - protein, 213 aa, Unknown
  Obtained from environmental sample
  DOMAIN (10)...(195): haloacid dehalogenase-like hydrolase
  misc_feature (1)..(213): Xaa is any amino acid
METNEETFLPAAVIFDMDGLMIDTERPFIKLWPEIGNKFGYSITVDSILRMVGINAESAHAVMVQEYGADFPYEKMRDELRILYKKEFKDGVPHKKGLVYLLDRLCTADIPLAVATSTRRATAIETLDKAGVLGRFTAIIGGDEIKNGKPAPDIFLLAAEKLGQPPGSCVGLEDSTAGLMALHAAGIKSIFIKDIIEPPQEVLASVWRNAMIC

SEQ ID NO: 91675 - protein, 225 aa, Unknown
  Obtained from environmental sample
  misc_feature (1)..(225): Xaa is any amino acid
ERTGAANVAVPLVSIRDGYLVDLATGVDSSLQDEFFSQIIASAVNLGRKFHFDESHGLNVAHHSMTIFDALLKEHGMNRRHRIMLETTAILHDVGTYIKASGHQKHGQYIVANSEIFGLHSDELLIIANVINYHRGDSPSNSDIEYIKLQSEERILVLKMAAILRIADALDRGHSQQIKKFNVERRRETIVIHVDGTYDFSLELIGLEEKGGMFQDVFGYKVVLG

SEQ ID NO: 91676 - protein, 110 aa, Unknown
  Obtained from environmental sample
  misc_feature (1)..(110): Xaa is any amino acid
VIINLIVDSILMKNNPNASSFFNIRMIKDTFGNNVFSGNIISILNNASELVILAIGMTLVTAASGGQDISVGATAAIAGSIFLKVVRLSNDASWFPIIIAFLVCCVVAMY

SEQ ID NO: 91677 - protein, 234 aa, Unknown
  Obtained from environmental sample
  misc_feature (1)..(234): Xaa is any amino acid
ISDPKKFYESINIVDAAYSKLSEIIDSEVRTVVAENPLRESVRNSNIIMERESHNEVAGFGEGLEEDILSFTNQSSSSYEPIIKGRRQLAEEILARSQRMVPEYGIELIDVVTRQISYSPELTPSVYARMIRERNQIAMAFRSQGEGRKAEWLGRMDNDKRSILSAAYTQAQTIMGNADARATRIYADAYNQDRDRQIFYDYWRAIESYRQTMPKFNKTLTTDMDYFRYLYSTR

SEQ ID NO: 91678 - protein, 83 aa, Unknown
  Obtained from environmental sample
  misc_feature (1)..(83): Xaa is any amino acid
KQPNELGIYDMSGNVWEWVSDWYGSYGYGAQTNPTGPSSPGSDRVRRGGSWRDDARHCRVSLRSFNFPDYRIFSMGFRLAVSP

SEQ ID NO: 91679 - protein, 242 aa, Unknown
  Obtained from environmental sample
  DOMAIN (74)...(242): High-affinity nickel-transport protein
  misc_feature (1)..(242): Xaa is any amino acid
MQGGGHDRGWLLRPADPASFPPDPASLRVVQPAGTRPFTAPERLSLVMLYGFITLLHLAGGLALLYYRAEQPALIGLGLGAYFLGVRHAFDADHIAAIDDTVCLMAQGGGRPLGVGFFFSLGHSTVVLLLAAAVVLTEAAVSLPELKTLGAVLGTAVSGVFLWVAGILNLQVLLKLLQVSRRTTAGHSHVHIEAMLMQRGLLRRLFGGRLRFIRSAWQMYPLGLLFGLGFDTASEVGLLAMT

SEQ ID NO: 91680 - protein, 361 aa, Unknown
  Obtained from environmental sample
  DOMAIN (1)...(237): Queuosine biosynthesis protein
  misc_feature (1)..(361): Xaa is any amino acid
MKTSDFFFELPDELIAQYPPEKRGQSRLMLLNRLTGKRSHHMVEELPEILCGPEFRGKDGGLPLLVFNNSKVRKARLIGVSQETGAKAEFLLVEPTPHSLLPTPHSSTWKTLVKRAKRRKIGSVYVFYDNNGVEITRAEIIGGEGDFKHLAFDRPIDDDWLDLYGHIPLPPYIKRQDAPSDSERYQTVYASACGSSAAPTAGLHFTNELLERIGAAGIESVFITLHVGLGTFLPVRSENIEDHVMHRELFSIDDQSALKIESAKAEGRKIIAVGTTSVRSLESAWDNGTIKRGENTTSIFIYPGYKFNVADALFTNFHTPESTLLMLVSAFAGRELILESYAEAIAQGYRFFSYGDAMLIV

SEQ ID NO: 91681 - protein, 151 aa, Unknown
  Obtained from environmental sample
  DOMAIN (1)...(115): Integral membrane protein DUF6
  misc_feature (1)..(151): Xaa is any amino acid
MVIAGSRSFFAALFLLALRFFFPFRRNIPNSKAVIVRTLLKEAPVLGACGLGYAATMILFVIANKLTASANAIMLQYTAPVWAALLGWLFLRERPRFEHWAAMALVGFGMFLVFRGGFAAGSFLGDILALVSGITFAANSVILRAREDKHP

SEQ ID NO: 91682 - protein, 216 aa, Unknown
  Obtained from environmental sample
  DOMAIN (117)...(171): Transglutaminase-like superfamily
  misc_feature (1)..(216): Xaa is any amino acid
ASPADTLWQTVDGFGNNALAGHISAPHSHFCFGIEGVAEVSGEPYISCGEPPRMLLYPTELTRAHSGLVDFYNDINNFAPAKALDRIQFFSHAVHSRLRYKRGVTENSTSAAQAFDIGAGVCQDYAQILLALLRLDKIPCRYVAGLASDYGETHAWVEAWTGVRYCATDPTRDKLIDEGYIALSRGRDFIDSSIERGVFKGACRGTQTVSLKMEIS

SEQ ID NO: 91683 - protein, 737 aa, Unknown
  Obtained from environmental sample
  misc_feature (1)..(737): Xaa is any amino acid
FDSDATAARIVHNVPQDGDIITGDFEISGLAYTDVGVSAVCWRILSPQNSWEPPEVTLARGGTTPFNRIETSQNYMVNLTLADVRDGENILEIYAEDYYGEPGPLVTKMFGVSTAPPVTTVVEPSKEVWNKGSMIVRGTAYDRNGVDEVRISMDNGISYQRADIIADNQDRPSVWTISLNTRAYADGQYSMLIRTTDGYKVQSFTNAIINIDNTPPMIDMGEPKNDAPIGRTLDISGQIYDNLKVKFISILVADTNNPDSFMVVEPPVEPVVMQTLDVRSYRDGDYTLTITAEDMSGNQTVVVRNVRFIKAKAASEIALINPLSGITHRGSTVISGRITGAVIPESVELMLDRVKIADVEVNKYGIFRHELPDTFIHEDGSIGISAAFQAPSGEWVASHENLVKVERYGPVLEITSHKDGDVITGRPWIAGNAYMFRPPGEMVNRQIRALYGVAKVELSFDNGRTFVPAKGTGDWKLRLETSEMEVGILPIIVRATFNNDEFAVRRILLIVDPVLPLVNVIGPVENSGYRDKVNVFGSTMDDYDMDSVEVSLRPGNKFGYSVPGFIQGLYFDTSFLGGANFCAGLGLTFLSDNVKVQGNTSQTPSGRYSGWAFGFKVIGNVWAENLGKWFGPDWAFWRTSVGVGAHFSYYLMEEGENPLWMGQIIAQWEIIKADMSFFFPKWKYFKSLSLYFEPGLWFAPSDVNSDWEYDPDTHKPLKNKAWAIRPTIAIGIRVNLF

SEQ ID NO: 91684 - protein, 627 aa, Unknown
  Obtained from environmental sample
  DOMAIN (203)...(465): Competence protein
  misc_feature (1)..(627): Xaa is any amino acid
MKPDTNFTAFFDGLNRYPAFAGAISVLLALGATVHWQIAFLLAFWVYALNPVLRKVSLIVCAIILTLYFSQKDSFSFAENPPANGLGYVEEVLNRPNGYAIILNTNFGKTRLSFAGEETPLPGDSIFWQAKWFPVTPPTVPGSFNAPEWMRSQGYRASGSLDSVQILSSKFSFQRISFSAKQKLEKRFSEFYEKPESGLLMGLLAGDRSGISENLQSDFRRTGLVHVLSISGFHVVMLAGMLTLFLRTLRLPHKVSQILSIALLCIYAPITGCSAAVWRAVLMFCVIECSGLFQKISSSINALGVALILILVFDTQQVFNAGFQLSAAATFGILIGQRIKLPNLKGKIGKSLNSFIIEPSFITLCATLSTLPLLIFHFQSFSPISWLGNLVVVPLVGLGMQAGVLSLVGVHPFVCQVFADSATILLRSASVITSFLAENPYASSTIGPWPLPCLFAASILVAMLPFLKNANPWGRHIAIFCLLICSIFFLGAEIKKNFFPSWSAVFLDIGQGDGILLRSPAGRFYLVDTGPPLKKRSMAKDKIIPYFRSQGISKIDAIIISHPHSDHYGNAADILKEFPVQELWTTECAQNVIDHGWQAVLNIAKAKGLEIKNLQAGLNLKEEMLLS

SEQ ID NO: 91685 - protein, 197 aa, Unknown
  Obtained from environmental sample
  DOMAIN (90)...(197): Aminotransferase class-V
  misc_feature (1)..(197): Xaa is any amino acid
MITPNDYGLPDPKELEQWALPYFPEFQEKKTDDAKTAYSPVVTPYNGTSAVTSPEGGKNSPLGTGGFDVNRIRQDFPILSEKVAGGKQLIWLDNGATTQKPNAVIDRISYFYRHENSNVHRGAHDLAARSTDAYEAARETIAKFLGAPSKDNIVFVRGTTEGINLAAHSYVKPLLSPGDEIILTILEHHANIVPWQL

SEQ ID NO: 91686 - protein, 179 aa, Unknown
  Obtained from environmental sample
  misc_feature (1)..(179): Xaa is any amino acid
MSSLSIPAANGMAHDLLALGALVTRLDPGIIPFAEASEYLLHVSGGEYNVATNLSTCFGMKTAIASAMVNYPIGRRIEYAVQKAGVTPYYKRFEHDGVRGPNMAIVWSDRGQGVRAPVVFYNRSNEAAQQLKPGSFDWDAIFKKRRSLVSLRRNFQRAFPHYKRIGNRGNAGGEKSRRG

SEQ ID NO: 91687 - protein, 186 aa, Unknown
  Obtained from environmental sample
  misc_feature (1)..(186): Xaa is any amino acid
MIPQKLDLRFGIIATMILLAALSRLIPHPHNFSPIGGMALFGAAYFTKRHWAFIVPLVSMWISDLALNHIVHGAYFDHFVWFYNGSLFTYGAFALIVLLGIFSLKKVHIHNLVISALGASVIFFIVSNFGVWFSGIMYPKDLSGLVACYVAGIPFFQNTVFGDLFYSTVLFGVFELSVRKVPRLAC

SEQ ID NO: 91688 - protein, 264 aa, Unknown
  Obtained from environmental sample
  DOMAIN (1)...(247): Citrate synthase
  misc_feature (1)..(264): Xaa is any amino acid
MAMRHYFYKESLVIHQVDPACSISETLLSLIRPDQKYTQYEAQLLDWALALHAEHGGGNNSTFTVHVISSSDTDTYSAISAGIGSLKGFKHGGANAKVIGMMEDIKKHVKNWNSEKEVAEYLEKILRGEAYDRSGLIYGQGHAVYTINDPRATLLRDKAVALAEEKGFIKELNLYRLIEKLTPTVFKKVKGSEKDICTNVDFYSGFVYKMLGIPPELNTPIFAVSRAAGWCAHRLEEIITGGRIIRPAYKCIQLRHLYTEIDKR

SEQ ID NO: 91689 - protein, 83 aa, Unknown
  Obtained from environmental sample
  misc_feature (1)..(83): Xaa is any amino acid
MNVGVAGLGLIGGSLAKAYSSGNHTVYGYDIDESILSFAKLSGAVKDPLDANTLKLCDILLVAVNPEDAVKYMENTAPNIAKH

SEQ ID NO: 91690 - protein, 371 aa, Unknown
  Obtained from environmental sample
  DOMAIN (236)...(341): Nucleoside recognition
  misc_feature (1)..(371): Xaa is any amino acid
MSKTAFEIAIGLTGILAFWLGIMKIGEKAGAVQMLARLVSPLMKRLFPSVPSNHPAMGSMLMNISANMLGLDNAATPLGLKAMKELQDINPNKDTASDAQILFLVLNASGLTLIPVSIMTYRAKLGAANPADIFLPILFATFFSTVAGILVTSFFQKIEIKNMVFISWFVGLCAAVFGTLWYFSTLSAEAMGVASAFLGGIILFAIIMFFLTLAAIKKVMPFDAFVEGAKEGFSTAVMVIPYLIAILAAVAAFRASGAMDFIMSGIVAGFNFCGIPADIVPSLPTAIMKPLSGSGARGMMVDAMQQYGADSFAGRLSCMFQGTTDTTFYIIAVYFGSVAIRKTRHAVFCGLAADVAGVIAAITIAYIFFPP

SEQ ID NO: 91691 - protein, 86 aa, Unknown
  Obtained from environmental sample
  misc_feature (1)..(86): Xaa is any amino acid
MSDVMAFVKERVLLMTGLVNPQVIRTAELLDIRAIIFVRGKMPGRDVIEMAEQSDIILGGTKLPMFITCGKLYEAGLRAGGTREIN

SEQ ID NO: 91692 - protein, 195 aa, Unknown
  Obtained from environmental sample
  misc_feature (1)..(195): Xaa is any amino acid
MGKIKSALEIALEKTESVKSDKGSIGQFEAKQNGKKLANQFLEGAVKSLEEEIKKSPPAEKESLKQGIFDVLISQIALPQVKDDIKRIDAAGQGLCTIIGSKRFAEISKQFVQIMGQFMEETAHFEEAIKKQYAPKLRQKEEELSRRMGRNIKLDPFQDPEFANFFNQNMQALKANYQSAADQVREEAQRLFEKK

SEQ ID NO: 91693 - protein, 293 aa, Unknown
  Obtained from environmental sample
  misc_feature (1)..(293): Xaa is any amino acid
ARARRSALEEQKKAATDKTVTEYELSKEKDKQQKKTEIIKKANKEQTEIELAGLKEKLNLMALTENQARNEQISAVQSFLQQRAELESDNYGERIAFLEQQREELRSLYAEGSNERVAIEIAATQAIKNAHQDLADFEKELLEKKLTAFAGFFNGLGQLMELAGEKNRSAAIIAKGLASAEAAINSYLAFTKALASAPYPYNIVASAGVLASGLAQQMKIISTPIPSAETGGRFIVPQGNGVDGHLYKFNQGEEVQVTPRSQVGRGDGNFNFNLVVDGSVIAQVVNKQARAGE

SEQ ID NO: 91694 - protein, 76 aa, Unknown
  Obtained from environmental sample
  DOMAIN (1)...(74): Cobalamin adenosyltransferase
  misc_feature (1)..(76): Xaa is any amino acid
LIEKLESELPAFASFAVPGANPASAKLHIARTVCRRVERRMISLVLDAETKAAIVPYINRLSDLLFLLAQKEAEKN

SEQ ID NO: 91695 - protein, 310 aa, Unknown
  Obtained from environmental sample
  DOMAIN (10)...(295): Dihydroorotate dehydrogenase
  misc_feature (1)..(310): Xaa is any amino acid
MISNNIAAVDLSVTIAGVRLKNPVIAASGTFGYGREYAGIIDVSRLGGICTKGLTLNPRPGNKGIRVWETPAGLLNSIGLENPGIAAFIEKELPFMRKLGPAVIANLSGSTVEEYAQGAALLNESEVDMIELNISCPNVKAGGMTFGLDPQAAASVVEPVRRALTRKPLMVKLSPNAPDLTAVAHACINAGADALSLVNTFKAMAIDIQKRKPVFDNISAGLSGPAIKPIALRMVWELCRELKSAVPIVALGGIAGANDALEFLMAGAAAIQVGSATFAHPATMIEIIDGIEDYMRRCDIAKLEDIALRD

SEQ ID NO: 91696 - protein, 246 aa, Unknown
  Obtained from environmental sample
  DOMAIN (1)...(246): Phosphoglucose isomerase
  misc_feature (1)..(246): Xaa is any amino acid
MFTGQKINATEGRAVLHTALRAPKDAVVNVDGRNIVPDVHSVLDAMEGFANKVRSGDWKGHTGKAINAVVNIGIGGSDLGPVMAYEALKHYSKRDITVRYVSNVDGTDIVESLRDLDAETTLFIVSSKTFTTQETMANAMSAREWLLGSLKDEAAIAKHFVAVSTNAEKVTQFGIDKANMFGFWDWVGGRYSMDSAIGLSTMIAVGPDVFRQMLNGFHTMDCHFRTAPFAENMPVLMALLDIWYTG

SEQ ID NO: 91697 - protein, 299 aa, Unknown
  Obtained from environmental sample
  misc_feature (1)..(299): Xaa is any amino acid
MKKKEETPLHWSQHKEKAAGYWHIKLMLVLFRLFPVIILRVLAFPVGFFYFLFSKKGRTESKRFLRKAAPLVTQKGIARKCRSPFGPLRHIVSFSLTLVEKIEAWGGKFQFKHIHFQDDDIDELVQELESGQGIFMITSHLGNIELLRGLASFNRTKVSRKTPITAVIDMKVNEKFTRMLKELNPQSSMDIINAGEIGPHTAVLLEDKLAAGEIVTIAGDRTAAGSHAANADGHGKNLIIPFLGENAPFSPGIFYLAALMKAPVYFVFALRRGDLSVLPEYDMYVHKSRVSLNVPARNV

SEQ ID NO: 91698 - protein, 619 aa, Unknown
  Obtained from environmental sample
  DOMAIN (500)...(612): FabA-like domain
  misc_feature (1)..(619): Xaa is any amino acid
MPRSIPLSTFKNDSRPLSTVLCYEGAWSDAVYHTWGDFLEGVAELRRSINAAGAQGGEQWLLHCEDCWYFLLAFTALLQCKKKVLLSANVSPAYIAEIRGGGGGAAAHGTVPFLTDQIFPEGECPENTFHIPAILKAVQKTGRLITIQPEEGPAINADETSIIMYTSGSTGKPKAVQQRLTEFEADNRFVISKWGDEFLKRKVCSTVSQHHIYGLLFSIFLPFTLGIPFRRRRIEFPEELEKLSDTEYMIITVPAFLKRAVETERSSGLNLKSPWIFASGGVLGYETAKETGEVFGFWPVEVYGSTETSGIAWRQSVNGPEWTVFDNAQISQNQEGCLIIRSPYIKDPAGLETADMVEILNDGRFLLKGRIDSVVKIEEKRISCAEMESRILQSGLAADVCVISLEDKRQYLAAVIVFNNKGKERFNGLTKHDINTFWREYLLQYFENTVIPKKWRYPESLPLDAQGKKKKEDIELLFSGEKEAADNAIVTSGAFTSGALTSEGFGALDMEKIIEKTEDSVSVEFSIPGTSPYFDGHFPGFPILPAVAQAELVIRFAARYFGTGISPSEIKRFKFTKLIRPDAPLLLTLTKKEKTISFNISSPENETVYSTGTVIPEDT

SEQ ID NO: 91699 - protein, 45 aa, Unknown
  Obtained from environmental sample
  misc_feature (1)..(45): Xaa is any amino acid
MSKIQNAFKKGKAFIAFLTAGDPDLQTTEDLVFEMVKSGGRYNRT

SEQ ID NO: 91700 - protein, 219 aa, Unknown
  Obtained from environmental sample
  misc_feature (1)..(219): Xaa is any amino acid
MNIVRAAMIGDIVGSQGLETLEARLPSLIKEHNLNLVTVNGENAAEGFGITEREYRRIIQAGADAVTSGNHVWEKREFWPFLESEKTLLRPANYPSSAPGSGFTCIEKDGVNWIVVNLQGREFISAIDCPFLCFDKISNMQEGAAKRIIIVDFHAESSREKEAFGYYADGRASLIAGTHTHVQTADERILPKGSAYITDIGMTGITDSVIGMDIKICQE

SEQ ID NO: 91701 - protein, 639 aa, Unknown
  Obtained from environmental sample
  DOMAIN (1)...(587): Hsp70 protein
  misc_feature (1)..(639): Xaa is any amino acid
NSCVAVLEGGEPVVIQNSEGDRTTPSIVGFTSKGDRVVGAPAKNQMITNPENTVYSIKRFMGRRYSEVTSEMKRVPYRIVEQGDDVRVKIDDKPYSPQEISAFVLQKMKQTAEDYLGESVTEAVITVPAYFNDAQRQATKDAGKIAGLDVKRIINEPTAASLAFGFNKDQKKEKTIAVYDLGGGTFDVSILELGDGVFEVKSTNGDTHLGGDDFDRRIMEWLIAEFKKDTGIDIGKDKMALQRLREAAEKAKIELSAMQTTEINLPFITADQAGAKHLQKSLTRAKFEQMVEDLLERSKDPCRKALEDANLKAEQIDEVILVGGSTRIPAVQQVVKELFKKEPNKGVNPDEAVAAGAAIQGGILGGDFKNELLLLDVTPLSLGIETLGGVMTKLITRNTTIPTRKSQIFSTAADGQTAVSIQVLQGEREMASQNRVLGRFDLVGIPPAPRGIPQIEVAFDIDANGIVHVSAKDLGTGKEQKIRIESSSGLSDSDIDRMVKEAEIHAEEDKKERERAEVRNEADSMIYTTEKNIKDLGDKVSAADKSKTEEAIADLRKALESGDIQSIKDKTEALKQASYKIAEEIYKQQSAAGQGGAQGAGGPDTGPDMGFNQNMGGNPGGGGTKGAEDADYEVVDDNK

SEQ ID NO: 91702 - protein, 88 aa, Unknown
  Obtained from environmental sample
  misc_feature (1)..(88): Xaa is any amino acid
MRIIWDTDKNRKLLADRGLSLEVFASLILDKKYCDILKNPSRKEQKIFIVPYKNYTYVVPFLIDNEQNIVLKTVFPSRKYHKIYGGKK

SEQ ID NO: 91703 - protein, 160 aa, Unknown
  Obtained from environmental sample
  misc_feature (1)..(160): Xaa is any amino acid
LALTGSFFSNVKSSKGPTAHSSAFLLIFFTWALACLLGALPYYFSGCIPRFTDAVFESVSGFTATGLTVLRDIETAPLPVLFWRALSQWLGGLGILLFIIVLLPPLGSRGFLIYRTETSGPEREKVTHHVNRSARLILLVYAGLTAMETFLLRCFGMNWF

SEQ ID NO: 91704 - protein, 359 aa, Unknown
  Obtained from environmental sample
  DOMAIN (153)...(359): Cation transport protein
  misc_feature (1)..(359): Xaa is any amino acid
MRRIKNNIIFRLWALLLGFFPVIMLPSLVMAIAAGEGYMVRGFAVPSCITAILALISFNSLRKNKIQLSVKLGFLLVCGTWIWASFIGAIPFYSAGLNFTDAFFESACTFATTGSTVIDNIEAMPLSLLLWRSLAHWFGGIGIVMISVALMPLLGIGGFQLVKAEAPGPEREKITPRITATAKILWLVYCALTFIVFCLYLLGGMHWFDALCHALSTMASGGVSTKNAGLVAFNSPFIEAVATVFMLLAGFNFNLYYRLLQGKFSEIKNNTEARAYLVIFAAAAGIITLSLLPVYGSFVSALRYAAYQSASMLSTTGAAIADYETWPALARMVLFGLMFIGGCSGSTAGGIKVIRHVIL

SEQ ID NO: 91705 - protein, 490 aa, Unknown
  Obtained from environmental sample
  DOMAIN (23)...(171): Anthranilate synthase component I, N terminal region
  misc_feature (1)..(490): Xaa is any amino acid
MIKPSLEEIKQIAETGQYNIIPMSMELYSDMFTPIDIFKKLKSVSGHCFILESAEDTKTWGRYTFLGFDPTMEITCLNGLMNINSNETKSFKTDNPNKQIQEILSLYNSVKFDYLPPFTGGLVGYFAYDYAKYAEPSLKLDAPDKEYFQDVDLMLFDKVIAFDHYKQKIVLIVNINVENIKAEYKSGVEKLDDLKSMIKNGVPQQPQKAKVKSELKSLFTKNEYCEMVKKAKGHIKEGDIFQVVLSNRFEADFEGSLFDTYRVMRTINPSPYMFYFSGSDLEIAGASPETLVKLHDGKLFTFPLAGTRPRGANDEEDIALEKELLNDEKELAEHNMLVDLGRNDLGKISKFGTVSVAKYKSILRFSHVMHIGSTVSGEILEGKTGLDAINAVLPAGTLSGAPKIRAMQIINELEQNKRGIYGGAIGYLDFTGNMDTCIAIRIVYRRNNKVFIRSGAGIVADSIPESEYQECVNKSKAVMDALKNSSGGLE

SEQ ID NO: 91706 - protein, 442 aa, Unknown
  Obtained from environmental sample
  DOMAIN (233)...(430): Binding-protein-dependent transport system inner membrane component
  misc_feature (1)..(442): Xaa is any amino acid
MLIPSISHGMGLILLLGANGIITRLFGLNSTIYGFHGIVLGSVFYAFPVAFLMLADIIKYEDGSPYEAAEVLGIPRTNQFFSITFPYLRKPLISVIFAVFTLIFTDYGVPLMIGGRYITLPILMYQEVIGLLNFSRGSVIGAILLIPAVIAFVFDLLNRDRANQNFIIKEKAKPENKLRDAGAACYVILICLIIAMPVLVFALLSFINSYPVDMGLSFRNITRTMNMGAGRYLGNSLVIAVWVSVLGTAISWITAYFTARTPGKSSRMLHLVSITSLAIPGLVLGISYVLFFKGTFIYGSLAMLILVNTIHFMASPYLMAYNSLGKLNINLEDVGRTLGVGRFRIIRDVLIPQTKLTILEMFSYFFVNSMMTISAVSFLSTVRNRPVSLMITMFEAQLFLEGAAFVSILILGSNLMIKCAVYVITKIIKKKAEKNEFNTNPV

SEQ ID NO: 91707 - protein, 279 aa, Unknown
  Obtained from environmental sample
  misc_feature (1)..(279): Xaa is any amino acid
YWTAIGDSAHQFLGTFDGGGFVVRGVYITKFDMGAAGNYQGLFGKVGKGGIIRKLRVAESSIQGNSYVGGMVGLLAGGSVTDCYSTSFVEGSGNYIGGLVGLSDAGTILTSYATGNVSGRDSVGGLAGAGIKDTIRGGYAIGDAAGGKFVGGLVGWSSGYIINGSATGSVTGSGDFVGGLVGSSSGNIANSYAIGAVKGGNYVGGFVGQKIGAAIKNSYAAGEITATGNAVGGLAGNIVGDATITYGYYDKDAAGDHRGAGIPKESVEMVKEDFASVLN

SEQ ID NO: 91708 - protein, 259 aa, Unknown
  Obtained from environmental sample
  DOMAIN (149)...(239): Penicillin-binding protein 5, C-terminal domain
  misc_feature (1)..(259): Xaa is any amino acid
MMNTEAANMGLKKTRFVDASGYSEENMTTARELTELCRIYLQAHPESLEDFHSVREFAYPRLENVPPEKQGNPGTRLRRNSNNLLGRVEGVDGLKTGYIPESGYNIALTAERNGTRFIAVILGAPAEWGGDRKRDEDGEKLLEWAFGRFKTIPIRMSIGAFPPVRIWKGKDNYLSFVPEEPLDFTAPVERGSQLSWETELDEPLVAPFYTGQKVGSLVLYDSLGELRRITLVAAQNAEKGGFFKRLFDSIRLFFDKIFR

SEQ ID NO: 91709 - protein, 114 aa, Unknown
  Obtained from environmental sample
  DOMAIN (1)...(107): GGDEF domain
  misc_feature (1)..(114): Xaa is any amino acid
DECLKAVAATLKSSLTRIDDFVVRYGGDELTVVLPNTDENGARLIADKMLNNIRNLVMPHKTSDVADHVTISIGVVSGIVKHVYSVDFWLSQADKMLYKSKQEGRNRYTFETVG

SEQ ID NO: 91710 - protein, 170 aa, Unknown
  Obtained from environmental sample
  misc_feature (1)..(170): Xaa is any amino acid
MQCSQCSTENRVSAKFCKQCGTVITIQSSVSSQNTASTSGNVTIDILKDLVGLDDLKEELTELQSILEGMKHHNSGGRYPCNAIIIGPSGTAKTLISNLIANLFLNSGMITKNKPVAIDGEDLDRMTDDTKLTKLFTDAKGGMLFVDNAQKLVDSEGNANLSFSRFINKM

SEQ ID NO: 91711 - protein, 503 aa, Unknown
  Obtained from environmental sample
  DOMAIN (1)...(149): 60Kd inner membrane protein
  misc_feature (1)..(503): Xaa is any amino acid
IKSVFKGDERFMLLSTYYRQNNYHPVFALRNSLDLLIQMPFFIAAYHFLHNLEVLKGAPFLFIHDLGSPDKLLYGLNILPIAMTVINVVSVMMYAHAKDLTVKDKIQLYLMAGFFLVLLYNSPAGLVIYWTSNNIYNLVKNIIQDSLKNKNSARRKEPTERVVKDDALNDCRTFILALLALALLIGLVIPSGVISSGVDEFSYSTTGELVSPLRFVAHTMLQAGGFVFCGICLYFLFQGRTRAILTTAAISLLIMSVMDTFVYWGNYGFLTKELVLSNYENPRLMQQCSAIAVIIALFAVAYFLMNIRWKQIIISILAITVISFAIFGVTDIVKTNAAIANIKKRRIGSGGVSGDNQTDTIEKAFKLSRNGKNIIILMMDRMQSQHIPFIFKEKPELIESFQGFTYYPNTVSPGAHTFYAAPALFGGYYYTPDKIQRRVKQPLRDKYNESLQVIPRMMAQNNINVSVTNLPFTEESEEFAKQTFSDVENIETTDIIDKYIDRY

SEQ ID NO: 91712 - protein, 376 aa, Unknown
  Obtained from environmental sample
  DOMAIN (85)...(319): Transposase DDE domain
  misc_feature (1)..(376): Xaa is any amino acid
MRRRGRAIGGPSDLMWLVLTHLSQGQTLANMSALSKASGLGRLSDVAFMKRLINCDKWFEWILERLGPASVADCLKPKGLDKYRVLAVDASVVRSGVSKFSRSWRLHFALDIFSLASHEFRVTDDKTGETLANFRAAKGDLFLGDRGYASKRGISHCLSGGADFILRLRHEAFAMHSESGGRIDLLELLAQAETGEAIGIPALVDLGGHGLGVRRVRVCALKKSGKDMEKTLKWMNHNDSKKQRRASRGARRFSEYVVLVTSLPDDVSPEDVLSAYRYRWQVELYFKRLKSLLGAGEAPKKRAECMRAWLNGKMVLAVLFEVLLSKLDFSPPGQGRPAKAQRLEGDVFFRVRRQEQCPAPGGRRQGFFDDRQAAPR

SEQ ID NO: 91713 - protein, 257 aa, Unknown
  Obtained from environmental sample
  DOMAIN (35)...(257): Ethanolamine utilisation protein, EutH
  misc_feature (1)..(257): Xaa is any amino acid
MDINTIILWVMMRFMLIAALDRIFDQFGGAEPVLGKIGLGFLGQKITGVGKQFEEGFMAMGALALAMVGVIALAPVLASLLGAVVTPVYKALGANPAMFATTLLALDMGGFPLAKEMAGGDIAAWMYAGVILGSMMGPTIVFSIPVGLGIIDQADRRFLALGILAGIVTIPIGCIAGGLTAMVSGVVIDGQPVNFTLPVIFLNMIPVIIVAALIAIGLKLAPEKLISGFQVFAKILVAIITIGLAAAVFQDQLGITL

SEQ ID NO: 91714 - protein, 243 aa, Unknown
  Obtained from environmental sample
  misc_feature (1)..(243): Xaa is any amino acid
MAYKSFAVTVSGGSHTKHDRECQDASFNSKEDKGFSIAVVADGHGDDNCFRSAKGSELAVACAANGIQEFVKIYESKFSHGLLGKKDLPAQEEFDKAIHDLVKHIIALWQVKVEEDYTAHPFTAEELGKADEKHRKRYEADAGSRNKAYGTTLIAAAITKGYWFGIHIGDGRFTALYADGIFDQPVPWDERCYLNVTTSICDDDAYQSARCYFSYHEVKPPPVAVFLCSDGIDDNYPVDENEK

SEQ ID NO: 91715 - protein, 268 aa, Unknown
  Obtained from environmental sample
  DOMAIN (17)...(265): Protein kinase domain
  misc_feature (1)..(268): Xaa is any amino acid
VELPKGYTIQTRNFKKVVVDQILGEGGQGAVYRVDYDGQAKALKWFSGKKFKNPDKFYANLENNIKKGKPTDAFLWPEDITEKDGEAFGYIMDLRPGEYKDFSKFLIGKEGFASITAMTNAALHIIAGFRELHLKGYSYQDLNDGNFFINPKNGDVLICDNDNVSEYGKNSGIAGKARYMAPEIVAKNAKPDIKTDRFSLSVVLFMLWTNNHPLEGKAACPVCMDAKHEKEIYGKNPVFIFDPGDKSDRPVQGLHKGAITRWPFLPAY

SEQ ID NO: 91716 - protein, 106 aa, Unknown
  Obtained from environmental sample
  misc_feature (1)..(106): Xaa is any amino acid
MVMARKREKKEKDIIDQMLDNIDFRGLTQDEVVGQNGLIKQLTGKILQRALEAEMTEHLGYVKNSNAGDNSGNSRNGHTEKIVLMENQRATIDVPRDIRADHSSQA

SEQ ID NO: 91717 - protein, 69 aa, Unknown
  Obtained from environmental sample
  DOMAIN (3)...(51): Uncharacterised protein family (UPF0150)
  misc_feature (1)..(69): Xaa is any amino acid
MTKHEIIIYWSKIDNAYIAEVPELAGCMADGKTYIEALENVELIINEWIETAISLGREVPEPHGKLMYV

SEQ ID NO: 91718 - protein, 85 aa, Unknown
  Obtained from environmental sample
  misc_feature (1)..(85): Xaa is any amino acid
MGQYGKLVQQILSGRQDKSILFSEAVSLMQRLGFSMRIKGSHRIFFQEGIDEIINLQPDGSKAKAYQIKQIRDIMVKYQLGVEDD

SEQ ID NO: 91719 - protein, 144 aa, Unknown
  Obtained from environmental sample
  misc_feature (1)..(144): Xaa is any amino acid
GDLRFEYGKGIYVSKPPASSACIVSSGHGVYEAITAARLLEEKGVKTEVIDMPSFDAKMAIELHDSGKKIALAEQNNGYLWHHFRKTLFGRKNLKAENLIPINLLDKNGNARFLHSATYNELLSHNGLAPEQIAAAVMNAVKSS

SEQ ID NO: 91720 - protein, 271 aa, Unknown
  Obtained from environmental sample
  DOMAIN (20)...(270): Transketolase, thiamine diphosphate binding domain
  misc_feature (1)..(271): Xaa is any amino acid
MFEQCKKSERLRKRAFLKLLEIKDADIRLLTLLQGKKAVDKGVHIGGAFSAVIPLTALYYGGIMNYDVEQPTCPGQDLFVLSKGHAVAALASIYADLGYFPESYLINSRSHDSLLNGHPGPLLPGVHASTGPLGEGICVAQGFALAARCGRSFDVFTMVGDGELQEGLPWEAVMFSGAKHLDNFCVLLDKNEGQLDITDRLHYPMNNLCKTFESFDWNVYNVDATKYEPVLDAMTEFKYGSRNGRPTVIICSSRKGQGGLSSFMVGHKVEF

SEQ ID NO: 91721 - protein, 313 aa, Unknown
  Obtained from environmental sample
  DOMAIN (136)...(273): Thiamine pyrophosphate enzyme, C-terminal TPP binding domain
  misc_feature (1)..(313): Xaa is any amino acid
VYMQNSGIGNAVNPLLSLADSDVYRIPLVLVIGWRGEPGVHDEPQHIKQGKVTCSLLESMGIPYVILESNEDGANYQIETCFKTIAETNAPYALVIRKDIFAPYTFQKKKEHGAIMTREEAIEEIVSCRSGIIVSTTGMISRELYELRDKAGTGHARDFLTVGSMGHASSIAFSIALQKPQLQVTCLDGDGAALMHMGALAAIGTLKPRNYCHIVLNNGAHDSVGGQPTIAPFIDMPAVVRACGYIKVYQVKTKEELKKILAEKHEGLTFIEVKVKKGARKDLGRPKSSPQENKAAFMKFIEEYRLRVAEPFD

SEQ ID NO: 91722 - protein, 351 aa, Unknown
  Obtained from environmental sample
  DOMAIN (144)...(233): Pyridine nucleotide-disulphide oxidoreductase
  misc_feature (1)..(351): Xaa is any amino acid
LKYVIIGNSAAGIGAVEGIRSVDKQGEITIITNEAYHTYSRPLISYLLLGKVTEETMRYRGDNFYRDNNCTVLADTIAEKIDAAAKNVVLKYGKKTPYDKLLVATGSSPFVPSFQGLDTVKDKFTFMNLDNALKLDTALGQDKRVLIVGAGLIGLKCAEGIHERVKHITVLDLAPRILSSILDEDGAKLVQSHIESKGIEFGLSANIKSFKSNTAILESGKTIDFDILVLAVGVRPNTALLNGIAKIDKGIAINEKSETSAPDVYAAGDCTQALDISSGQNKIMALLPNAYMQGECAGINMAGGKKIFDKAIPMNAIGFFGLHMITAGSYAGDVHAETGNGNYRRLFTATT

SEQ ID NO: 91723 - protein, 316 aa, Unknown
  Obtained from environmental sample
  DOMAIN (21)...(207): CbiM
  misc_feature (1)..(316): Xaa is any amino acid
MSDALLSPAVGVSMYAVSTAACAYAVNRIKKDDLCEKKVPVMGVMGAFVFAAQMINFTIPATGSSGHIGGGVLLAAMIGGLPALLSISAVIIIQCLFFADGGLFALGCNIFNIGVVPCLIAYPLIFKPLIKKGMAIKRITAASIFAVAVGLQLGAFCVVLETQLSGITALPFSTFLLLMQPIHLAIGVVEGIITAAVLCFVYKTRPEIMDSTQSKTVIQSGVPMKRILIVFAITTAIVGGAISLFASSYPDGLEWAIEKTIGTAELKTTNPIIEKAAQVQGAVTVMPDYGFKNTGKRRFRNRDGGGGYRRRGAHLF

SEQ ID NO: 91724 - protein, 229 aa, Unknown
  Obtained from environmental sample
  DOMAIN (26)...(208): ABC transporter
  misc_feature (1)..(229): Xaa is any amino acid
MLKLQDITVVYPDKTKAINGVSFTLGERESIAIIGENGAGKTTLLLAIVGILELSGGSVEINGIPLTKKSVNEIRKQIGLVFQNPDDQLFMPQIYDDAAFGCRNLGLPETDVHKRVDETLTRLKINHLRGRSSIKLSAGEKRMAAIAAVLAMNPSVLILDEPTAFLDPKAKRALSETLNGLQHPKIVATHDILFASDVCNRLIVLKNGQIAADRAPFPEDADFLRDYGL

SEQ ID NO: 91725 - protein, 405 aa, Unknown
  Obtained from environmental sample
  DOMAIN (127)...(349): Methyl-accepting chemotaxis protein (MCP) signaling domain
  misc_feature (1)..(405): Xaa is any amino acid
VALLDEYTPSVKATMALFLEGIEATAKSEAVAQAMIDKVDEFINIIGNVALQYTRTLSSAMSRIILVMSGGPVVALLVSLAFGLLVTRSLVRAIEAVIASLSKSAYEIEQSSKRLTKYAGALSGGTTENANNLQDTSSSLEEVSSMTKRNADNALEAKTLMGQATDIVAQADGSMAKVTEAMDEIARSGGEINKIIKTIDEIAFQTNLLALNAAVEAARAGEAGAGFAVVADEVRNLAIRSAEAAKNTADLIEATIKNINSGSDMVNATAEAFKVVETNAAKVGSLVSEVAAASKEQSQGITQITKAMSEMDKVTQANAATAEESASAAAQLSQQANNLLQVVNEINVLAHGTGGRAQSQGAAAQPRLNAPTPPPPAMPMPPRPPAGNQASEANKAMPMDDSFDF

SEQ ID NO: 91726 - protein, 93 aa, Unknown
  Obtained from environmental sample
  misc_feature (1)..(93): Xaa is any amino acid
ADHSWHLFPVVLRPGGPDRNRLIDDLAARGIGTSVHYRPLYRMKYYAERYGLSPEAFPETEKIWAGTFSLPIYPSLSDGEIDHVCAVLAELAG

SEQ ID NO: 91727 - protein, 664 aa, Unknown
  Obtained from environmental sample
  DOMAIN (105)...(289): Peptidase M16 inactive domain
  misc_feature (1)..(664): Xaa is any amino acid
MRFGPEVNAYTYFDQTVYGIEVPVENDGAGVRRIPETALAVIDDWTRAITFSPADVDDERPVIIEEYRTRLGAWERLRRKWLPVLFRGSPYANRMPIGLPEIIEGAPAERLAGFFNKWYRADNMALIFVGDFDGAALEASLTDHFMIEKPAEPTNRPLYDLPLPKKGNVEVLTLTDSELTDTNIMLYYKRSPQARRGDLSYYRGEIIDYLIDTMLGMRFEEALLKPEVPHVSVNAGIASYAASSRFYVLMSTAKTGSAEASLEDLLKIKETMFRYGFTDSEMETAAEMLISDLQKLVQEKDKQHSQRYINSLTDYYLKGGNYADVEWELNAVTRMLPHIKARDINAAVKSYFSSTDIQVFIFAPDSEQDSLPDEARIRQMIADSGKMKIAAPKYKAVESGLLSSTPKRGSVVSEFTDDDTETILWELSNGARVILETNNQSNDEIIMEAIARGGTSSAAPEDYVSARLATKMTQVSGLGPLTRPELTRKLSGIKVSLSPSVYNYYRGFKGSSNSGGLKTFFEMLYLSFTDYRIDSEAVQAMMAQYRTSLALRDKDPQTVFSDEIDRMIYSGHPHFKPLELSDLPKANIDTALAFIRKALNPADYTFVFIGNMDLYIMREYVESYLAAIPRGESWNTWKDLNIKRPGKVEKIVYKGRGEASSVYM

SEQ ID NO: 91728 - protein, 120 aa, Unknown
  Obtained from environmental sample
  misc_feature (1)..(120): Xaa is any amino acid
MTEERYYIGMDVHKDSVQMAVFEQTGEEPIYERKLNNDPALLVKEARRFSQKGETEAAYEAGCLGYVIQRAFDKAGIACHVLPANKVAKKRDDRIKTDKRDARLIGRELRSRSIRPISVP

SEQ ID NO: 91729 - protein, 166 aa, Unknown
  Obtained from environmental sample
  misc_feature (1)..(166): Xaa is any amino acid
MKILVHDLNEQDFLQLGINKNEFKVINANAASAPCIGCFNCWFETPGKCKINDCLQNIGSLLGNGEETIIISQNCYGGYSEQVKKILDRSVPASTPFFTYRSWKIRHIKRYRTNRKQLTVILYGDFLETELKAAELMVDGNRGNMGFKKADLYMVNHVNEIGQVLK

SEQ ID NO: 91730 - protein, 547 aa, Unknown
  Obtained from environmental sample
  DOMAIN (14)...(142): Tripartite ATP-independent periplasmic transporters, DctQ component
  misc_feature (1)..(547): Xaa is any amino acid
LVEKGICIAALVSLVLIAVADAFARLFGGGVPASTGLLIHILLVLGLFSGMFTAKTGEHISITLIHYIKDGKIRRIIAIITGFISVFICTIIAWSSVSFIKIAIEPKLIGFIPNIVFLLAMPLAFGVMAIRFSRQLPVKSLGVLALVCGSVAAFPVIVKIIWGFNAPDSVYHLVDLFYDALFHVRLPLIILLAAAALMGAPVFTVIAGIALTAIQSAGGEAETVNNSIFSAFTDTSIIAIPLFTLTGFILSESRAGHRLVKTFRSLLSWLPGGMIIATVIICAFFTSFTGASGVTILALGGILFTALSGASYPERFTIGLLTSAGCIGLLFPPSLPIILAGAASRTNIVHMFLGALIPGCILIVAMIVIGIAASKKVKIPVEPFHLRAAVSSLKESAAEILLPFFLIVGYFSGICSLTEIGAISVIYVFIVEVLIRRDIKFSEFPRVFYKALPIIGGVLCIIASAKALSYAIVDTQAPENFAHWMRGAVESKYLFLLLLNLALLVVGCLMDIFSAILVILPLVSPLGAVYGIDPVHLGIIFIMNLEV

SEQ ID NO: 91731 - protein, 482 aa, Unknown
  Obtained from environmental sample
  DOMAIN (1)...(467): FHIPEP family
  misc_feature (1)..(482): Xaa is any amino acid
IIGAALTGEPLTTALTTYTSLSIGDGLLSQLPALLISTAMGIVVTRAAAPGDLGEQVAIQFSRDSRAYWIASVVLFGIAWLPGFPKYVLIPMSVLIGFYAFNIGRVQKKQESFNEMMTKTGEAGRKAKDDKGDIPQMEPPDHLSLELGFGLIPLVDKDKGAELLERMQGMRRQIALDMGIVIPKIRIIDNIQLGSSEYCFKIRGVDVGKSTIRMGNYLCINPGTAKEELSGEKTTDPAFGLPAIWIGEDKRDEAERAGYTVVDPPSIIATHLTEIIKHHAAEILGRQEMQAILDALKKDYPAVVDEALKTLNLGLIQRVVQNLLKEQVSIRNMVAILEALADYGPATRDIPFLTEKARQALSRQLCLQYADAEKVLRVLTIEPSLEQKIIDSKVETVSGVISALDPPVQKNWINALSRAVSAVQEQGWLPVILTSEAARFLVKSSTFRELPELAVLSVPEIGDEITIKVEVVGEIRMESEVK

SEQ ID NO: 91732 - protein, 329 aa, Unknown
  Obtained from environmental sample
  misc_feature (1)..(329): Xaa is any amino acid
MKDRKSIPKTALPRIYFIDREIASGRYPNTRTLAEAYATGTATISRDIEFMKDMMNAPIEYDYTRKGYYYTEKTFRLPAAFASAEDMLALGMAKTLLSLYQNTPIYDAAKGLMESVTAPLGDGENPRWYEERVIVPPVPAVQFSPEVWNVACEALRKNRVLKFEYRSTWKSGYTPRRVRPYQLLFDNGAWYLYAYSTEGRGMRMYSLPRIRNISLENETFAFPTDADYRARVDGSYFGAYSTEKTRRFRIAFYNDGAMRIKERLWAADQRIKETPDGVILSFSSSQYGKVLELILANGRDAQPLEPKELVRDWQDNIQDMRKLAEPSKK

SEQ ID NO: 91733 - protein, 369 aa, Unknown
  Obtained from environmental sample
  misc_feature (1)..(369): Xaa is any amino acid
MNRIILIGNGFDLAHGLETKYTDFIDDFWMKKLVTFIDSLKNNNLKRVPDYDVPNYDAFGYIDNDISVYVKDYRRIHQNAEIVEAEINFQTFRNYISHFKPNTHQSNYKFNNLFLEQISGKQQLQKWVDIEDEFYSALLECLENKKKEEKIKKLNEDFKQIQILLQIYLSKQIEKKVSFNNNIEKNIYSPLLQTDFIDDIKETKLDNICFLNFNYTPTTVLYSNGRKDVKTINIHGQINNSNNPIIFGYGDEKDDNYKRIEKENNDFLQYIKSFMYSRTNNYKELLTFINSDVYQVYIMGLSCSTSDRTLLSTLFEHKHCKSIKIFYYNKNSIENDYLDIYMNISRSFNNKEKMRELVVSFENSIPLIG

SEQ ID NO: 91734 - protein, 340 aa, Unknown
  Obtained from environmental sample
  DOMAIN (219)...(305): Transposase IS116/IS110/IS902 family
  misc_feature (1)..(340): Xaa is any amino acid
MEEEKRRHVGIDLGKREYTMAVIGKNGKMTIHHGKTCIQGRQALYRLLEPTDKVALEAGNLAFIMAREIMERIGCEVRVLNSAKLPFIWDAPTKTDKEDAMKLAHLVEERRDEKLPIVPLPSEKELERRKTISSYGREMNNRTRLINTLHAIFVHQGHTTIVKKNLATAERRREAIQVLTGHEREEAEWLLKYLELHEQRIKELRVKIKEEAANDEDMKRLQSIPGIGPVVAYAFTAHVGDGSRFSKGAQVSNYIGFVPRLDYSGTIQRHGHITKRGNGYLRGLLVQAAWTVTLCKKGGALSTRYKYYTLCQEVSKKKTIVSIARKLAELMYSVFTHTTI

SEQ ID NO: 91735 - protein, 159 aa, Unknown
  Obtained from environmental sample
  misc_feature (1)..(159): Xaa is any amino acid
FARIQKTQDEAWAAIRETQKNVGGLSNSLGSIVEHILTPGLPQKFKKFGYSFNRIASYSYAAGVYAQIDGMLENGTQAIAVEVKTKLRKTDIDDHLLRMEKIRKYADEHGDKRQFMGAMATFITDEDAKNYALNKGLFVIEPSGEDVKVIKPAVEPRVW

SEQ ID NO: 91736 - protein, 327 aa, Unknown
  Obtained from environmental sample
  DOMAIN (155)...(243): Hpt domain
  misc_feature (1)..(327): Xaa is any amino acid
MPYGKVLVVDDVETNLYVARGLMAPYGLSIETAVSGFEAIEKIKNGAVYDIIFMDHFMPRMDGIETVKKLRIMGYTLTIIALTANALAGQAEVFLEHGFDGFISKPIDIRQLNVTLNKYIRDKYPPEVIEAARRQTARLMAKTSIEKAKPSAGSELAAIFTRDAEKAISELKTILSGSFSNKDDLLQFVINVHSMKSALANIGETELSDVALKLELAGRAENSTEILSETPSFLEALSEVIEKNRPKEDDEQGEVVDWDDAYLSQKLADLQAACAVYDTGTAKAISAELKQKTWPHKVKELLNTISEYLLHSDFEEAAQLIKNFLQL

SEQ ID NO: 91737 - protein, 161 aa, Unknown
  Obtained from environmental sample
  DOMAIN (3)...(161): Tetrapyrrole (Corrin/Porphyrin) Methylases
  misc_feature (1)..(161): Xaa is any amino acid
MATLYIIGTPIGNLGDISFRAVETLKNVDLVACEDTRRTIKLLSHLGIRVKMLSCRSQNEEFAAEKVISALNQGQNVAYASDAGTPALSDPGAVLAKAAFEAGHDVIPIPGPSAFATLLSVAGGRDKTVVFEGFLSPKPGRRKSRLRELMAMEAACVIYES

SEQ ID NO: 91738 - protein, 579 aa, Unknown
  Obtained from environmental sample
  DOMAIN (551)...(574): 4Fe-4S binding domain
  misc_feature (1)..(579): Xaa is any amino acid
MKTLMLGDHAVAQGAYEAGVKVAAAYPGTPSTEITECMATFKEVNAEWSVNEKVSMEVGIGAAMAGKRALVAMKHVGLNVAADPLFTFSYTGLNAGLVVAVADDPGMHSSQNEQDSRYYAQSAHVPMLEPADSQEARDFTMLAYELSEKYDTPVFIRLTTRIAHSRSFVETGERKEVELPYKQDIQKYVMVPANAKKRHPIVEEREKKLSNDINNNLFEGKINKIEYGSNKIGIVCSGAVYQYVKEALPDFSIFKLEMVYPIAVENIREFASKCEKLIVVEELEPFIENTLKANGIKCSGKDLTGLQGELSVQKIREVILGQKPLPELTQNLPGRPPVMCAGCTHRGVFYIINKLKLNVVGDIGCYSLGCSPPLNAMHSLICMGASISNAHGMFQAKGKEFSKTNIAVIGDSTFIHSGITGLIDAVYNKSNITVIIMDNRTTGMTGHQNHPGTGLTIKGEPTHTLDLGEISRACGVQNVSVIDPYNLAEVENAIKESLKADSVSVIIAKRPCVLLDKSIQRKAITISDCKKCGLCLKIGCPALSKCKDNSVEVDTTLCTGCMVCAGTCKSGAICLNQNL

SEQ ID NO: 91739 - protein, 143 aa, Unknown
  Obtained from environmental sample
  DOMAIN (10)...(143): Phospholipase/Carboxylesterase
  misc_feature (1)..(143): Xaa is any amino acid
VKNLYLCQVLESIIKETAENATASVIWLHGLGSDAQHFADKVPKLELPPNAAIRFIFPDAPIKSIKAHNGKKMQAWCDLFFMDDGVSFDLEKPDIKGIEESSKSIAELIDAEIEKGIKSENIFIIGFSQGAVLALHTAILYPK

SEQ ID NO: 91740 - protein, 75 aa, Unknown
  Obtained from environmental sample
  DOMAIN (16)...(38): MORN repeat
  misc_feature (1)..(75): Xaa is any amino acid
MYPVKGKLTLENGSVYEGDLLNGIPNGKGKLTYRDGSVYEGDLVNGKFHGKGKLVYFDGSVYEGDVGRRGAKRQG

SEQ ID NO: 91741 - protein, 358 aa, Unknown
  Obtained from environmental sample
  DOMAIN (1)...(206): Nucleotidyl transferase
  misc_feature (1)..(358): Xaa is any amino acid
MHLSQAYNFDTFSSGFVEILAAEQTHEHSSWFEGTADAVRKNMIHFTTQSPSYYLILSGDQLYRMDLRDLIKKHKESGAKITIACTPVSRENASQLGILKADKNNVITEFLEKPGPTKDISDYKIPSEIKKDKSKGDEYLASMGIYIFNSDTMISSLDNGLTDFGKEVIPQAISKLKVNAYIFNGYWEDIGTIKNFYEANLELTTLKPRFDFYDEAHPIYTRARCLPPSKMNFSNMNQSIAAEGCIITNANISNSIVGIRSIIETGSSLNGVVAMGADFYETEIQKQQNAEARIPNVGISRGVIIKGAIIDKNVRIGEGCRIGVDDIRRDDGNYGHYYVVDGIIVIPKNTVLYPGTVI

SEQ ID NO: 91742 - protein, 122 aa, Unknown
  Obtained from environmental sample
  misc_feature (1)..(122): Xaa is any amino acid
MKNKVSLFLLCAIASGLWAQTIQENQLPLKKVVILTSGLAYYEHSGSLSGNAGLNLQFRLDAVNDALKTLVINDPSSANPSITYQSEQTLLQTLRSLKIDLSDEPGMAVILSRLRGAEVEIA

SEQ ID NO: 91743 - protein, 281 aa, Unknown
  Obtained from environmental sample
  misc_feature (1)..(281): Xaa is any amino acid
GFELQDKKLTLETCKPVSQLLSLWEGILFSEFKIDGNIVKTETFIHPKEDTLYVCAQSPLLKELRITVNFPYGSHKKTGADFSAPHSHKSKILSNKDGSISIERELDSTIYNVTVSGKGFTVSFNENQHALQLIPHDECINFCVKFEPVNIPSFKNTGITLNKLINKDADSSEEAKTKCLSFWEHYWTSGGFIDFKGSTDSRAAELERRIILSHYLTAIQSRGKLPPAETGLTCNSWYGKFHLEMHFWHHAHLPLWNRTEELLKSLEYYKKILAAAKDIAA

SEQ ID NO: 91744 - protein, 362 aa, Unknown
  Obtained from environmental sample
  DOMAIN (1)...(198): Pyruvate flavodoxin/ferredoxin oxidoreductase, thiamine diP-binding domain
  misc_feature (1)..(362): Xaa is any amino acid
MAEYLPAFGGFAYQAEDEMSALGAVAGAWFFDTPAMTATSGPGLSLMQEFLGYCSMTETPAVVIDVQRAGPSTGMPTKHSQDDMMAAIFGGHGEGQRIVLSAATIDECFHMTIEAFNMARRFRCPVILLTDSALGNLQMTCKRPDPSVDVNGHPLTGATDSAQTTDPNTTARRITRLEHDVDGVPSNTANNRVRQQYKRFSKMDKIEAYYNYMQMLDIGDLKPPLPKSRFSARMMVDSPPADLCVISWGFSATMTRKAVDALRKRGLRIACLYPRLLFPFINGHYFELLSFCPRIAVVESNYTGQLASLIRMNTGINTISVKKYNGEPFTPEEIETELNSIIEMQKFISDIDHTNDSGAAKQ

SEQ ID NO: 91745 - protein, 595 aa, Unknown
  Obtained from environmental sample
  DOMAIN (202)...(430): Pyruvate flavodoxin/ferredoxin oxidoreductase, thiamine diP-binding domain
  misc_feature (1)..(595): Xaa is any amino acid
MQAAAALGFSSAVHNSIPPTIRGGQCSTLVTVSDDDSIAPVSVYADFVFALDKASLIVLGESGINSAGCSGNIGGAVDYDTIISAVNAGHDDDAGGARSFRLNFDRCRHINTHPQLKSSFVLGVISAILGIPDGLILGIITEKLKAKKLTEQNEETFRIGFDYAASDILPSLRANKHALRLATPREASKDCVILDGNRAVALGAISAGCRLYASYPITPATPIGACMATYLPSFGGVAYQTEDEISAIGAVAGAWFFDIPAMTATSGPGLSLMQEFLDYCSMTETPAVVVDVQRAGPSTGMPTKHSQDDLMAAIFGGHGEGQRIVLAPSTIEECFYMTVEAFDIARHFRCPVIILTDSALGNLQTLCRRPDTSVGFKGHILNAAQDEEAAKAAARAAKPGTAVRRITGLEHDAKGMPSNTANNRIRQQYKRFSKMDRIEAEYGYMQTFDLGDIKPPMPKSRFAARMNIDSAPADLCVISWGFNAAMTRIAVSSLRKRGMKIACLYPRMLFPFVSGPYLELLSFCKRIAVVESNYTGQLASLIRIQTGINTISIKKYNGEPFTPEEIEAELLGIIEMEKFITDLNKPNSDGAATNG

SEQ ID NO: 91746 - protein, 99 aa, Unknown
  Obtained from environmental sample
  misc_feature (1)..(99): Xaa is any amino acid
DAGSGSSSSSVAKSSSSSSVRSSSSSSLVQSSSSSVVSSSSIEQSSSSSSEEATPVLNANSAEKNVKSLRVYFDGSRVLIKKTLPNGKARIFDLNGNEK

SEQ ID NO: 91747 - protein, 499 aa, Unknown
  Obtained from environmental sample
  misc_feature (1)..(499): Xaa is any amino acid
TYTIKINKSGAVQGDSVTFSPASGQVGTEITLNYTIAGSANNNKLVFSGPNAVIAQVDSAGTGTKKYTINAQDAVENYITINAAFIHAAQTIEVPRTTIVDFEADALNKTYESTRGGSAPTVKVVADPVNAGQKSLQISSNNYNQAAVIPFNLPVELQNYKSFSFRFSLVSSTGTNLNNQSIMVYAAKNTTAFKDNGFGNAAGNSGNYPEFEANLLGKAPATAVNFDDTYKNKWTDYTLTISNPGAAIKDLKGDIYIAIGINVQNGANYLIDDLKFEMKDGYNPPPIVILPGPTPPTIGAVSSGNYRNMFMEWGKTETEVNAKINTTWNKLFNGTETEKVYYTVGSDMAYILDTGNNDVRSEGMSYGMMMCVQLDKKAEFDRLWKWARTYMYNTVNNGSNSRGYFSWQCKPDGSKMDPGLAPDGEVYFITSLLFAHARWGSTTGIYDYAKEARQVIYDLTRRKPGNGDPYGEPSMFNVDNYLIRFGTVGNSATFTDPSY

SEQ ID NO: 91748 - protein, 325 aa, Unknown
  Obtained from environmental sample
  DOMAIN (67)...(241): Radical SAM superfamily
  misc_feature (1)..(325): Xaa is any amino acid
MAQRLGEKLKEKYSAVDYVMGTSARSLFPLILEAAEKSEKAALDLTENAVFSFSNSHLEEGQFRSFIPIMHGCDNFCSYCIVPYVRGREVSRDPENIAEEMRLVSERGVREITLLGQNVNSYFWEKDKMNFSALLKFVADTAGKSGIKWIRFLSANPMNFSSETIQVMAENPVFCRHLHLPVQHGSNTVLKAMNRGYTRERYLELVGNIRAAMPEITLSTDILAGFPGETEEDLEQTLQIMEEIKFLYAYMYHFNPREGTKAFDLPGRISEEVKRERLSRVISLQKKHTTGLLKSRIGSKETVLIEGISRKNADELITRTEKDEM

SEQ ID NO: 91749 - protein, 490 aa, Unknown
  Obtained from environmental sample
  DOMAIN (246)...(482): Methyl-accepting chemotaxis protein (MCP) signaling domain
  misc_feature (1)..(490): Xaa is any amino acid
MAQSNGNIWRYIIDGSGEPDDPDNFSEIGTEEDTSDYDNAFRQVLISGKTENGNLVDQGEWGWLVSIYAPIKNSAGKIVGIVGCDFNGEHLHDTIVANNKQQVIIGGISLLLGLILILFLMNRIFSPLGKINSILKEISMGEGDLTGRIKTGKDDEIGELAGYFNLTMEKIRNLVGIIKYKINGLNHTSFELSANMGETSTAVQQITSNLDNMENLMVKQENGAMEAGKAVDDIKFHIDSLNKMIEEQTESVDKSSSAIEEMTANIHSVTQTLAKNSRNVSELAEASENGKTGLQLVAQEILEIAKDSEGLLEINSLMNTIASQTNLLSMNAAIEAAHAGEAGRGFAVVADEIRKLAETSGRQSKTTAAMLKKIKASIDNITKSSNDVLERFGAIDSSVKTVSEHEQNILHAMEEQETGGRQILDSISRLRDITASVKKGSDGMEESGMTLVKESSDFIKTSQEAVSGMGEILKGVNQIKVSVNHVNDMS

SEQ ID NO: 91750 - protein, 328 aa, Unknown
  Obtained from environmental sample
  DOMAIN (117)...(188): HAMP domain
  misc_feature (1)..(328): Xaa is any amino acid
MTDIQKFSQTQKPFPNSMTAVFSSKGSITAHFEESRIGKNIKNSEADRAGRHLNDLVNAVTTGKQYSFTNYIKAMNENMRVFTVSIPVGDRTTPWSYAIGVRDDTIMEPVYEMITITIVISAVVLALVVAAALFMSRSVSKPIIRVADTLKDISEGEGDLTRSITVTSNDEIGSLALYFNKTLEKIRNLIVTIKKEAASLHDVGNDLASNMTETAAAVNQITANIRSIKQRVINQSASVTETHATMEQVVANINKLNGHVENQSGNISKASSAIEEMVANINSVTETLVKNSANVNTLKEASEVGRTGLQEVADDIQEIARESEGLWK

SEQ ID NO: 91751 - protein, 498 aa, Unknown
  Obtained from environmental sample
  misc_feature (1)..(498): Xaa is any amino acid
MGDSTNIPGKTFICRKDLQKYRALELNGKTLFDRYGPMSNIIRKYIDPEYQDFLAHPVRKGETIVFYGKKNDEERRLLSELQGEEFEKYAKIKEDTLAHYKDRISSLREAGKTTEADYLSDAMKYIGDDYVYCYDGKVVLGVWGMASRDSVKVSEGVVSKHTDIKEKKPRDRSDSAAVEPAQAFAPDESKDSGSDTVAELTVTDEDSARSTDIEAVAGVKKKRSWWKRLLWLLAFLLLLLLLWLMKCRCCDECASKKYALPYPIGDKPWAADTALGGIYNPGSPYNPKPTPPEYKDALPPFEGRLPSRKNPPIDRKNPQGPPVIGDVLNILMENEDKSIMDLAKDFKAKYPDSKYSVIYYDDVVKRMQIKIPQSEREALKREIPPKFAPEYDLFVFDEALFEVNYTPDDPAFNDADKSWYLHAINAPPAWDIDTALVTGPQKLTVAIVDNGFNVGHPELKNKVVMPYNVWTHSCKVTPQKPDHGTHVAGTALAVANNK

SEQ ID NO: 91752 - protein, 273 aa, Unknown
  Obtained from environmental sample
  DOMAIN (224)...(270): LysM domain
  misc_feature (1)..(273): Xaa is any amino acid
AGRSYIGSLVVENIKPKPKGEPSIEMVIASDSSGEIVAEAIDLDTGAGGEHCVLTVSLRSLDETSRDLPDFALESNEEPPSSLYQHAKEVRQRGSNTWILVVLIILLVLGLLAGWLFFYGGMDTVFSFYNNNIHGKNIWKEIVKKREPAEKPEPVKKQETEPVKEPEPVKQTEPVQQKVEPAPVIQAPVTAPEQRPQQTDKKRSLAPVASYKVPTTIPREGVNYKIRWGDTLWDIAEAFYRNPWLYPRIARYNNIRNPNLIISGRTIRIPPRN

SEQ ID NO: 91753 - protein, 421 aa, Unknown
  Obtained from environmental sample
  DOMAIN (158)...(278): Miro-like protein
  misc_feature (1)..(421): Xaa is any amino acid
VEADALINGKPIRLIDTGGFKLDRIKGNRKAEYSNSIDDMVVERTLAVIEKASLIVLLLEAGEITSEDEEFIKILRCYRERLIVAVNKTEGGRREADAWNLLSYGFEKVFMISAEHGDNIGELTEEIINRIDFSETSAITDAAAIADEEEDNERRPIRITILGKPNTGKSTLSNRLTSSNASIVSDIPGTTRDVIEGSFRWKSRDFTILDTAGIRRRTKVNENIEYYSVNRAIKTIDEADIVILLIDSAEGLSEQDKKITALAHNKGRGIIMALNKWDTAPKIKNAFEAARDRIHFLFGKMEFAPVLPISAKDGYGVDKMLNTAITMYSQLNTQVETSRLNQALQRWLEEYPPPSGPQTRFSVKYAVQKSANPVQFIFFVSRPKAVSEAYISYLRNRIRKDLGFSFVPVEVKVRSSKKEKK

SEQ ID NO: 91754 - protein, 88 aa, Unknown
  Obtained from environmental sample
  misc_feature (1)..(88): Xaa is any amino acid
MNENEIGTIIIDTAFYLHKNLGSGLLESVYESILAKLLSKKGLYVQRQVFIPIEFEGEQFDEGFRADLLVEGKVIIELKSVKKLQVPI

SEQ ID NO: 91755 - protein, 306 aa, Unknown
  Obtained from environmental sample
  DOMAIN (232)...(304): Sporulation related domain
  misc_feature (1)..(306): Xaa is any amino acid
MLKVNRIVCIFLLVLSFSFLFAGENFASLASEIIRLENLGANSPSSQERHNAFLALARLFQLSGNNEAALKAWESALKINGVDGRSLLEKGRLLISLGEYERALEPLTAIFSGSYSKAIMLEARFLIAQLEAFRYGNLRPLTALVDESDFAGYRPSIYYTLWKIEQNPAWKALLIKDFPSSPEAKIANSTAHQTQTPLWILFPGREDIGLTSPTQSASPVAAAIPTPAQPQAAIGTVLQAGLFSREEYARALSDKINKAGFRSIVQIKPQNNATYWVVYVPYGSDMNAMIKKLKDAGFESFPVTLN

SEQ ID NO: 91756 - protein, 439 aa, Unknown
  Obtained from environmental sample
  DOMAIN (276)...(439): Beta-galactosidase trimerisation domain
  misc_feature (1)..(439): Xaa is any amino acid
VYREKTTAINTALAQRYKKHPALGVWHVSNEYGGECHCPLCQERFRAYLKNRYQTLDALNEAWWSDFWAHTFTDWSQIESPSPLGETCIHGLNLEWMRFTTEQFADFYLCETKPLKAITPDVPCTTNFMGTYPGFDGFRMAQPLDVVSWDNYPQWTGTEKDIVIAIETSFSHDLNRSFKGKPFMLMESCPSATNWRSAAKLHRPNVHMLQSMQAVAHGADTVQYFQFRKGRGSAEKFHGAVVDHEGSENTRVFRDAAEVGKRLAGMDAIVGTGTPAETAVVYDWQNRWALDDVRGFLQDKTGYYNTVIQHYGIFWQKGVPADIIDSSLIAKPGYLDKYRLLVAPMLYMLRPGLPEAIAGFVRRGGTFVATYITGEVDENDLCFTGGFPGPLRDTLGVWCEEVDALYPEDRNSLIWNGKSYGAFDLCELIHAEGAEVLGT

SEQ ID NO: 91757 - protein, 133 aa, Unknown
  Obtained from environmental sample
  misc_feature (1)..(133): Xaa is any amino acid
VGSGKENGEAIFFVAREGAALPLVEFDFYYLILNNTITTTITTIMHPSAQIKSTLFSHVNKGIKYDLDRMFKAASLRGDPHNSYVSIHVAGTNGKGSTCAYIESVLRRAGYKTGLYTSPHIANFEERFRIDGG

SEQ ID NO: 91758 - protein, 431 aa, Unknown
  Obtained from environmental sample
  misc_feature (1)..(431): Xaa is any amino acid
MHAVILTELSTKSDLKAIIGAMSNVLKINKREAIEKAKNLPVILADNLPEKEAQLMVDMFSGMGAGIRVNPPLGKAPAVAATATATAAPATGATAAATPQREPRAWKTEAPNRGIPLGCLLFMMLCLVGFATYASLNYEWIMTQVETQLKPSPEKSEKLLKKGDMKQAKKSIQKQLKEKPNDIELLILQGRYYISAARKRMDDQHWKNYDKANALPELDTAVAIFRRAETLDPKDANVPRWISIAEQLRRDFSEAETAARRAITLNPEDPDNWNQLGSVFIDGEQISQAEQVFYRALKIDQTNATTLKNLTILNLYYTKDAQKATNFLFNYLNQKEAAMDMDSYNLRVDLTTEMIGDFNPPMERLSPPTLSFEEYERRRKQISADPRLKTDPLLQEQLGLLYMSKGRENCSRRMLHKIHPLKRRQESPEKC

SEQ ID NO: 91759 - protein, 293 aa, Unknown
  Obtained from environmental sample
  DOMAIN (228)...(292): Oligopeptide/dipeptide transporter, C-terminal region
  misc_feature (1)..(293): Xaa is any amino acid
METLLEVKNLSIGIRHGKDLLSSVEDVSFNIFSGEILGIVGESGSGKTLTALSILSLLSENKKITSGSILYNGMDLTTLPEKKMEEVRGKEISMVFQEPFASLNPLLKIGHQIGEALALHGEKDKALIKNRAKELMEKLGLPDTYPHRLSGGMCQRAMIAIAIICNPQLLIADEPTTALDHDTQSKIIALLKEINRSMGTSILFISHDIEVIKELCDRILVMYSGRILEEGNTYDVFSSPAHEYTRGLLSSVPSAAMRGKALAAIPGKIPSLEEGRPPGCPFHPRCEKAHAGM

SEQ ID NO: 91760 - protein, 50 aa, Unknown
  Obtained from environmental sample
  misc_feature (1)..(50): Xaa is any amino acid
MHQAEDIFIRDQPVISLYSRTNTIMVAPYVKNWVLTALNNLYFKEAYIQK

SEQ ID NO: 91761 - protein, 505 aa, Unknown
  Obtained from environmental sample
  misc_feature (1)..(505): Xaa is any amino acid
MPQKEKGVMKKGFGLRFSVVVMAAVIGVLFCGSALPAFAQKKKSKEEIEAQIRALEQKKQQEQANRMKAADANRPQGADLEAIITKYEKLLDGCAAKKSDRCADVMYTLGSLYYDQGRDDFGKASERHAEAMKQYDRTGRGTPPTPPIPDYTKSLRMYWQLSREYPSFPKLPEAYYQMSQNYLVAGHLDTARIILEQLSQRFPNSPRVSAAQFRLGELAFMDNNFNKAYEHFKKVKKDQIDIISWEMNQYRLAECAYNTGDFDKAVQYFHEYVEACDRNEYTKKEFREMALEYMAISFSDMPDGVEEAVQFFKKHSGKPYEPQVIYMVGAKNRDHGQWDAAIRAIEGALKKYPMYKDAPLARQRLIECYVVKKDHEKANKEREKLVDDYGEGSKWYTANSKERKVIDLAKGQVRRALGDIALFYHGEGQKKKDKASYDKAMKRYNEFFSKFPDDKWRVFEYKYNVAEIYSNMGDCEKAAENYRFVAEEDVSKYPAYVNDVDTLGM

SEQ ID NO: 91762 - protein, 511 aa, Unknown
  Obtained from environmental sample
  DOMAIN (199)...(232): Tetratricopeptide repeat
  misc_feature (1)..(511): Xaa is any amino acid
AIVAEFREGRVAEKGWFEAGVCFEEMHDLDKAAAIFEQLTDRFPKGTLRESAYIRAAENYKKGGKFDRAAQIYLTAANQIPKAEFAIPSLSSASECYQKLNQFDMAGKMFELIYERYANDPKTPQALYNAGLIFEKGKHYNDAIKVYDQLASRYPNSEFAAEAFFSIGLCYEKLEEFGKMANSFSDYAEKYTADRYKQVQALVKAGDAYFNMQNYKESETNYNKAVKIYEQHSKTSDIDVANVAEAYFRVGEIYYRKFEDIKLVAKNEKEMTGVVKSKTKALEEPAKYFAKAIELGVEEWTMRATYMIGKGFYDMAEAVANQTLFGNEVEKMGGKIKVLSSLDKYYDKAMEYFGQNIAWAKEQNLKGEYIEMSMQAMMEMAFKKGDILEQVGLLFKNSPVPKELTGEEREFYVMELEERYLKAQDAAMPVYENGMKLAKEIGIANSPWIDRIRERLAAINPESEWKDIQIVEWKPKERPKQYDAAGNEIASRGRDPELIGVCAVSMISEKG

SEQ ID NO: 91763 - protein, 334 aa, Unknown
  Obtained from environmental sample
  misc_feature (1)..(334): Xaa is any amino acid
MTRAEYKLFLTFTIPRQIDDEKKEWNMTAEEFTDETIRRRLAQIEEKSEGKRDNFLKLLAGILNASPASLCALEAIPLLDRDEIKKAASEGRESTAPVGSNQKEAALAAESFYNGAELLCEGKAAQPYLAANKLRYRPQGRILTESVSGDSDLDRLMEKAGLAPEDFGSLVHATLEGRIKGQPFVVPSEINFRTDDEKTCQSLLAFAQSMADSFLASALGRRWASARDRNFSQSEFSVITAAIVEGKAVAISGQIDLLFEESGEVVVLDFKTDRVENPEDHYGQLAAYYRAAGDLFGKPVSLWLYYLRSGSAVNVTEEVRGLSLEELAARAMRE

SEQ ID NO: 91764 - protein, 267 aa, Unknown
  Obtained from environmental sample
  DOMAIN (7)...(264): Domain of unknown function (DUF323)
  misc_feature (1)..(267): Xaa is any amino acid
MGNQGNPRGRRDSSTLDIEWPRHDVTLNDFSIGKYEVTQGEFYEVTGLKPSSHIKNPDDGSPNGWMKLPVESVTWYEALVFCNQLSIKEKLSPVYSINGSFDPEEWGEPPTRRSNEWDAVRMDTRAEGYRLPTEAEWEYAARGGQESKGYEYAGAAKENASKVAWYSIIINKTPVGTIHGVGRKQPNELGLYDMSGNVAEWCWDWEGDYPSTAQNNPAEPSRGIDNRIIRGGSWAFRHTYCMVLSRSSVSSRSTNSLYGFRVVRNAQ

SEQ ID NO: 91765 - protein, 534 aa, Unknown
  Obtained from environmental sample
  DOMAIN (9)...(531): Protein of unknown function (DUF1703)
  misc_feature (1)..(534): Xaa is any amino acid
MATDPKNPANAKRILPVGIQSFRKIRENGYIYVDKTPQIYPLITGVAGSFFLSRPRRFGKSLLCSTLEAIFEGRRELFGEIAGRPALAINGFDWEWKPYPVIRIDLSTGDYPNYGIKALNSVICDEMRREAQKYGVKLDRKAASASQFKNLIEGVGEKTGEKAVVIIDEYDSPLTNTLNKLDLHFELRDALKAFYSVLKSYDAYLRFVLITGVSKFSHVSLFSGMNQLTDLTLDPRCADICGLTQEEMVVNFGPEIDGILENTGRNREEYMDQLRLYYNGYRFSKKPLTVYSPFGLLKHFYGGGEFSDHWYETGTPSFLVDLITNNKINILDLKDTQVTQSDFGKYDADNIALAPLLCQTGYLTISDYDEDSGEYTLDFPNNEVRACFAGSLLSQYSELSGTDRLDTKFIRAIVKGDIDTAMDTLRRFFTAIPYDIVDNKEKYFQMAVHLIFTMLGFNCRSEVRIATGRIDTLVVTRNFVYCFEFKLDGSAEKALAQIDSKEYAVPWTGSGKKVFKVGVDFDFEKRNIGKWVAG

SEQ ID NO: 91766 - protein, 55 aa, Unknown
  Obtained from environmental sample
  misc_feature (1)..(55): Xaa is any amino acid
VGEAAAAALSPLQTEYKRLMADPGYIDGLMKPGAERAAARANKTLKTVHDAIGLI

SEQ ID NO: 91767 - protein, 208 aa, Unknown
  Obtained from environmental sample
  misc_feature (1)..(208): Xaa is any amino acid
VKKSPVSGSGFFLTCEATPHHIGATEEDAERMGGETYGRVNPPLRAKADREALIKGLGDGIIDAIATDHAPHSDNDKSAGMPGFTGLETAFAVSLSYLVNNLTTENTEFHGGKTVSGINLQRLSALMSANPARILGLEDRGRIVKGLRADLVIADIGANWKVEPEKFKSRGKCSPFVGRTLRGEILMTLNAGKIVFGGNGASKGGVIV

SEQ ID NO: 91768 - protein, 197 aa, Unknown
  Obtained from environmental sample
  misc_feature (1)..(197): Xaa is any amino acid
LLTAAIPVNGYFVTYKEQFYRLFHLHYIQYPDDTMENIYWLEQAVKADFANPLYALALIENETQWEKYRYLFSMHLNIKLIEQYLLLGNKWNKRKAYFYNAPWRDQNIESLETAETCYRTALYYWDEALLWWKKANDRKFRWIDLPKVQFWQDEAFRIENGTLNYARTINRELESLQKVREQFKAMEKYYTIQDSLQ

SEQ ID NO: 91769 - protein, 75 aa, Unknown
  Obtained from environmental sample
  misc_feature (1)..(75): Xaa is any amino acid
EIDFIVERDDGALLGIEVKAGHNVSRKDFAPSEWFRDNINKSKKPFIGIVLYSGDRTIKYSDSLIAVPTASLWTE

SEQ ID NO: 91770 - protein, 490 aa, Unknown
  Obtained from environmental sample
  DOMAIN (1)...(119): DEAD/DEAH box helicase
  misc_feature (1)..(490): Xaa is any amino acid
MAPTRELAVQIEEEAKLIGKYLPVKIGSFYGGVGYTQQTAMLKDNVQIMVGTPGRVLDLNQSGQMNLMDIAFLILDEADRMFDMGFYPDLRKLIRRVPPADRRQTMLFSATLNAWVKNLAWEYTRNPFEIAIEPETVTVEEVEQILYHVSSNDKMKLLLGILKNEDPESAVIFCNTKRYAEIVAKRLRLNGFDCEFIMGDLPQKKRLKIIDDIKAGKLHLLVATDVAARGLDIEGLAMVVNYDLPNETENYVHRIGRTARAGKTGKAVTLASEQDVYALPGIERYIGRKIPSETVASELFAEDKSEGKHIHTEFYEERGSHRTEGHRTEGRTGDHSRRKAGGGKNAGGINANSKKHDASHHVRKDHHSPMEQKRGEKKNRTDFPKGIKLSELSLEERMAYYKQKYDKSVKNRCSGTEPAGIDPKAHEPKVHGTSSAQKKHKGASQRKQKRHKPAKQEHGAEKSSAAQTAAVDQIAPKKGILSRLFSVFKK

SEQ ID NO: 91771 - protein, 282 aa, Unknown
  Obtained from environmental sample
  DOMAIN (20)...(55): WD40-like Beta Propeller Repeat
  misc_feature (1)..(282): Xaa is any amino acid
VFFVAEGDIWTALLSGGKALRLTTHTGQETRPVISPDGKWIAFSASYEGSGEAYVMPAEGGLPKRIAFDGGSPVGWTPKGEVLCVCSSNKGPSGQRVLMLVNPNTLAKTAIPLADANDGCFDDSGKYLYFIRMGIHMMGDNAKNYRGGAMAELWSYELGTSKEAVKINVPGNGNIKRPMWWKDRLYFIGDSDGTDNIWSIKPDGTDATKVTKHKDWDVRYAYLNEGKITYQLGADVHVLDLSNSQDRVVKIDLVSDFEQMRKRSIRALSYMNNVSLSPTGDK

SEQ ID NO: 91772 - protein, 246 aa, Unknown
  Obtained from environmental sample
  DOMAIN (57)...(214): Peptidase family S41
  misc_feature (1)..(246): Xaa is any amino acid
MLVNRAGQQVLLGLKRGQAQLKPIVVTPVNGGQNGGLRYSDWEEGNRLQVEKASNGRMGYLHLRAMGGSDINTFAREFYANIERDGLIIDVRRNNGGNIDSWIIEKLLRRAWAFWTTPDGTYRGVNMQQTFRGHLVVLIDEYTYSDGETFAEGVKQLGIAPLVGRRTSGAGAWLTDSNGLIDGGMIRVAEWPQFATKDGSWLIEGKGVSPDIEVVNPPFETFNGKDRQLEMAIKVLQDKLKASPIP

SEQ ID NO: 91773 - protein, 153 aa, Unknown
  Obtained from environmental sample
  DOMAIN (10)...(46): Sigma-70 factor, region 1.2
  misc_feature (1)..(153): Xaa is any amino acid
MAKVKNVEYDDGLQSYFDQIKHIPLLTFEEGLEMSRLIQGGDMNARRRLIEANLRLVVKIAQSYNIKDVSLMDLIQEGNIGLIRAVDKYDYLKQLRFSTYAAWWIRHAITRYLCEKAAGHPPSPQERGNPSKSSAGACIPEPAVYAPANSRGN

SEQ ID NO: 91774 - protein, 597 aa, Unknown
  Obtained from environmental sample
  DOMAIN (242)...(386): Homoserine dehydrogenase, NAD binding domain
  misc_feature (1)..(597): Xaa is any amino acid
MLTADPEQVKSAFLINEISYNEAMEISHFGARLIFPPSVKPALEKNIPIFIRNTFNPKGAGTKITANAAPGKFPIRGISSISKTALVRIQGTGMVGVAGFSARVFGALARKGISVMLITQSSSEYSICFAVLPEDAQKAEASLKEEFAHEIYNRSLENPIIEKNLSIVAVVGSAMKSTSGISGKFFHALGRNGINIVAIAQGSSETNISAVISASDEGKALNAIHDAFFFANQRSVNLFIIGTGLIGGTLLDQISENREKLADNMIKINLIGAANYDKMIFSLDGLDPKETKKILSTAGKVEGTQPIEPNQKGASAFIEKMASFNLPNSCFCDCTASEDIADLYEKILQYSIPIVTPNKKANSGSFDYYKRLTTYSRERGIPYLYECTVAAGLPVISTLRDLFLAGDKVIKIEAVLSGTLSFIFNSFDGSKPFSSLVREAKEKGYTEPDPRDDLNAMDAARKVLILARECGLNLEFKNVKIDPILPKACFSARNIDAFFKELKKADADFEKRRAQAAAESKQLRYVAVIEEGKAKLSFRAEEEGSPFRSLVDSDNIVVITTNRYSKLPMVIKGPGAGAQVTATGVFADILRTARTLV

SEQ ID NO: 91775 - protein, 164 aa, Unknown
  Obtained from environmental sample
  misc_feature (1)..(164): Xaa is any amino acid
LFGTGGFEAIILAGGMPDGSVLDEEKAAFFKDKLDKLFALNNYTTLPFYLGRYEPQEGKPDEKRLKDTARWFKERGITAKGHPLCWHTVCADWLMNYSNADILKKVIARVERDVSAFAGLIDIWDVINEVVIMPVFDKYDNAVTRICKEYGQVRIVKEVLKPQN

SEQ ID NO: 91776 - protein, 295 aa, Unknown
  Obtained from environmental sample
  misc_feature (1)..(295): Xaa is any amino acid
EFVPDALKTPELCLAAVQENGNVFKSVPDVLKTPEIYLAAIQDNGKALQLVPETLKTPALCRAAVQNDGRALKYVPDSLKTPELCLTAVQSHGWALQFTPKALKTPKLYLAAVQNNGKALHLVPKAFKTPELSMAAVQAHVVALRYVPDALKTSEIYLTAVQAHGRALEYVPEALKTPELSMAAVQNDGRALKFVPTTIKTPELCLTAVQAYGRALEYVPEALKTPELCMTAVQDHGKALEYVPETLRTPELCLTAVQSHGWALKYVSDALKTPELCMAAVRNYGRPLKLCRRRS

SEQ ID NO: 91777 - protein, 481 aa, Unknown
  Obtained from environmental sample
  DOMAIN (21)...(337): Glycosyl hydrolases family 43
  misc_feature (1)..(481): Xaa is any amino acid
VGADPWGLVYKDRVYVYMTGDTFRLSSGSSPAPDFSNLQANDYSNINTIRVVSSSDLVNWTEHPEIRAAGSQGAATQATNSWAPAAAYKNIGGKDYFFLYFADNANGIFVLRAESPLGPFTNPLPDGSALINRSTPNCSNVTWLFDPAVLIDDDGKAYIYFGGGVPPGGSAAQFTSNDPLPGTERAARLGDDMISIVGTPQNLNVPFIFEDSGINKIGGIYYYSYCSNFNVRTYLQKPEEFPAAVTIGKNGAITYMTSDKPLGPYTLQKMILPNPGEMFITKGGNNHHAIFEFRGKYYIVYHSRLLEMAMGVPETLPREGYRSTHIDEVNILLDGTIEEIKGSRKGAAQSGRFNPFELTSAATIGNQAGISTVAVPGEQRMKVTDIDSGDWIALYGVDFGGAGARTFNCRVTPPKSGSGSAGGVIQIKLDGLDGKPIGYVNVEPGKPDITVKLSQTVTGVHDLVFVFYGQGYEFVQWQFLQ

SEQ ID NO: 91778 - protein, 780 aa, Unknown
  Obtained from environmental sample
  DOMAIN (189)...(270): Glycosyltransferase 36 associated family
  misc_feature (1)..(780): Xaa is any amino acid
MRYGYFDNAHSEYVIEKVDTPMSWTNYIGTENMVGVFNQTAGGYLFYKSAEHHRITRFRGNAVPTDRPGHYVYLRDDETGDYWTISWQPTAKPVGCYKARHGLSYSVYSCEYSSVYAEQTLFIPRGADVEIWDVKIENRSGKPRKISVFSYAEMSWHQIDGDNKNFQSTLYCAGASYKDGVIEQELHYEENAYQFFTADFDPDGFEIERERFTGIWQSESNPEAVERGALQGRAAWQGGNQCVALHKRLLLPEGKEVRLCFMLGEGNREAGLSIRAQFASDHARDAALTALATYWRGKQSRLQVNTPNANMNTMINIWALYQSEINVMFSRFASFIETGGRTGLGYRDTSQDAMCVVHSNPRKCRERLVQLLKALVSEGYGLHLFEPEWFEEKENSGYKNPTLGFVPDRKSRIHGVEHACSDDALWLVSSIAEYIRETGDAAFAKMMLPYADAEAAPDSVYEHCKKILNFSRRMTGSHGICKGLKADWNDCLNLGGGESAMVSYLFLWALDNFIRLAEFLGKTEDAAAYRAIHEKTAKVCREALWDGKWYLRGFTGKGRPIGTDADAEGKVHLESNTWAVIAGPDDHRRKMQAMDSVEQYLGTPYGLMLNAPAYTVIDDDVGFVTRVYPGLKENGAIFSHPNPWAWIAECILGRGDKAMDLYNRLCPAAWNDKCDIRKAEPYSTCQFITGKSHPAFGEAHHPFMTGSGGWSYFAAVQYILGIRPDFDKLVVDPCIPSEWDGFDAVRRFRGGEYRITVRNPNHLSKGVAEILINGEKRDVI

SEQ ID NO: 91779 - protein, 351 aa, Unknown
  Obtained from environmental sample
  misc_feature (1)..(351): Xaa is any amino acid
DRLGIATPGHIDLFRDMDVFPVFAQQSIRELNLTCRTYEDVLDAVSFAVFREGYKKGFGADGDHLKTVKDIEYALSLDFSMITLDCSDHIKSENIENNPLPDNYKNKYIDKIFNIEGISLVFSQEELKKCAAIYGDAIKFIKEIFNRFFSKDNKPADFEISIDETVSPTTPLQHFFVAKELFDAGVSFESLAPRFCGEFQKGIDYIGDTAQFEKEINIHAAIARFFGYKLSIHSGSDKFSVFPAIRKATNGRFHVKTAGTNWLEAMRVIAEKDPSLYREIHSFALTAFNEAKKFYYVTTDISKIPDVSSVNDMELPKLFKNNDVRQLIHITYGMILNHKKEDGTYAFKERL

SEQ ID NO: 91780 - protein, 193 aa, Unknown
  Obtained from environmental sample
  misc_feature (1)..(193): Xaa is any amino acid
MELFIEQGESLLECKQKIYEKYKRPFHIQNRKDIRVGGFLGLFTKPGVQVEFYFQPQRQNTQGFDYNPHLPLSQHHGMQNTANVLYPEMSLEEAKHRVIETARKNIGETSANGRETSQQILDLLKEGIKEIKEKVESTGKKEEHSSFVRVTKLLKDNDFSENILAECWISCEKKCLLNSWKILTLCRIVFLNG

SEQ ID NO: 91781 - protein, 307 aa, Unknown
  Obtained from environmental sample
  DOMAIN (11)...(290): Peptidase family M50
  misc_feature (1)..(307): Xaa is any amino acid
MNIYWFFQIILGLLGLSLLVFIHELGHFLAAKYCGVRVLTFSIGFGKKLLKVNKNGTTYCISAVPFGGYVAMAGENPEQVREDKPDDFHVQPIWKRALIAFAGPAFNVVFAYALLTAIYMIGNPEPVSDKLVVGIVEHGSAAEEAGIASGDTIFTIDGKKAEGWEKFREEMGISISRSIALEIGTKEGRKTVNIVPKELRDLGVGTAGIHPRHRVFAAAEPSEDSPAGKAGIRQNDTILSVDGYTIGYYQDMIDIISASDGGAVDVVYSRADENGKTDTLNASINPLWNEEAERYLIGIQMGLAQLT

SEQ ID NO: 91782 - protein, 659 aa, Unknown
  Obtained from environmental sample
  DOMAIN (491)...(652): Plasmid pRiA4b ORF-3-like protein
  misc_feature (1)..(659): Xaa is any amino acid
MNFDQEEGLYEFLDKITEPFTLEEAAAYIKISGVKRNKKLIQEIAAYLEIRKIAFKHDNKRWISRRGCFESSVFVITPTRLELLNGILIPGHRFVPFANPVVLQNRYEIYWKGALVPMTTTEAPPQDLYPYYCIFGEEFAPQYIARENPKNEEAFNADPYEDPPEVSIHTLDMRAIYRESSFVPGDRFLVRITDWCQCRFELEKIGKDEWTRADLNKWVEIAENGFEKSFSLIGPGMGTEEQISFAYWYGGKRMREVPAYSLEEFIYEKTDIIETVPYGIETRFWYAGKDIPDFKNLQNYTVPPDRTFVEELLYQKNIPISEYVILSYIKDAFFRNEKTIEEVINRIIPPVVPMEEIEWDYFADYLSDRMDDFQKSYSLFMDRAIGPVRQRVAELHTAVIDLSARLQKGEIEAAWLPRHTFIVLSQIQGHAAALLEDLVFDDSPLESDIVAMDNSLDNMVETYGDIKELINNAMDNFRRSNLTVIHGGSKTGSLYRMIQISISGLDVWRRAIITHEYTMAELHNLIQVSMGWKGQLDYRFYCETLEGGKDYLRDTIKLGDIDFHGKKEINYEYGTKWLIRIMIMSSYQPANNEAARFVAGDGAAPPEHLDGPRHFNKLVYYLETGGHAEKQDAQEELGPDFVPGQFDLDQLNRNLQAAL

SEQ ID NO: 91783 - protein, 453 aa, Unknown
  Obtained from environmental sample
  misc_feature (1)..(453): Xaa is any amino acid
MKLMDLEQEEALYEFLENVSKPFTLDDITDYIQATGHKLKKQLTMEIAAYLDARKIAFRQDNKHWVSRKTCFEPALFVITPSRLELLNGILIPGHRCVPFANPLVLPHRYSFFWKGEAIPVSTTEAPPEDLYPYYCVYGEEFAPQYIARDNPENEDAFNADPYEDPPEVSIHTLDMRGIYRECAFVPGDFFIVRTINWNECHFELEKAQKDNWSRTDLDKWQEAAEIGFESSFALLGPGASTEEQIAFAYWYGGKRMREIPAYSLEEFLYEKTNRVDTVPYGIETRFWFAGKEIPDSTNLQNYTVPPDRTFIEDLLYEKNIPISEFVILSYIRDSFYRNEKYVDLVINRLVPPVVHLDEIEWDLLADYINESMEDFYKGYSLFLDQSAGPVRQRVAELHTAVIELSAKLQKGEIEAAWLPRHTFIVLSQIQGHAAALLEDLAFDESPSDSDIA

SEQ ID NO: 91784 - protein, 204 aa, Unknown
  Obtained from environmental sample
  misc_feature (1)..(204): Xaa is any amino acid
HLDTKYGIVLLQPAYKDYHLELGEVSSYPPGYKENAGIFCHNNPWVTIAETRLGRGDRAFETYAKICPAYREDDSDLRRMEPYVYAQMVAGKDAVNHGEAKNSWLTGTAAWTFVSISQYILGVRPGFDGLILDPCVPSNMKGFTVMRHFRDADYHITVDNSAGVEKGVKSITVDGNQLHGSALDNAIIPAFGDNKVHKVVVVMG

SEQ ID NO: 91785 - protein, 53 aa, Unknown
  Obtained from environmental sample
  misc_feature (1)..(53): Xaa is any amino acid
LAGIKTSETIVSVNTDPDANIHKLADLAIVGDAFEVLGELKKRLKKVVNGGNE

SEQ ID NO: 91786 - protein, 87 aa, Unknown
  Obtained from environmental sample
  misc_feature (1)..(87): Xaa is any amino acid
MNKILILADDLTGANDTAIQFVKQGFASLVVINADSASTDLFDNYDVIAINCDSRRLNAYEAYSTVYRIAKHFETGFFIYKKVDSVL

SEQ ID NO: 91787 - protein, 133 aa, Unknown
  Obtained from environmental sample
  misc_feature (1)..(133): Xaa is any amino acid
MAKIYHCKLSAVYVVDTATIRQLTLSKIFIQDESQEFQQSLEANGERYLSFVEELAQAKGVKIERDIRHGAVYTEILAAASDKKADLIILGGWEKERSSRDIFSHSHREIMINAKCSVLLAKEPGIDLMYKHA

SEQ ID NO: 91788 - protein, 320 aa, Unknown
  Obtained from environmental sample
  DOMAIN (1)...(197): Cellulase (glycosyl hydrolase family 5)
  misc_feature (1)..(320): Xaa is any amino acid
AAYTSGTQSLCEAVIDAAIAEGIYVIIDYHSHTANNELPAAKDFFRTMANKYKGKPNIIYEIFNEPINQTWAQIKTYADSIVPVIRGIDDKNIILIGTRDYSKRVDEPAANPVSGTNLAYVAHFYAAQEGHGNEIRNWINTAFAANKAVFVSEFGTCMANGNGDISESKTKVWLEYLAENQISWVNWSISDKSESASALNSGAPTDGNWSESNYSPSGKFIRSQLIYYATTNYTLTVTVSGGQGEVIRIPNYASYTVGTPVTLIAKPASGMELLSWSGGASGKKDTVVVSMTANKSVTVSFTQAGNLITNGSFLSSVSPW

SEQ ID NO: 91789 - protein, 420 aa, Unknown
  Obtained from environmental sample
  DOMAIN (234)...(311): Helicase conserved C-terminal domain
  misc_feature (1)..(420): Xaa is any amino acid
VNRDMDSPFPMARLLQGDVGSGKTLVSFLAALKAVEAGGQAALMAPTELLARQHAESAAKLLEPLGIRIAFLTGNLKASGRVNLLKALSSGEIDMIAGTHALFSRDVEYKNLCLVTVDEQHRFGVLQRKAIMAKGHQPSLLMMSATPIPRSLALTVFGDLDVSVIDDLPPERKTIKTHLAKESNEGKVYDFVRRELAAGHQAYFVYPLIEGGNESAFMPHELKDAVSMADRLVKEVFPDFSLALLHSRVDDEEKRKTMDAFRRGEIKILAATSVVEVGVDVPNATCMVIEHAERFGLSALHQLRGRVGRGEDQSYCFLVYSDSLNEDGKKRLKVMLENSSGFVIAEEDLKLRGPGQIAGIEQSGYLRLSIADPVRDAEALARARSDAFEILESDPALEKPQNKRIAEVLQRCPPFGDVGL

SEQ ID NO: 91790 - protein, 158 aa, Unknown
  Obtained from environmental sample
  misc_feature (1)..(158): Xaa is any amino acid
MSNDTITAKTPSVSPISYFYFTLFFISGISGLIYESIWSQYLKQFLGHAAYAQTLVLVIYMGGMALGSWLAAVWANKVKDLLIWYAVVEIALGALALVFHDFFIRYIDTSFSTILPFLGKPFLISLYKWGSSALIILPQSMLLGATFPLMAGGILRRF

SEQ ID NO: 91791 - protein, 259 aa, Unknown
  Obtained from environmental sample
  misc_feature (1)..(259): Xaa is any amino acid
MFLTVCLNPTLQKTLRFPSIYSGTVNRTGVHRLDASGKGINVARVLTQLGKKVVHLTQLGGGMKTLFLSLCEQDGLSVQWAESESQIRFCYTLLSDADGSVTELIEESEAVGVGTEERLLERFDDILAHTADLSWVIISGTKAAGFSDAVIPTMTQRAKEKGLKVILDIKGKDLTESLKYQPDIIKPNLFEFAADFAPELIKNNELTAIDDSAKERIKSAVLDMARRNKCRVILTNGSRKIFAADSDGFFEIEFQPVKA

SEQ ID NO: 91792 - protein, 509 aa, Unknown
  Obtained from environmental sample
  DOMAIN (18)...(95): Bacterial Ig-like domain (group 2)
  misc_feature (1)..(509): Xaa is any amino acid
IITAGSGSDPDPGSGPVAVTGVSLNKTTATIIIGGTETLTATVTPANATNKAVTWSSNNTAVATVSDGVVTGVSAGEATITVTTGDGGKTATCAVTVPGWTAVTDSTFGTSTIWGIAYGNSKFVAVGQSGKMAYSTDDSMTWTAVTNSTFSTSNINGITYGNGKFVAVGASGRMATSTDGTTWTTVTNSTFSTSNINGITYGNGKFVAVGASGRMATSTDGTTWTTVTNSEFGTSSNTIYGITYGNGKFVAVGQSGKMAYSTDDSMTWTAVANSTFGTSTISAIAYGGGKFVAGGDDSKMAYSSDGRNWTAANSVLGTGINAQINSIAYGNNKFVAGNGNNGNKIAYSSDGITWTAVSDSTINSMWYINTITYGGGKFVAGGGDGKIAYSSDGIAWTAVNNSTFGSSQIYAIAYGDGKFVAGGFGGKMAYSTDGVTWTPVATNSTFGTAHSIAYGNNKFVATLNGNFIGTSTDGTSWTKIDGNWNQINSIAYGNGIFVIGWNGDDIMYS

SEQ ID NO: 91793 - protein, 498 aa, Unknown
  Obtained from environmental sample
  DOMAIN (260)...(486): Uroporphyrinogen-III synthase HemD
  misc_feature (1)..(498): Xaa is any amino acid
MKVTLVGAGPGGIGLLTIKGLDALKTADIVLYDRFVSDDILAAIPDSAEKIDVGKHAGNHPVPQDTINALLLEKSTQGKNVVRLKGGDPFVFARGGEELELLTENNIPFEVVPGVTSAIAAATYAGIPVTHRDYASSFHVITAHTKNNEPISIDFNALVKLNGTLIFLMGASVIDDICEKCVSAGMDKDMPAVVVENAAASGQRKFLGTITTLPQIAGTNNVKSPAVIIIGKVCRFSTRYDWFDRKPLLGKRIIVASIQYGTSKLSNALRELGCDVIEIPNLKIVPLIGRDDTLTNKLKNIDDYSWLVFTSRVGVNIFFDYLKEALIDIRGLINVKIACVGMETEKEVNKRGIKVEYVPDEYNGAALGRGLSIRVKNGEKLLIAGAKDGDRDLTDVLTEAGIAFDDVPIYEKVRDDKTTSAIVSDFDFAAFTSSSTVKGFAELAVNMDLSGIKAVCIGNKTAAAARVYGMEVYVSAEATVESMVEKIRELNALEKINS

SEQ ID NO: 91794 - protein, 419 aa, Unknown
  Obtained from environmental sample
  DOMAIN (41)...(106): His Kinase A (phosphoacceptor) domain
  misc_feature (1)..(419): Xaa is any amino acid
TENEKGFVAMTASTIAGVIMRDIYTIKLEDALHKATEASRAKSEFLSNMSHEMRTPLNAITGMTTIGKNAQDVERKDYALDKIQDASTHLLGVINDVLDMSKIEANMLELSPVEFNFEKMLQKVVTVVNFRVDEKKQKLIVHIDKKIPSTLIADDQRLSQVITNLLSNAVKFTHEKGSITLDALCIGEENNICTIQISVKDNGIGISDEQQKRLFMSFQQAESSTTRKYGGTGLGLAISKSIVELMGGKIWVISEPEKGSVFSFTIMAKKGKTIEIVNNGDNRQAEGTQIDINGLFAGHRVLLAEDVEINREVVLALLEPTQLEIDCAENGAEAVRIFNEAPNRYELIFMDVQMPEMDGYEATRRIRSLDAPNGKTVPIVAMTANAFREDIEECLAAGMDDHIGKPIDFERSWKSYALI

SEQ ID NO: 91795 - protein, 160 aa, Unknown
  Obtained from environmental sample
  DOMAIN (9)...(154): Phosphoenolpyruvate-dependent sugar phosphotransferase system, EIIA 2
  misc_feature (1)..(160): Xaa is any amino acid
MYNIIRLSEQLSEKHIVIHSSSTSAEDILREMVQKLSDEFSPDICEEILNEVFAREKVRSTGIGHGIAIPHARTALVKQLYCAAATSESGIEFKALDGKPVSLFFLIISPDFTVGPHLNILSAISHLVSKKAKLSSELNDVDSTAEFMKILKETEEKYII

SEQ ID NO: 91796 - protein, 229 aa, Unknown
  Obtained from environmental sample
  misc_feature (1)..(229): Xaa is any amino acid
MGTISVEYSSNLYWLGRYVERAYTTLNTFFNYHDKSLDKDKNSYREFLDNLDIKDKYGDHRRFIQGYLYDDKDCFTVSSTLRFAYDNALVCRNVIGSEALAYIQLAIDAFHSSRKAKNLRLSLMPVIDYLLAFWGSVDDKIASGEARTIVKCGKLVERLDLYFRFAYDYNLINSEYEKLCHVLARVRKGFLNAHHLAVLVEVLAIEESYKGRFDEVLDSLNKLFEEQAA

SEQ ID NO: 91797 - protein, 581 aa, Unknown
  Obtained from environmental sample
  DOMAIN (311)...(400): GAD domain
  misc_feature (1)..(581): Xaa is any amino acid
MNQYRTHTCGALREEHVGQTVKLSGWVDTIRDHGGVTFFDLRDQFGITQIVLHDEDSVKQVSKESVITVSGPVKRRDVDTVNPKIETGTVEVHAETVVVQSKAVHALPFEISESKNTREEVRLRHRFLDLRNPAVKANILLRSKVINFLRTKMLEHGFTEFQTPILTSSSPEGARDYLVPSRKHHGKFYALPQAPQIFKQLLMVSGFDRYFQIAPCFRDEDSRADRSPGEFYQLDFEMAFAGQEDVFRVAETVMYAVFTNFSNKPVSPAPFIRIPYAESMLKYGTDKPDLRNPLVITDLSGFFADVEFKPFKNIPVRGIVTQGAALQSKSFFEKMLAYATEIGMKGLGYISVMEDGGLKGPIVKFLSEEKQNTLRKDLCLKTNDTLFFIADAPAKVNNLAGQIRTALGNQLNLINKDRFEFCFIVDFPMYGKNEETGGAIEFTHNPFSMPQGGLEALETKQPLDILAWQYDIVCNGVELSSGAVRNHLPEVMVKAFDLAGYTQADIENKFPALYNAFHYGAPPHAGMAPGIDRIVMLLAEEENIREVVSFPMNSSAQDLLMNAPCEVTEQQLREVHIKIRN

SEQ ID NO: 91798 - protein, 657 aa, Unknown
  Obtained from environmental sample
  DOMAIN (108)...(245): Thiamine pyrophosphate enzyme, C-terminal TPP binding domain
  misc_feature (1)..(657): Xaa is any amino acid
MDKNALALVALSVRSLAMDAIQKANSGHPGVVMGAAELGAMLYGEILRHDPSDPKWPDRDRFILSAGHGSMFLYSLLHLSGYADMTMDAIKSFRQVGSAAAGHPEYGASGGIEMTTGPLGQGLATAVGMAVAETMLAARFNTPARKIVDHYTYVLAGDGCLQEGVSGEASSLAGHLALSKLIVYYDSNKITIDGSTDLSFTENAAKRYEAYGWQVLSGSMYDFEQIAKLTAQAKAETKKPSLIILRSVIGKGAPNKQNTADVHGMPLGMEELALARKALGIPGDPGTLNFYVAPEAEAYFKAKRDEWKKTREKWLAEFDAWAKENPDKKKEWDAFYSGKAVKAALPSFAVGEKIATRSAGNKTLNAIANVNPNLVGGSADLKGPNAVGISGAAVYSASERGGRYIHFGIREFAMAAISNGISLHGGFRPFCSTFMVFSDYLRPALRLSALMKQPVIYVLTHDSIYVGEDGPTHQPVEHLAALRAIPNVRVLRPADAEETAEAWAMAMERTDGPIVLAFTRQNTVVFAKEDPEWKDKLRTGAYIVKKPSGSIDAVLIATGSEVNLALAAAELSGKNVQVVTMISRELFKKKREAVRKSVVPSGVRTIVCEAGVRQGWERWAKPEDILSIDRFGESGPYEKAAEHLGLTSKALAGIIGQ

SEQ ID NO: 91799 - protein, 40 aa, Unknown
  Obtained from environmental sample
  misc_feature (1)..(40): Xaa is any amino acid
MAPLHHHYEMLGWSENKTVIRFWILGGLCAIIALSTLKIQ

SEQ ID NO: 91800 - protein, 189 aa, Unknown
  Obtained from environmental sample
  DOMAIN (42)...(189): ABC transporter
  misc_feature (1)..(189): Xaa is any amino acid
MTEQGEAKLGRRPIIAVQNLTKRYKGAGKSAVDSISFSVGEGEFFAFLGPNGAGKTTTISILTTTLSKTSGELHIAGFDVDTQSRQVREEIGIIFQQPSLDENLSAEENIRFHACLYGMCGYRPSFKLMPVAYRKKVLELADMVGLADVLGKPVKKLSGGMQRKLEIIRSLIHTPRVLFLDEPTQGLDA

SEQ ID NO: 91801 - protein, 403 aa, Unknown
  Obtained from environmental sample
  DOMAIN (1)...(223): N-6 DNA Methylase
  misc_feature (1)..(403): Xaa is any amino acid
MKLFLELNTYSNIISYNSLESLDEIKSLLHNTNGFDVILTNPPFGAKINQQALLRTFQLGYKWSKDQNGFNRMGNILNTQTVESLFIERCIDLLKVGGRMAIVLPNGNFENPSLEYIRYYIMEKCKIMAIVNLPQETFIPYGTGVKTSLLFIEKKEESDTQVYHIFFGKITKLGYQGNKNGTPVYKKNLYGQIMTDSNGSQILDEDVSELIQLYKNFSTGKDYVTSHSFSIKSSQMGSRFDFDYYFPETRSLFANTTNSVKLGDVCEIVKQKSSKLKINSGFIDYVELSDINAYSFEIINATSYNIHGLPSRASFEIREGDIITAVAGNSVGTKKHATALVSKYYNGCICTNGFRVLRNFKINPFYLLYYMRTDKFLKQMYMYRTGAAIPVVSDTDIYNIIIE

SEQ ID NO: 91802 - protein, 61 aa, Unknown
  Obtained from environmental sample
  DOMAIN (1)...(58): Ribosomal L29 protein
  misc_feature (1)..(61): Xaa is any amino acid
MKELNELNDEQLKEKIKDLSLSLLKNRFELKTGHVDNPNIVREIRKDIARVKTMITARGKK

SEQ ID NO: 91803 - protein, 85 aa, Unknown
  Obtained from environmental sample
  misc_feature (1)..(85): Xaa is any amino acid
MPGVIVCGVFSFLYAWGDLAYGMTFIQNQMNRPITAGIFNFMGQYGTKWSYLTAFAVVTIIPVVLIFVFMQRYIISGLTSGAVKG

SEQ ID NO: 91804 - protein, 300 aa, Unknown
  Obtained from environmental sample
  DOMAIN (132)...(155): 4Fe-4S binding domain
  misc_feature (1)..(300): Xaa is any amino acid
EGQNARFSFSPPKTYVRYAVLGLFVVAIFFGISAVVSVLDPYAAYGRIASNLFAPIYRLGNNLLALLAESVNSYAFYSTDVWQKGWPTFGIAAITLIVVGTLAWRNGRTYCNVICPVGAVLGFISKVAIFRLMLAPDKCTKCKACERGCKASCIDSESMAIDNSRCVNCFNCIENCKSGAIKYAREKFAPEKKMPEETNQTNQNGVTRRDLISVVGAMAVAETIQAPLLYVDGGLAKIEDKKIPARKTPVVPPGSSGAKNMKSHCTACQLCVSACPNDVLRPSSSLATFMQPQMSFERGY

SEQ ID NO: 91805 - protein, 186 aa, Unknown
  Obtained from environmental sample
  misc_feature (1)..(186): Xaa is any amino acid
LPSGDILLIDTAGFASKAQNKIDEMAMQKSEEILEKANLKILVTDASTPLPYDFERLTSMANLAVWTHTDISCKFFDEKKSDLGNFKVASPKGEGIEELINALDNIFFPKDETEELWITSERQIACIEKAEGCVLRALELLRQTEPAIELAAFEMREARNALCSVTGEISDESILNSIFSSYCIGK

SEQ ID NO: 91806 - protein, 289 aa, Unknown
  Obtained from environmental sample
  misc_feature (1)..(289): Xaa is any amino acid
ADRQKKQTVAVDNKKEIAGQARNDGAANKITFAELRRLVKEYNIDVKASRRQIVIPAGKAFWGLGKGKDDGDTLSVILSVDTALQKYAASMFRQYKPRYAAAVAVDPTTGRVLALASYAGDGTEIDGKDLYLRNRFPAASVFKTIVAAAGIERGGMHAKTTIEHFGRNHTLYTTQLKKDLKISRDITLEDAYAYSINPVFARIALFNINKDVVTEYGRRFGFNEPIPFEYDVDKSEMFAPDTGFSVAEFASGFNRKTTITPLFGALIAGAVCENGVIFEPTIIDTVRST

SEQ ID NO: 91807 - protein, 132 aa, Unknown
  Obtained from environmental sample
  misc_feature (1)..(132): Xaa is any amino acid
NYETPDIRLYLAEYEGETLAAIVTLFRGADAVYLYGASSDNKRNLMPSYALQLKAIEDAKNYGCSNYDFFGIPPFYNSAHPMSGLYLFKTGFGGKIIHRSGSWDFPCRNILYKIFRIAESLRSIIKMRKKKC

SEQ ID NO: 91808 - protein, 369 aa, Unknown
  Obtained from environmental sample
  DOMAIN (279)...(357): BRCA1 C Terminus (BRCT) domain
  misc_feature (1)..(369): Xaa is any amino acid
ERQIAFKFDLETAYSILRNVNGSESGATYTPIGIVDPVRLAGTTVQRANLNNPDMIRSMGLKIGSAVAVVKRGEIIPKIEGLAPANALSEPEEKSEILFPDKCQSCGSALEDAGTRLFCPNSACSKRLHHRLEKWVSVLDIRELGEKLIHQLFDSGRVRNVSDLYSLNVTELEDFERMGELSAAKVIRHIRTRREISLKAFVAGFDLEGVGELIMERVVLSGFDTLDKLRSARIEDLSGIYGLGEITAKTIFKGLIECKDEMDKVLSAGIISIALPPKNEDVPLKGLSFCFTGELRSIKRSQAEEKVKALGALVKTSVVKDLSYLVTNDPESGSAKNRKALEMGVKIINEDIFFKLIKNNKITSQKELF

SEQ ID NO: 91809 - protein, 137 aa, Unknown
  Obtained from environmental sample
  DOMAIN (1)...(127): Bacterial extracellular solute-binding proteins, family 3
  misc_feature (1)..(137): Xaa is any amino acid
AGEFKAVRDLSGKTAAAETGSAGESAAQELVGETGKIVGTAAQVNTFIEVKSGAVDFAVVDILLANRLAGSGDYSDLKIADITLGYEVYAVGFKKGSELRDKVNKALKEIYDEGKMLELAKKYHIEDSLVLNTNFNG

SEQ ID NO: 91810 - protein, 737 aa, Unknown
  Obtained from environmental sample
  DOMAIN (473)...(693): Methyl-accepting chemotaxis protein (MCP) signaling domain
  misc_feature (1)..(737): Xaa is any amino acid
MNLRIKLTVIILAMILVSVAVLSVFNLTRSSALQLDTTYTYAQTLVKLNAKETQRQMEVFTDYGNVLVQIFNGYEDTEMSGRRQMYDDVMRSLISSVDSILGIWTAWLPDTIDTYDARLGQYQTYFHRRNGPLVKEPAGFAGWQDQLKRITPQGLTSTTGREPAFQELADVFWVDVAGRGSVPVVAVIYTFTNSKGQIIGLVGINFISTAQEIVDGVVKELYNGAGTATIFSDNATIIAHWDKERVMDNLKTNDKEKTLFGNDIDRIANAILHGQNLTLEKYSPSLKTEIFYILQPIIVSGFETTPWSLRIGIPVSEIKKPIRALMSYSIIFAVILLAVAAVITLLVATGIVKPIIKVTATLKDISDGEGDLTRTVAVSSKDEVGDLAMYFNKTLGKIKDLVLLIKKQAGLLSEIGDDLSSNMTETAAAVNEITANIQSIKSRVINQSASVTETNATMDQVVTNIDKLNDHVETQVSNLSQASSAIEQMVANINSVTDTLVKNAGNVKTLKEASEAGRTGLQEVSTDIQEIARESEGLMEINAVIENIASQTNLLSMNAAIEAAHAGEAGKGFAVVAGEIRKLAESSSEQSKTIGAVLKKIKGSIDKITRSTENVLNRFEAIGSSVKVVSQQEENVRSAMEEQGQGSKQILEGVGNVNEITRQVKSGSNEMLEGAKEVIQESNNLEKATQEITSGMNEMASGAEQVNVAVHHVNEISVKNRESIDNLIQEVSRFKVE

SEQ ID NO: 91811 - protein, 448 aa, Unknown
  Obtained from environmental sample
  DOMAIN (1)...(383): Serine hydroxymethyltransferase
  misc_feature (1)..(448): Xaa is any amino acid
MAVQLAMGNLLTDKYAEGFPGHRFYAGNENVDAVESLAQQEACKLFGAEYANVQPHCGADANLLAYWAILQTRVEKPLIEKFNAASGSQGYNLYKLSDSQWKELKASFGNQRMLGQDYYSGGHLTHGYRYNLSGKLFDMHSYSVSRETGLLDYDQIEKQALEVRPLILLAGYSAYPRKINFKRMREIADKAGAVFMVDMAHFAGLVAGKIFTGEYDPVPWAHVVTSTTHKTLRGPRAGLVLSTFEFAEALDHGCPLTMGGPLPHVIAAKAVAFREASSSEFKRYAQRIVDNCRDLAAACMNNGLEVLTGGTDNHLLLINVNHIGLTGRQAESSLHECRVTLNRNSLPFDPNGPWYTAGLRLGTAAVTTLGMGKAEMEEIASIMTMVLKGTTPAQNAKDPSLKSKAKYLVDPAVKTAAIDRVKNLLDRFPVYPELDLPMLKELFVKQAV

SEQ ID NO: 91812 - protein, 282 aa, Unknown
  Obtained from environmental sample
  misc_feature (1)..(282): Xaa is any amino acid
DDALWLVSSIAEYIRETGDAAFAEMFLPYADAEAATDSVYEHCKKILNFSQRMTGSHGICQGLKADWNDCLNLGGGESAMVSCLFIWALDNFVKLAEFLGKTEDAAVYKTIREKTAKVCRETLWDGKWYLRGFTGKGRPIGTDADAEGKVHLESNTWAVIVSGDPERGKRAMDSVEEYLGTPYGLMLNAPAYTVIDDDVGFVTRVYPGLKENGAIFSHPNPWAWIAECILGRGGRAMDLYNRLCPAAWNDKCDIRKAEPYSTCQFITGKSHPAFGEAHHPFM

SEQ ID NO: 91813 - protein, 444 aa, Unknown
  Obtained from environmental sample
  DOMAIN (1)...(63): Putative carbohydrate binding domain
  misc_feature (1)..(444): Xaa is any amino acid
MRYGFFDNTQCEYVIERVNTPMSWTNYIGTENMVGVFNQTCGGYLFYKRAEHHRITRFRGNAVPTDRPGHYVYLRDDETGDYWTISWQPTAKPVECYRARHGLSYSVYSCDYSGIYAEQTLFIPRGADVELWDVKIENRSGRPRKISVFSYAEMSWHQIDGDNKNFQSTLYCAGASYKDGVIEQELHYEENSYQFFTADFEPDGFEIERERFTGVWQSEGNPEAVEKGALQGRAAWQGGNQCAALHKRLSLPEGKETRLCFMLGEGNRKAGLSIRSQFISANARDAALAALAAYWRGKQSNLQVNTPNANMNTMVNIWTLYQSEINVKFSRFASFIETGGRTGLGYRDTSQDAMCVVHSNPSKCRERLIQLLKALVSEGYGLHLFEPEWFEEKTGTEFKNPTLGFVPDRKSRIHGVEHACSDDALWLVSSIAEYIRETGDAAFA

SEQ ID NO: 91814 - protein, 583 aa, Unknown
  Obtained from environmental sample
  DOMAIN (228)...(372): Homoserine dehydrogenase, NAD binding domain
  misc_feature (1)..(583): Xaa is any amino acid
IDEISYNEAIEISHFGARVIFPPSVKPALEKNIPIFVRNTFNPKGSGTKITAKAAPGKYSIRGISSISKVALVRIQGTGMVGVAGFSARVFGALARKGINVMLISQSSSEYSICFAVLPEDIQKADATLKEEFANEIHNCSIENPIIEKDLSIIAVVGSAMKSTSGISGKFFHALGRNGINIVAIAQGSSETNISAVISSADECKALNAIHNAFFFAHQRSVNLFLIGTGLIGGTLLDQIAENREKLADNMIKINLIGAANYDKMIFSPDGLDPKKVKKLLTAAGKVEGTQAIEPNQKGANAFIEKMASFNLPNSCFCDCTASEDIAALYEKILHYSVPIVTPNKKANSGSYDYYKRLTTYSRERGIPYLYECTVAAGLPVISTLRDLFLAGDKVIKIEAVLSGTLSFIFNSFDGSKPFSALVREAKEKGYTEPDPRDDLNAMDAARKVLILARECGLNIEFKNVKIDPILPPACFNAKDINAFFSELEKTDADYEKRRAQAAAEGKQLRYIAMIEEGKAKISFRAEGEGSPFRSLVDSDNIVVITTNRYSKLPMVIKGPGAGAQVTAGGVFADILRTARTLV

SEQ ID NO: 91815 - protein, 73 aa, Unknown
  Obtained from environmental sample
  misc_feature (1)..(73): Xaa is any amino acid
MAVAENIKNALASSSMIRKMFEEGIQLKKQHGEDKVFDFSLGNPDIEPPPAFHEAFVKMAQEDAKGSHGYMPN

SEQ ID NO: 91816 - protein, 398 aa, Unknown
  Obtained from environmental sample
  DOMAIN (48)...(311): Beta-eliminating lyase
  misc_feature (1)..(398): Xaa is any amino acid
MAIAANIKNALASSSMIRKMFEEGIQLKKQHGEDKVFDFSLGNPDIDPPPAFHEAFVKMAQEDAKGSHGYMPNAGYPHVREALAKKVCKEQNVNIDGSHIIMAVGAAGGLNAVFKTICNPGDEVIVSRPYFMEYRAYTANHGAKLVEVDSLNDFNLDINAIGSALNEKTAAILINSPNNPTGKIYSASVLASLSSLLTEHGKKTGRYPYIISDEPYREIAYNVEVPPVLSCYNESIVVSSYSKSLSLPGERIGFIAVSPNASGKDDLLNGLIYATRVLGFVNAPALMQRLVGALTEARIDVSIYERRRDAFVKVLNNAGIEYSMPEGAFYLFCKVPKSKTGRQETDDKAFVEHLKKHLILGVGGSGFGKSGWLRFAYCVDEKIINASQNAFKSAMESW

SEQ ID NO: 91817 - protein, 266 aa, Unknown
  Obtained from environmental sample
  DOMAIN (5)...(35): Flagella basal body rod protein
  misc_feature (1)..(266): Xaa is any amino acid
MVRSLWTGASGMIGQQANIDTISNNLANVNTHGFKKQRADFEDLIYQTVKTAGTPATEDTVVPVGIQMGHGVKLADTQRVFSQGSLQNTGVATDIAIVGEGFFKIQTYDGTMAYTRNGNFKVDSDGRMVTGNGYWLIPDIIMPENFLPEEINITKDGRVSVKVPRDGELAEVDVGRIELYRFPNPVGLTAIGENLFRTSQASGDPIPGRPGYEGMGQIQHKFLEMSNVSVVQEMVNLIVAQRAYEFNSKSIQTSDNMLGTATTLKR

SEQ ID NO: 91818 - protein, 59 aa, Unknown
  Obtained from environmental sample
  DOMAIN (16)...(54): Domain of unknown function (DUF1078)
  misc_feature (1)..(59): Xaa is any amino acid
GCGNSPQSSTGILEASNVDPVMEMVQMIEVNRSYEANQKVIQSEDSMLGTLINQVAKFG

SEQ ID NO: 91819 - protein, 205 aa, Unknown
  Obtained from environmental sample
  DOMAIN (5)...(35): Flagella basal body rod protein
  misc_feature (1)..(205): Xaa is any amino acid
VIRGWYTGASGMRAQQWRLDAVANNLANVDTTSYKKDVTSFKAFPELLLRRQGDDGVYLHPFGSADEAPIVGKLGTGVELNELFTVFSQGAPKETQSDFDLMLEGKGFFSVATPYGERYTRNGSFILGKEGYLETKDGYPLLGENGPIRVKANNFKVDNEGRVWINAAFPDEPDVMVGRESNQWEELVLLDTLKIVDFELDRFLE

SEQ ID NO: 91820 - protein, 214 aa, Unknown
  Obtained from environmental sample
  DOMAIN (126)...(209): Hpt domain
  misc_feature (1)..(214): Xaa is any amino acid
LARVGLTTVIADNGQKGYDLVKKRYDNNEKQFDLIFMDMHMPVMDGLEAAEKIKELHTGVPIVAMTANIMFNDREIYKRSGMIECVGKPFTSQELWRCLLKYFTPKIPESDYKNTKLEASLEFQKKLHVLFVKGNQNKYQEIVDALDTGDIVLAHRLAHSLKGDAGNVGKILLKTAATDVEQNLKNGKKLVTAEQLNILKMELDIVLSEFKAIS

SEQ ID NO: 91821 - protein, 483 aa, Unknown
  Obtained from environmental sample
  DOMAIN (55)...(289): Glycosyl hydrolase family 3 N terminal domain
  misc_feature (1)..(483): Xaa is any amino acid
VMALMDLNKKIYQMTQAKVGNSFGSGGNFYGSVLHGGDGYSNSVLSSMNSAINSASPKIPVTYGKDMMHGAAAIDGATVFPHNIGLGATRDSALVRRACEVTAKESWAGNVDLIFGPAISVPQDDKWGRTYEGFGSTPELAVEMGAACIRGYQGAKYDAPWRVIATAKHYLADGGVSKDRGNVTASDADIRKIHFPGYEAAVEQGVLSVMASFNQINNVHQHVDSLRLTGWLKTELGFDGYIISDWQGIANSTQPGYTECDYGSSCTGPSLTSDAVRKAINAGVDLAMEPGSHTSFINYLTALVNNGQVSEDRINDAVRRILRAKFRAGRMDKPAGISSEVKAAYGDIGSAAHRDVAREAVRKSLVLLKNDNALPISKTAKVFVTGSHATNTGYLCGGWTGNGCETSGFNQTCYGWTNTRDNVQGATSVKDGFNKVVANSTVDNASNAQIIVYVTGEKPYAEWHGDIQSLTFQDNLSSPNLAT

SEQ ID NO: 91822 - protein, 295 aa, Unknown
  Obtained from environmental sample
  DOMAIN (189)...(271): Fibronectin type III domain
  misc_feature (1)..(295): Xaa is any amino acid
GEPKNANGSGSANTAVSGKPIGNMGTVTVSAGNEQISLSWTSVAGADQYEVYYSTTNTIPASPSQTVSTNTATISGLANGTTYYAWVKAKNANGTGSASTAASGIPMTTPDALTLSAANQQITVSWAAVPMAGSYEVYYSTTTTIPGTPEDTVTGLSKTITGLSNGTTYNFWVKAVYTGGTSGASPMASGKPVGNMGTVTLVSGNGQVSLSWSAVVGAEQYEVYHNTSNSIPASPTLTVTTNAVTISELANGTTYYFWVKPKNTNGAGSTGVAASAKPIGTPEAPALTSGFRQLL

SEQ ID NO: 91823 - protein, 252 aa, Unknown
  Obtained from environmental sample
  misc_feature (1)..(252): Xaa is any amino acid
MLKKILEFYNRLFQAPDDLFNSDTFYGELNYECSKLSFMFFLSAVAWLTYIPLDNKLHVNYPAMVLMLRLGLTLLSMLCLALTFTKFFKARPIILLIALVTYLNFGTAVITATADANVITAYMGGFVFVLMIPVFAPFPLACKFIITFLPVAILFALGSAMGVQFFKPPISYAANDTLCTLIMTIILSYAQNTLRYNTWRQQITLKFLVEQDQERIETISKLASKAEAASKSKSDFLARMSHEIRTPMNAVI

SEQ ID NO: 91824 - protein, 376 aa, Unknown
  Obtained from environmental sample
  DOMAIN (209)...(292): Hpt domain
  misc_feature (1)..(376): Xaa is any amino acid
IAVQSEYGKGSVFTVTLPQGISVRESFVTEAAAKAFIAPTARVLIVDDVRTNIQVAQGLLSFYEMTVDTCLSGPEAIEAVKQRSYDLIFMDHMMPEMDGVEATRHIRELPAGGNLPIIALTANAVSGMREMFLQNGFDDFLSKPIDTAKLNTILERWLPKEKQVEAALEDDGVDAAPDSTRVHATFCIRGVDTDVGVSRAGGSQENYLHTLSIFRDDAAAKAGEMKGALKNGDIPALTLYAHALKSASANIGASDISERAHALEAAGKSGDMAFINANAVSFLADLETLIEDIKLIIAVNKIAAAQTPSDLGMLKNTLTALKTALADVDIEEIDKNALELQNFSHTAGAESAVEAILRMVLIGNFDEAEVPNRQPM

SEQ ID NO: 91825 - protein, 288 aa, Unknown
  Obtained from environmental sample
  DOMAIN (128)...(241): PAS fold
  misc_feature (1)..(288): Xaa is any amino acid
KLQALINSIPDILFCKDTNYKYTQFNAPFEQFLGVDEAEIIGKSDKDGAWLHNDDMKLIHEREKMIINEGRVLVFEEKIHSPKTGNESFFETVRAPIRQGGVVMGIVAIAHNISERKALEQELAFKTAKLQMIIDTIPDILFCKDTNLKYTQCNRRFERFWGVHEADVLGKSDDDRLWFSPDLLQRINQAELDVINTGKSVVRELSLSSPLTGKKAVFESVFSPLMQNDEVVGIVCIAHDITIRKKMEDEIRAALDSKTSFLAHMSHELRTPLNVIIGPYRFDNGRHP

SEQ ID NO: 91826 - protein, 187 aa, Unknown
  Obtained from environmental sample
  DOMAIN (1)...(181): Cellulase (glycosyl hydrolase family 5)
  misc_feature (1)..(187): Xaa is any amino acid
MTGPGPEYTVDPMLLRFLDKAVDWAEKYEIYIIIDNHSFDPDKNTANDIDKILLPVWAQMARHFSKRGDFVLYEILNEPHGISDARWGEIQGMAIDTIRRYDTKHAIIVGGTEFNSIAKLPAIPKYDDTNLIYTFHFYDPFMFTHQGAGWSPPMEYLGGVPFPYNASRMPKLHNKLRGTWIERNLRY

SEQ ID NO: 91827 - protein, 63 aa, Unknown
  Obtained from environmental sample
  misc_feature (1)..(63): Xaa is any amino acid
MSRWQLGGTKRHITAIFTDVQGFSSISEKLDPEELVSLLIRYLSAMSDVILTEKAASTTLTEK

SEQ ID NO: 91828 - protein, 427 aa, Unknown
  Obtained from environmental sample
  misc_feature (1)..(427): Xaa is any amino acid
MGAIITQLCDEVKLPRMIKVRQIFDPHKIETSDIPDAVYAQMSRNGLGDYIKKDKRIAITCGSRGVANIAVITKAIAGFVKSKGAKPFVVPAMGSHGGASAEGQKALIESYGVTEEFIGCPILSSMETVVIGESGEGHKVRIDKNAAEADGIIVAGRIKPHTDFHGVYESGIMKMMAIGLGKREGADICHQNGFGHMHHMVPLFGKTILKNAPIVLGFGIMENAYSETCKFIALKPDEVEEEEPKLLNEARTHLPLINFKTTDVLVVERIGKNIAGTGMDPNVTGTGPCTPFITEGGITALRTAILDLTQETHGVAFGMGAAHVITRRLFNKIDYDATYVNAVTSRGVELVRIPFIVDSDREAVQMALRTCIGNDKERPKIIRVADSFHTEYLWVSEYMREEAQANKRVEILSEPEEWAFDKDGNLW

SEQ ID NO: 91829 - protein, 329 aa, Unknown
  Obtained from environmental sample
  DOMAIN (55)...(144): Transglutaminase-like superfamily
  misc_feature (1)..(329): Xaa is any amino acid
YFWEIFSERAENLEPVNEYMEKITAILYNFSEYQYDLNQGEDNSIAALKEFLLNTKEGNCVEFSNTIALLGRLAGVPSRVVTGYLVAEGLQTNAHLKGIASLREKIPVLQQFPFNNLYMVTNLHAHSWTQFYIPDYGWIDFEATQFALPPLGAGDFNTWDVVIPVLEQDKVFSEIRKFPWRAVLKTSGSMAVFALICAYILMYGREVFLFFNARKGGRKGARSLYLLLLARLAADGKPVKPASKTALEYAELFPFKTTDDTVTEENPHLKNFASLYTEIRWRDFKESAQMDECFMKLKQEYKNILETTKRGGIHGPLLRLISLRGLGYL

SEQ ID NO: 91830 - protein, 286 aa, Unknown
  Obtained from environmental sample
  misc_feature (1)..(286): Xaa is any amino acid
IYIKYAAKDPRLKIVRPDDSGAAAARHAGLRTATGAYIHFMSAQDVIPADYYAKMLIPAFTETDADLVSGGVNDEQFPERSFKFSAEEILRSPAEKMHWGCYKQGGAAGGYLFKLKFAKHCAAAESEDALFAVTAVYYANRIILAPGCVYFCRANPLREIDPVYLRNKIRQFCQERGLDFRNIDYAFVSAVTCALPFDNCRVDADGNVSLCRVPWIKNNYLGNIYAESFEQIWNSHLAQTIRTSVLDGAYTYCDRRICPCPTRPVQPADLEFISPYPQRVNIVTDR

SEQ ID NO: 91831 - protein, 386 aa, Unknown
  Obtained from environmental sample
  DOMAIN (267)...(346): Toprim domain
  misc_feature (1)..(386): Xaa is any amino acid
MALISKASIAEVNSRLDAISVVGEYVRLEKKSGRWWGRCPFHGGGQEKTPSFKVDSDLKMYHCFGCGKGGSVISFVMEMDKLTYPEAIKSLAKKMSIELIYEEGGPEEGEEHSIKEELYELYKRMTGTFEHFLHEKEEGKPALNYILDRSISEEMIKKFQLGFAPADRDFLHKFLKQKGYSDEFLEKSGLFSAKYKTIPLFSGRLMFPITDRQGKIVAFGGRALPGTVQSDGNESPKYINSPETEIYKKGQTLFAIDHAKPQMRQTKTVYLAEGYMDVIALHQAEIVNSVAPLGTAFTDEQAAWLRRWVDNVVLIFDSDEAGQKAAYKAIITCRKNGISCSLVNLQDGLESEIDGEEAKKIKDPADILQKFGPQILKKVVKFTIND

SEQ ID NO: 91832 - protein, 300 aa, Unknown
  Obtained from environmental sample
  misc_feature (1)..(300): Xaa is any amino acid
VNNFRKRVYGGRANTVRPYAAGGGVDTVWKMLSRTMLIVAAFVCAFGFSSAASAQDIEDALSAPDGKADTIMTPFGPQIVNGDNSADMPEKSVKAGKKTNTILNEILGESDWTFVDKIALRFVMNIVFAYILICLIFAKEHRIREYAFCFFISNILIFMVTSLLAYVKVKTGFAFGLFAILSILRYRTEQINIREMTFLFASIIMGVINSMATDGLMLLAVFLADVVLCASIAICDSRFMGKTDQLLLVYDNTGLLAKDKKKELFEDIKNRFGYDVIKVVVTKMNYLTDSAEVKLVYKRN

SEQ ID NO: 91833 - protein, 302 aa, Unknown
  Obtained from environmental sample
  misc_feature (1)..(302): Xaa is any amino acid
VLPQAREKGVVFSNLCPFSHDFYRKFGYEIACNRNKISIWAGDLSETKSYGEFIHILPGDDTSLLAEVHSAYIENINHGIHRDYWPDNRAWKRFTSDDPCATGIYIYLWKDETGKARSYIKYQDLFEDGEHNMSVLELAFIDKKGLYGALGIVGGLSAQFKHFKWLMPTFIDPFDFTGDAWSIEQKISPRDMTRVINVKTALELMRHPGNEGEYVIEVEDENIEANSGRYLVQFGAQGTKVSITKKDADISCDILTLSQLVTGYRSLENALYSRREGLEIHGNIETLKTVFTERPQHITEYF

SEQ ID NO: 91834 - protein, 136 aa, Unknown
  Obtained from environmental sample
  misc_feature (1)..(136): Xaa is any amino acid
MPTALKERKTVISDSELAQRVAVIKRFKELLVQQRERFRTYLAVLDKQQQLIIGIDSADEIVAHVELEEQIVADIFSIQKVIDPMEVMYNSVSPYLPANDVLELKATLEDLKNQAAVRSRRNRDLISSRMREINKD

SEQ ID NO: 91835 - protein, 1669 aa, Unknown
  Obtained from environmental sample
  DOMAIN (1515)...(1542): The GLUG motif
  misc_feature (1)..(1669): Xaa is any amino acid
NSYNTGNVTSSDSMTNAGGIAAVNQSGATVEFCYNTGNVTSGRIAGGIVGSSSSGTTVQNCVSLGARVTGGYSTGRVVASIGGTMTNNKARSDMKVGQSGSEAIPTTSIAANGGNGANFGLGTALSDVFAGWDTSLWNISGNLNIGDNLPTLKPNTQIPAPTLPAAYSAPGTAEAPFLVANEADLRKVGTGTDGWTLSAHYRQTANIVLTSNFTRIGNNTNKFTGSYDGGEYAITNLSMTIASSYTSLFGYIGASGTVKNVNVTSGTISVSTGSYVSIGGIAGENEGTIDNCSFSGTLSVSPHDQIGGIVGQNNGTVKNSRNFANVTGGNQVGGIAGTNQGKLDNSYSAGTVRGSQQVGGIAGTNVGSGNYIKNSYNTGNVTSTAGTSSNVGGIVGFNQANTAVDFCYNTGNVTGSTAVGGIVGNSSGSRVVDNVSLGLLITGTGSLGRVAGIANGGTMIDRNKSRADMKLGTSGSETTIPSGSTGANNVYGADVALNTSLATVFDTSRWDTTLWNINGNLTIGNELPTLIPNTQHPAPLLPGSNPSPGTAANPFLVTNETDLRKVGTGTDGWTLSVHYKQTQDITLTSNLSVIGTNINKFTGSYDGNEKTISGLTMTRTSVSYFGLFGYIGSDGVVKNVTVTNGSITGTASSYFGGIAGQNEGTIENCSFSGTVNGDTTSDDVGGIVGRNTGTIINSRNTATVSGRTRVGGIAGENQGKIDNSYNTGAITGSQQVGGISGGNSSSGNYIKNCYNTGNVISTTATTTSNAGGIVGQSSALVEYCYNTGNVSGTGGVGGIVGYTNTGSAIQNCVSLGARVTGNGTSNGRIAGTNSSTVTGNLARIDMKVGISGSEALVTTGAAGNNAGANVSLGTALSSVFNTNWLSTLWTIPTGNLTINGNLPTLKTNTQSPAPTLPAEYTVLGTADNPFLVSNEIELRKVGTETTAGGWTLSAHYKQTADITLTSAFTGIVYTSSKFNGSYDGGGYTITGLNITATSSNLGLFGYIGSGTVKNVNASGTVTGTGSVAGIGGIAGANEGTIENCSFSGTVTGSTTSLQVGGIVGQNNGTVINSRSAATISGRTSVGGIAGVNNGKIENSYNTGSVSGRNQVGGIAGANSGTGSNIRIRNCYNTGNITATEPNAGFGGIVGANLSSSTVEYCYNTGNVTAQSNVGGIAGSNTAGSTIQFCISLGARVTGDSNVGRIAGTSSGTLTANYSRSDMKIGASGAETVPTVNIGTTAVNGANITIGSSTSLSTVFSSFDSTAIWNISGSLTVGGNLVTLTANTQSPAPTLPAAYVAGTAADPFLVTNGTDLRKVGTGTDGWTLSAHYKQTANMAMASTAFPPIGTSTNKFTGSYDGDGKYITGLNLTTTSATYLGLFGYIGEGGTVKNMTVTGTVSNGGNQTTGGIAGANQGTIDNCVFNGTVNGGTSVDQVGGIAGYNFPTGTVINSRNNATITGRTMVGGIAGVNNGKIENSYNTGNVSGNSQVGGVVGTNSSSGTYVKNCYNTGNVTGEMFPGGIAGANQNSAIIEYCYNTGNVTGASGAFGISGSNTAGSTVRYCVALSPKLTTTNSASVGRIASDTGTLTNNKARADMKTGFSGSEATVPSSQTGVNHFNGADVSLGTTVTTVFNNFDPNIWYIWNTPMNIGGDLPTLRKKEESPAPTLP

SEQ ID NO: 91836 - protein, 587 aa, Unknown
  Obtained from environmental sample
  DOMAIN (532)...(555): 4Fe-4S binding domain
  misc_feature (1)..(587): Xaa is any amino acid
MKKIIIGLGSCGIASGGLKVKETLKTLIEESKLDIELSETGCMGMCYKEPMIEITEDSAKTIYGDVDVKTAKKIFESHIINNTPVTENIVLDSNGGGSEKDFMSRQERIVLIRCGEINPESIDDYLKTDGYKGLEKAIKTMTPAQVIDEVQKAGIKGRGGAGFPTGTKWKFAADSKGDQKYIICNADEGDPGAFMDRSVLEGDPHSVIEGLIIGGYAIGATEGYIYARAEYPIAIRRLKIAIKQAQERGFLGDNILGTGLKFNLHIKEGAGAFVCGEETALIESIEGHRGMPRIRPPFPAVRGLFGKPSNINNVETLANIGWIIRNGYAAFAAYGTEQSKGTKVFALAGKIKRGGLVEIPIGMTIKEVVMDIGGGTKSGVPFKAVQMGGPSGGCIPASKMDTIIDYAPLAETGAIMGSGGMIVMDEDNCMVDIARYFLNFTQAESCGKCTFCKIGTKRMLEILQRITSGKGEDGDVEKLEMLASQIKTNALCGLGQTAPNPVLTTIRYFKDEYIAHIKDKKCPTHQCKALITFQITDACTGCTLCAKKCPVNAVSGKLKEKHTIDESKCTKCGICKSSCKFKAILVD

SEQ ID NO: 91837 - protein, 400 aa, Unknown
  Obtained from environmental sample
  DOMAIN (140)...(228): PPIC-type PPIASE domain
  misc_feature (1)..(400): Xaa is any amino acid
MSLWSQAFESAAVSIAVLQEMKRSNYEPPEKVVDREVAKLPQFQDEKGNFSIYLYRQMSESSRLSLWRQVREELTAIQFYNDIFTLLIPAGEKEFFSKMGADMRAFEMVYFHVDDFPDSEYLSWARENSDLFKSIHLSKITVKSGERAAKKILESIKDGTTTFEDAARSQSQDNYADRGGDMGVQYVYDLEREITDETVRENIFSLGKGELSAVFNLDDIWVFFRVEDGLKPADFDDSAVMDRVRSYMRNYERGRMEDWAIARADEFIADAKDDGFANTARRTSKERIKIGPLPINYGSVGLFTSLSDFENSAFQKQELTDLSKNTNFWKTAFSTPLDTPSSPLVHGSKVLVLFPDVQIDIDKERADQISTFFSDYWLGSITEQSLQPFFMNSPRMKNNF

SEQ ID NO: 91838 - protein, 266 aa, Unknown
  Obtained from environmental sample
  misc_feature (1)..(266): Xaa is any amino acid
DETLDALVKRYPQDINLNRLFKIVCVDTCLGSLKERGILPDLVVILESQHWNLRDFTGCYNWQVPFAVDFSALPQSALMLAGEGFLFMTPWTPLQIFERLKNAQMLPAVLPPLGSVGLTAVGLSRRLTTGNIICAGLDFSFTPDKFHARGTPGHRALLNSQTRFRSIYNYAAYGQSSVAAVSKTRLPVYTNPALKNYRALFEQEFGGDSRVFDIEGIGLPLGVKTLSLDGAMDLLVNLTTKNTNNQKHSKNSIGIFGGQAQYITQR

SEQ ID NO: 91839 - protein, 507 aa, Unknown
  Obtained from environmental sample
  misc_feature (1)..(507): Xaa is any amino acid
NKIAKKDRKTGQKTPSDRLEQFLPPLIDASKLSARPKLMARITDSARRGVLFIHAPAGYGKTTAAAQWIGNRKTGWFSLDEYSSVPANFYRGVLTALSAPVPEDFDDAPRETMIAVLQKLREWPAVLVIDDFHLISDSAAAALPVIRSRMPESASFLVLSRNPPPDGLREHIIKGAVRLIDDLRFSGEEISALFGKNGTVLSKNDVERLRAETDGWAAALTAIIMANAEDGYTGIVKRETLNQYLRTYLFEYWERFDDLKKCSVCDVLNSELCGAVTGAADIWEVITALANKTGLVSRYGNNTYKFHALLKEALESELNADEKIDKPSLYKAAARWYMENGDWLHTLDMAAKSGDHDAVEEIARTASEIRDSFGVDAAQYIRLVEKTFLSIPSHIIAQYPRLSMHCALVSLLSRPLSDACVWEDILEKQMEEGLTKGSDLIAATLQTTLDPRYSSRRVAEQFKRLRLSGPVQAAGRTTVVPISLNFPFFHKGPRDFTDSSRELPEYL

SEQ ID NO: 91840 - protein, 325 aa, Unknown
  Obtained from environmental sample
  DOMAIN (23)...(306): Branched-chain amino acid transport system / permease component
  misc_feature (1)..(325): Xaa is any amino acid
MYQAMLQVVSGFDSRRGTWNIRYVGEWIVISMPLILCGLSMGFSVRVGLFNIGAEGQYIAGLTAAQLIAVGFTNAAGERLPVHFSLAVLGAMFFGALWGGISGFFKARYKVSEVVSTIMMNYIAFFLHRFISLSIPGSNTFRTPNFPDSASLSNPVLAAITNRSGLNNGLWFTIAAVVIYWLIMEKSAFGFSLKATGFNKEAALYAGMRVKTNITAAMAISGAFAGLAGAVVSLGLFSYGRILTSFDNYGFDGIAVALAGNCSALGISIMGLLFGMLKSAQPLTQLRQIPKEIASIIISLVVIFIALRPGVQMFVDWRKKKRLKD

SEQ ID NO: 91841 - protein, 264 aa, Unknown
  Obtained from environmental sample
  DOMAIN (30)...(264): NLPA lipoprotein
  misc_feature (1)..(264): Xaa is any amino acid
MNKITRFLIASVLVTALIFTACTKKTGTTVSVGATPVPHADLLNLIKDDLAENGITLKVVEFSDYLRPNAAVIAGDLDANFFQHIPYLESNKEWSKKLVSAFGVHIEPFGLYSTKYKNVNDLPNGASIAIPNDPSNGGRALLLLQAKGLITLKAGAGLTATSRDVTDNPKNFRFQELEAAQLPRSLQDVDAAAINGNYALEAGLNPVNDSLIIEGADSPYVNIVVVQRGKQNDPGIIALKNALLSQKVKDYIDSHYDGGVVAIF

SEQ ID NO: 91842 - protein, 212 aa, Unknown
  Obtained from environmental sample
  misc_feature (1)..(212): Xaa is any amino acid
MKYDFDSLIDRSNTYSIKYEPSWRGKPADVLPLWVADMDFATPPCVQEAIVRRAHHGIFGYSEPDMAYWNAVRNWFERRFNWITRREWLTITPGVVNALHIAVRALTKPSDGVVIQQPVYHPFESCVMQTGRQLLVNELVYSEGRYSINFQDFEEKIKQAKLFIMCSPHNPVGRVWSNDELTRIGEICLRHGVIVVADEMHEDFVFQDTNIL

SEQ ID NO: 91843 - protein, 379 aa, Unknown
  Obtained from environmental sample
  misc_feature (1)..(379): Xaa is any amino acid
FLPDGRVYGIPRPNSFDSWGFLINQKWLTKLGLRAPKTVAEFVEVCRAFTTKDPDGNGRNDTFGVSFGAQQSSNDSGIWQLRNDFFTMAYSISAWHWGMPDVDKSAKLRPLKAQYPDYMKQLRAMYEEGIIDREFITHNADEAVEKFAQGRVGIVGASEKNYTTGILERYSLNLDDYVYCPPLVLNASQKPVYALPPSNWMAYYINAKSSPAKQDAAFRVLDWGNSEKGFIAMQMGIAGTHYNSYDINTRTVNRTTAQFDAFRRVSSNMFGFANAYKGMEALAGGSNQAQITKWQREAGAAEAATTKCYFGFTKMLDNIGVQFPDIQTNLNSLEVRYITGQATWDQVDSYIKNSYAPATAGIAAEFAAFMAKNPARYVD

SEQ ID NO: 91844 - protein, 259 aa, Unknown
  Obtained from environmental sample
  misc_feature (1)..(259): Xaa is any amino acid
MQFLQSIHDFPQMVKLGDKMPSFGFNRFKQGLKFVPVDDEGFTLRGDKKSLVYKGRRRSHRFTILDNNSFEYDTILKKEPDSNVIRLRMEGAEKYDFLRQPDFVENPFLKGSLAVYKKETLVGEGTGKLCHIHRPEIIDARGRRCWGALAVVGNELRVTIPEKWLADAVYPVIVDPTVGTTTVGSQEEYTSGNYAYQLILNDDMALNKVLIPENVDGNGTVYVYKTPTLIGYTPSRIYPCIYEDVNNLPRTRFSNNEQL

SEQ ID NO: 91845 - protein, 71 aa, Unknown
  Obtained from environmental sample
  misc_feature (1)..(71): Xaa is any amino acid
LTLFPFPDEKIAELAGKGARFLVIEQNLGQMVEDVRLAVNGRAPVAWHGVMPCVFVDAEDFVAPIMKALEA

SEQ ID NO: 91846 - protein, 130 aa, Unknown
  Obtained from environmental sample
  DOMAIN (13)...(127): Pyruvate ferredoxin/flavodoxin oxidoreductase
  misc_feature (1)..(130): Xaa is any amino acid
MSAYRDVIMAGFGGQGVMLIGNLLAQAAMEYGLHVTFVPAYGVEMRGGTANCTVILDRETIGSPVVQRPLSSIMLNQPSLDKFQPRLVRGGVQIVNSSLVDAAHVDSGVRSVLVPLNAMAERLGNVKLLN

SEQ ID NO: 91847 - protein, 162 aa, Unknown
  Obtained from environmental sample
  DOMAIN (1)...(162): Carbohydrate phosphorylase
  misc_feature (1)..(162): Xaa is any amino acid
VYEVESDAGLGNGGLGRLAACFMESLATLGYPATAHCIKYDYGLFRQRIIDGQQVEFLDEWLATGGVWLTARPDEAVTVRFGGQAVPTRGPDGNLKFQYIDAQEVEAIPYDMMLGGYKAHLVSFLKLWSAKVKNTGDISLSRTDITNRMKEVSEIEINKLFH

SEQ ID NO: 91848 - protein, 235 aa, Unknown
  Obtained from environmental sample
  DOMAIN (122)...(151): Helix-hairpin-helix motif
  misc_feature (1)..(235): Xaa is any amino acid
MSSKKANDTEPDWKSIFRSLEKWRKAFLSTPDIEDTAVAAIAGEYTEGPAKPWAVLVSTILSLRTKDEVTRSASRRLLEKAVGPRELLALGLDETARLAYPAGFYRTKAANLQKIAAQLLEEYSGQVPADMDALVSLPGVGRKTANLVLTEAFDMYGICVDIHVHRICNRAGWLAAQTPEKTEIALREKLPKNYWKKINGLLVLYGQNVCRPVSPFCSRCVIKAHCLRAGVTKSR

SEQ ID NO: 91849 - protein, 84 aa, Unknown
  Obtained from environmental sample
  misc_feature (1)..(84): Xaa is any amino acid
MRVKKEENLIKLMRQVRKFDIEIDWPQLRNIQSINLQNGNNKVPLTDIMIAQNCIQNDLKLLTTDKHFMKMAEFLPLKIFDGMR

SEQ ID NO: 91850 - protein, 247 aa, Unknown
  Obtained from environmental sample
  misc_feature (1)..(247): Xaa is any amino acid
VIIPRRITDIIFAWLFRAFSFTGAAALGAIVIFIFVQGSQPFIFPGAHTLRMVVERFDRVTVNGQAYENPEGFIDLPWDTKTVLVEFVNRGEEQSLEFRLAPKKKGRTKLLLPVEPGTGEASFPDAYTCSVTYPGIMAGLTQKIHLILPEPPYNFFAFLGGMEWLPAYQKKYGVFPMILGSIFVCFGALLLGVPVAILCALFMAEFLPLRATNIFRGAVELLAGIPSVVYGFFGLMVIVPFVKQTLK

SEQ ID NO: 91851 - protein, 162 aa, Unknown
  Obtained from environmental sample
  DOMAIN (42)...(78): Sigma-70 factor, region 1.2
  misc_feature (1)..(162): Xaa is any amino acid
MTKTVIPAALETDSTEPRGIRKRSKNHSAVKNSKRSKAFKETDPLALYFKQISNFPLLTIQEEQNIGEKIISLRSKLRDLEAERTARPEDDYNREKAALDSALLFYKNKMINSNLRLVVSIAKNYQHRGLSLLDLIDEGNIGLIEAVERFDYTRGCRFSTYG

SEQ ID NO: 91852 - protein, 411 aa, Unknown
  Obtained from environmental sample
  DOMAIN (257)...(411): CheR methyltransferase, SAM binding domain
  misc_feature (1)..(411): Xaa is any amino acid
MEAIVRDLVQLNADLQEQKERVDTVDFKMITFSLAGKAYGVDIMNVKEIAKADKFTFVPNAASFVRGVYNMRGDIIPIIDLRQFFHLPQDKKTDGQENMLILKIHEQVYGTIVDRIDKVVGINHENIQPPHPIFGDINIKFISGVVEKEGELYIILDVIRILSQKEKTDDAAPIQVTEGPYLAKPTDKAADQRAVTDTAIGFIKEGLFALRRFSMAYLNETWVRKRFNEWSIGRDKNELQLKSASDADEFLSTFASPCTESFWDSDYAMAVKKLLPNDIDTNTINVWNIGCGKGYETYSFACILKSKYPDKQIKIWANDHDVMAISQAPNMVYDMTELPDYCHDFVVKGNSGYSFSPVIKDSIIFEFHDVTNENTLPPLDIILIRDVLSYLSEQDQTKVIDGFREKLKNKG

SEQ ID NO: 91853 - protein, 274 aa, Unknown
  Obtained from environmental sample
  misc_feature (1)..(274): Xaa is any amino acid
EEARIDPDNPYILTDHVKCACFELPFSDEELLSGVNGYGANARDALEYLEEAGIVRHTGAGVSSEGNGLREGRWHWADRSYPAEGVSLRSAAPDNVVIIDVTGGKNLVIGEMDRPSAKELIFENAVYIHRGRQYMVEVLDIENRKCLVREAEVNYFTDGLVKTDIKVLTEDEEFFFGNNSSGHKARGVMTDVLVRSQVTKFKKLRFRTHENIGYGDITLPEEEMQTRSLVLLFDPQTAGGRLLAEKDEKFIGEALSGAGTLIRTIAPVFCSATR

SEQ ID NO: 91854 - protein, 197 aa, Unknown
  Obtained from environmental sample
  misc_feature (1)..(197): Xaa is any amino acid
AFLDGLAYDILSGSSNPGNLALLSPEIKYNRYHQIGVDYAQVLSGFNVRAEFAVHITEDHSGDDGSVQNPFIGWSVGFDRDLIWGINFNIQCNETVRLFNDKIGNNPILDAEADTNAVSTRLTMRLTKSFFRDNLESSATVIWDVENSDCYIIPAFTLTEGSMSCKLSAGIFAGKETGELGQYWGNNYIKFGVTYSF

SEQ ID NO: 91855 - protein, 605 aa, Unknown
  Obtained from environmental sample
  DOMAIN (1)...(138): Histidine kinase-, DNA gyrase B-, and HSP90-like ATPase
  misc_feature (1)..(605): Xaa is any amino acid
VKYLTVADEAYKSITFDPRIDISFNKEEKTLTISDNGIGMNDTDLVESLGTIARSGTRLFLEKLAGDAKRDSNLIGQFGVGFYSAFMVADKIEVISRKAADDKTWKWASDGKDSFEIESSGESRDSQGTTVILHLTEEGIEYANRWSIEDIIKRYSNHVAFPIYLTYDEKEWDDKGKEKGSKIKTDRINSGTAFWRRAKTELKEEDYNEFYKQIGHDSEPPLHYIHTKAEGSLEYSTLFYIPKKAPFDLYNVDYKPGVKLYVKRVFITDDDKELMPVWLRFVRGVIDSEDLPLNVSREILQQNKVLINIKNASVKKLLSEFKLMADNAASVGDEAREKWETFVREFNRPLKEGLYQDFANREALMELVRFKSTATETDGDKPVWTSFAAYVSRMKSDQKHIYYITGGDEKTLRSSPLLEAYRAKEIEVLIMDDDIDDIIIPTLHSYRKETVGTDGKSESQTWELKAVNRAGADEELGETKNKDAEKEAKPVIEKIKKALGDRVKDVKLSRRLHDSPSCIVADENDPSMQMAQMLKAMGQTTMPDIKPILEVNGEHPIVAGLKDIEDEERIADTAAVLFDQALLVEGVKLNDPADFVKRLNRLLAR

SEQ ID NO: 91856 - protein, 378 aa, Unknown
  Obtained from environmental sample
  DOMAIN (9)...(318): Penicillin binding protein transpeptidase domain
  misc_feature (1)..(378): Xaa is any amino acid
MEETKAEAVMFVAMDPRTGDILGSVSLPDSDPNNVRASDANGRMNRPAIWASEPGSTLKVFSMAALLDSGAISDNSVFTCNGFYTTSRGAQIKCEGRHGRVTVREIIINSCNAGAAYASDNISASKFYQLLSDFGFGSRTGVGSPGETAGYLVRSENWSDRSKPTIAFGQEIAVSAYQILQASTAIANDGVLVPPRIVSKIVSADGKKETEWKGAEKRRVISAETAIDMRSYMADTASSIGTGWRAGVQDLSLGVKTGTAQIIDPATKKYSETDFIASCLALLPAENPTLVLYLAVIKPKGVTSGGRIAAPAIREAAESLIDYLGIPRGRNPQITHPPSVNIPAGRLPPIETQVPDFTGIAKRVLLPLLLRDDIQVEI

SEQ ID NO: 91857 - protein, 143 aa, Unknown
  Obtained from environmental sample
  DOMAIN (14)...(143): ArgJ family
  misc_feature (1)..(143): Xaa is any amino acid
MKEVTGGVCAPKGFSAGGIRCGIKASSQKKDLAVIFSQKVCNAAAMFTTNKVKAASVQVSRENIADGKLRAIIANSGNANACTGQEGMEAAKRMAQLAADTLGISANEVAVASTGVIGVLLPIDVIEKNINGIKAAMRSDEQG

SEQ ID NO: 91858 - protein, 118 aa, Unknown
  Obtained from environmental sample
  DOMAIN (1)...(118): Phosphoenolpyruvate-dependent sugar phosphotransferase system, EIIA 2
  misc_feature (1)..(118): Xaa is any amino acid
YSCQAGKIKDKGAALAAVMDREEKMSTGMKHGIAIPHGKCASSEDLVACIGISEKPVDFDSLDKQPCRIFIMTLSPVEKTGPHLQFLAEVSLLFKSAEKRDEIIKAKTPEEVLEILAD

SEQ ID NO: 91859 - protein, 385 aa, Unknown
  Obtained from environmental sample
  misc_feature (1)..(385): Xaa is any amino acid
MYVKENLILDNEGRVLILRGVNLGGDSKIPFCEQGGEIKPDFLNTQNNISFVGRPFPLEDAEDHFKRLKKAGMIFLRLIVTWEAIEHEGPGIYDEAYLAYLRKILLIADKEGISVFIDPHQDVWSRWTGGDGAPAWTLEKLGMNPDNCDVCSAAITRQRYALYHKSKKHPDGKPFPKMIWPSNYNRYATATMFSLFFAGKTYAEDLRIEGENVQDWLQNRYIAAFKHAQRRLKNCAAITGWGSMNEPHFGFIGHQNLENPENCLIPAGPRPSPWQAIRAASGFPVKVPVYKIESLFKKISHYETFNRQGISLFKDGFSCPWKQAGVWREEGGVPRLLRADHFSRYQGRPVDFADDFLKPFIVKYVNKMKEADEHTLFFHEGLPNC

SEQ ID NO: 91860 - protein, 449 aa, Unknown
  Obtained from environmental sample
  DOMAIN (315)...(385): ACT domain
  misc_feature (1)..(449): Xaa is any amino acid
MLVLKFGGSSVGSAKGIERIIGILKDKEYSANVSAVIVSAFSGVTDTLIGLASTAVRGESYKKQIEELSKRHKDCAEHFLKAAELKNAVKVIEENITLLAQTLDGITLLGELSLRSKDLVMSFGERLSANLLASIFTANGIKSSFLDARELVKTNANFGRAEVLKKETEDNIKAYFRKAKKTLQIVTGFIGSTADGYTTTVGRDGSDLSAAVFAAALGAKKLEIWTDVDGMLTADPEQVKNAFLIDEISYNEAMEISHFGARVIFPPSVKPALEKNIPIFVRNTFNPKCGGTKITANAAPGKFPIRGISSINQTALVRIQGTGMVGVAGFSARVFGALARKGISVMLITQSSSEYSICFAVLPEDAQKAETSLKEEFAHEIRNRSLENPIIEKDLSIIAVVGSAMKSTSGISGKFFHALGRNGINIIAIAQGSSETNISAVTPPQTKAR

SEQ ID NO: 91861 - protein, 446 aa, Unknown
  Obtained from environmental sample
  DOMAIN (1)...(48): Regulator of chromosome condensation (RCC1)
  misc_feature (1)..(446): Xaa is any amino acid
GGSLWAWGYNYVGQLGLGDDTDRDAPVRVGYDGDWKSVSAGAYYTLALRADGSLWAWGQNTYGQLGLGDSGSDTNRNAPTRVGNDSEWKSVSAGYGHTLAIRADGSLWAWGDNWNGQLGLGDSGFYTARNTPIRVGYDSDWKSVSAGAGAYHTLALRADGSLWAWGNNTSGQLGIGTSDYDAHPIPVRVGTDTNWAVVSAGVSHTLALKTDGSLWAWGYNGSGWLGLGDTDSRSTPTRVGADANWAAVSAGYGHTLAIRTDGSLWAWGYNWYGQLGLGDSGSGTNRSTPTRVGTDTNWAAVSAGEQHTLAIRTDGSLWAWGYNYEGQLGLSTYDRDAHPTPTRVGTDTNWKAVSAGWDYTLAIRTDGSLHAWGDNYYGQLGLGDTNNRNTPTRVGTDANWAAVSAGGSHSLAIRTDGSLHAWGSNEYGQLGDGTAWRVFPVLVGAP

SEQ ID NO: 91862 - protein, 68 aa, Unknown
  Obtained from environmental sample
  misc_feature (1)..(68): Xaa is any amino acid
MKTDTLIRTEGMDTLIKNLGLVEAERFIMLIQKEPFDYTKWQENLFKDMTIDEIYNNAAEFRQKNKLM

SEQ ID NO: 91863 - protein, 532 aa, Unknown
  Obtained from environmental sample
  DOMAIN (507)...(530): 4Fe-4S binding domain
  misc_feature (1)..(532): Xaa is any amino acid
GREGIIAEHILKGREVKRLLYKDDGNKKQTNAVEDIQFYQKQFRVVLRNCGVIDPEKIDEYIAREGYKGLEKVLFEWTPEQIIAEVKTSGLRGRGGAGFPTWLKWDLARKAQGDVKFVICNADEGDPGAYMDRSTVEGDPHSVIEGMITAGKAIGANQGFVYIRAEYPLAIERLRIALKQAQDYGLLGKNILGSGYDFDIEIRLGAGAFVCGEETALIKSVEGNRGMPVPKPPFPANKGLWQKPTIINNVETFANIPVITAKGGAWLAKLGTEKSKGTKVFALTGKVKNSGLVEVPMGTTLREIIFEIGGGIKNGKKFKGVQTGGPSGGILTEKSLDLPIDFDTLTANGSMMGSGGMIVMDEDDCVVDVARFYMDFCVDESCGKCSPCRIGTTQILRLLDKIANGNGEEADLDKLEEIGVAMTKASLCMLGGSAANPTLSTIKNFRDEYLEHIHDKKCRAGKCKKLLRFSINTDKCIGCGMCAKKCPANCITALDPAKYPGKKKPPYAIDQNACVKCGECMKNCKFSAVSRG

SEQ ID NO: 91864 - protein, 535 aa, Unknown
  Obtained from environmental sample
  DOMAIN (85)...(108): 4Fe-4S binding domain
  misc_feature (1)..(535): Xaa is any amino acid
MVRACTTPVDGGLEGKEIITHDAEIIATRRVVLELILSNHPNDCLQCPRNGNCELQTLAAEFGIRESPYKKVTNGIPVDDSNPAIILNPEKCVRCGRCVKVCQEVQNVWALEFLGRGIKGKIASAADAPLGESPCIKCGQCAAHCPVGAIYERDDTVKVWTALHNPDLHTVVQIAPAVRVALAEEFGLEPGTVFTKKIYAALRRLGFKTVFDTNFSADLTIMEEGSELVKRLGEKGSAIPLITSCCPAWVDYMEKYYADMIPNFSTAKSPQQMMGAMIKAYWAKKAGVAPEKVYSVSVMPCTAKKWETHRNDDMKSAGKFLGLDTGYDVDISITTRELARMIKQAGIDILNLADEEADSPLGPYTGAGTIFGVTGGVMEAAVRSAYYLVTKKELPDVNFTKARGLEGVKEAEVDFGNGTKIRIAIAHQMGNIAAVLDKLRAARKAGQEPPYHFVEVMACRGGCVAGGGQPYGATDEIRSKRAKGIYLDDEKSKYRCSHQNPCITQVYKEFLEEPNGHKAHTLLHTKYTERKLYIR

SEQ ID NO: 91865 - protein, 305 aa, Unknown
  Obtained from environmental sample
  DOMAIN (73)...(300): Binding-protein-dependent transport system inner membrane component
  misc_feature (1)..(305): Xaa is any amino acid
MRAATLSKIESYTFNSFNTVFLILLSFITLYPFWTTIAISFNDAMDTIRGGVTFFPRKPTTFNYKVLFQTDAIPRAFMVSVARTSINLVTSVFFTAMIAYALSRREFVLLKPFTLILVLSMYINAGLIQTFLLFRRLGLFNSFLVYIVPGVVNALNFVVMRTYMRTIPESIIESARIDGYGDFYIFVRIIFPLSLPVLETIGLFVAVGSWNAWFDTMIYNSGNVNLHTLQYKLMEYLQASQSAGKSAGDAGAMALAAGAGGGATMVTPMSIRAAITVIAAAPILMIYPFMQRYFVVGLNVGGVKE

SEQ ID NO: 91866 - protein, 604 aa, Unknown
  Obtained from environmental sample
  DOMAIN (579)...(602): 4Fe-4S binding domain
  misc_feature (1)..(604): Xaa is any amino acid
MAYKNFILTCGGTACESNKGNEIHDQLIAEAEKQGVKSEVQIVKTGCFGFCEMGPIVKVLPDESFYVLVKPEDAKEIIAEHIIKGREVKRLLYKDEGHAKKSDSVEDIQFYQKQFRVVLRNCGFIDPESIDEYIAREGYKGLEKVLFEWNQEQIIAEVKASGLRGRGGAGFPTWLKWDLARKAQGDVKYVICNADEGDPGAYMDRSTVEGDPHSVIEGMITAGKAIGANQGFVYIRAEYPLAIERLKIALKQAQDYGLLGKNILGSGFDFDIEIRLGAGAFVCGEETALIKSVEGNRGMPVPKPPFPANKGLWQKPTIINNVETFANIPVITAKGGAWLAKLGTEKSKGTKVFALTGKVKNSGLVEVPMGTTLREIIFEIGGGIKNGKKFKGVQTGGPSGGILTEKSLDLPIDFDTLTANGSMMGSGGMIVMDEDDCVVDVARFYMDFCVDESCGKCSPCRIGTTQILQLLDKIANGNGEESDLDKLEEIGIAMTKASLCMLGGSAANPTLSTIKNFRDEYLEHIRDKKCRAGKCKKLLRFSIDPAKCIGCGVCAKKCPANCITALDPAKYPNKKKPPYTVDQAACAKCGECLKSCKFGAVSRG

SEQ ID NO: 91867 - protein, 190 aa, Unknown
  Obtained from environmental sample
  misc_feature (1)..(190): Xaa is any amino acid
ALTDFPRDRLQSLDFTRKGRGVIYYTASLRYAIPSELQFPRDEGIGVFMNIYDINTGEEIKGTALNNGKTYRARVRVSSNRDRTYLALRVPVPSGAEILDATFVTTASYQDKGGASGNEKIRSSSWLSHQIIMDNEIQYFWDQFNKGESTVSFLFRSARRGVYPTPPVQAECMYEAEIFGRGAGLLYTIE

SEQ ID NO: 91868 - protein, 399 aa, Unknown
  Obtained from environmental sample
  misc_feature (1)..(399): Xaa is any amino acid
EGSVDWAWGNFCEELSKCESFIETINPGKLLKSFKGLQKLCIPDSTCNENSVPPRRFIIVNPEAGGIYSKMIFTNVLINQLRGDKSRKLSAHEELWKAQSSDLFCSTGQRLRSHSIRNAAYSALLRAEQVTREKGKFAPSLVPFDFNLDGVEEWLFQDAKINCYVQSVGGGIFELDYQPTAWNYLDTCGGRPAFADRLLPKGAGVETAEHDGIKGAARQEAARLSARLCYNERYELVELDKVRRKLSLLLRQAPAVKFGNIEIEKLYQVKKDSIHVSYTITNRGTGPEAFLFAPRIDLALPGEGEPFVRFYACKPDAADAPVSALLRDIDCLKIHDIKNEVQITLSSDKPFDGQIAPVYVSDSDKGEKFYQAYCAMPLFPLTLEVGQSWDVEFALKFSH

SEQ ID NO: 91869 - protein, 139 aa, Unknown
  Obtained from environmental sample
  DOMAIN (61)...(105): Bacterial regulatory helix-turn-helix proteins, AraC family
  misc_feature (1)..(139): Xaa is any amino acid
VDWLDKFNAVIDYIEENLDAEIEYKTLARLACCSEFHFSRMFSSLIGISLSEYIRRRRLTKAAFEIQTGNEKIIDIALKYGYESPDAFTRAFRLLHGITPIAAKENGTKLKAYPRLSFQITIRGDVYVMTVKYQKTWKS

SEQ ID NO: 91870 - protein, 166 aa, Unknown
  Obtained from environmental sample
  DOMAIN (7)...(166): short chain dehydrogenase
  misc_feature (1)..(166): Xaa is any amino acid
MSQQPQKHALVTGATSGIGLAIAEALLGDGCFVYLNYAHDEERAKGVVSRLAPFGNNFGFIRAGLSEYGGTSKIVAALQDGGAPLTYLVLNYGATDRALFNEIAIEEWERVMRANVNVPFFIIQSLYNASLFAPAASILCISSLMASIPHSVSVSYGVSKAAMSAM

SEQ ID NO: 91871 - protein, 312 aa, Unknown
  Obtained from environmental sample
  DOMAIN (38)...(295): Periplasmic binding protein
  misc_feature (1)..(312): Xaa is any amino acid
MNAIRLISHLLISLMLFTSCGKNNSEATASSLSTPLPVTRIVSFAPSVTEILYELGLGGKVCGVTQFCKYPPEAAQKEKIGGQTDRNYEAVVRLKPDLAVILKEQRGMTAFFDRYNIRYIAVGSDSVDEILESIQSIADACSVTVKGKTVVEDLRRRMNMVYTDKTVNNDSVVDNDKSIYKDKGIDSNNPTVLLCVSRDEIGTGAIGKSFVAGANSFYDQLISAAGGVNAMGGVKQEYPAITAEAVIRLAPDVIIELSMSYADKQQERKNCDDWKALKTVPAVKTGRIYCLSGDYLTIPGPRIVLILEDFKN

SEQ ID NO: 91872 - protein, 914 aa, Unknown
  Obtained from environmental sample
  DOMAIN (545)...(873): Bacterial extracellular solute-binding protein
  misc_feature (1)..(914): Xaa is any amino acid
MWRDRVREITNKLKYHKGPVITVAALAVLAIVYFALNGSGPRDFSVKYRGSDLSGISVGRTNTYTRYLERYAQIQPAAADIPIDIFSWKSASGVSRLEIFTAIGPVLRIEEESFIEYTVHVEKPGMYNMYIEYYPLPSRGIAIERSFKINGEVPFLGADRLMFQRVWGDADDVRKDNQGNEIRPAQVEKPRWESAFFRDSLGYTPEPYEFYFDAGDSVIRLDGINEPVALRALCLKAPVPAQDYRQYVQGVDTDNYRNSASGYMLKIQGEDALYRSDPSLYAIYDRSSGATEPPSVAKIKLNMIGGQSWRVAGQWIEWEFYVPENGMYRFTVKGRQNYNRGFVSNRAVLIDGQTPCTELAAVPFTYNNKWKLTTFRDNEGDMLFPLEHGRHSLRLQVAMGGMGEMLSVMEESVFRLNWIYRKILVLTGTEPDIYRDYRVDVVYPEVIEAMERESKILYKLVDDLTAYSGERSAQAAATLTLARQLELLVRRPDKIPRTLVNFKFNISALGDSLLALSQSQLDVDYIVVSAANARIQPERENFLVALSHEIRSFLVSFFVDYNNLGDVYRKGADVVEVWMLAGRDQSTILKGMIDDTFTPKTGIKVNVKLVAPDAVMPAVVAGTGPDAALTVPQADPVNYAVRHAAIDVSKLPGFEELTREFDKSVLIPFRYAGGIFGLPETQYFHVMFYRKDIFAELGIEIPETWDDLIGILPIIQKNNMNVGIPSVATTEQINIDFSNFLAHLYQRNGSLYNEDGSRTMLAGEIAIEAFDVYTKFFTHYKTPIVYNFLNRFRTGEMPLAFADYTNFNTLEVFAPELRGLWGFARMPGLPKADGSIDRSVPTGTLASMIFSNAKKPELAWEFLKWWVSSDTQLRFGRELESVMGAAARYPTANYDAFTRLSWGSDQMAVLREQR

SEQ ID NO: 91873 - protein, 353 aa, Unknown
  Obtained from environmental sample
  misc_feature (1)..(353): Xaa is any amino acid
MYHKARVITVAALAVLVIVYFTVGGSGPKDFSAKYRGADLSGASAGLSGSMPVSGGETAASIGRTNTYTRYMERYAHIQPAVSDIPIDIFSWKSADEVSTLNDFAGERRVIRTEETGFIEYLVHVEKAGMYNVYLEYHPLPSRGIAIERSFKINGETPFLGADRLMFQRVWGDADSVRKDNQGNEIRPAQVEKPRWESSFFSDYLGYTTEPYEFYLGAGDNVIRLEGINEPVAIRAILLKAPVPVQTYEQFAREIDAGKYRNMNPNYMLKVQGEHAKRRSDPSLYAIYDRSSGATDPSSVARIKLNMIGGQNWRVAGQWIEWEFYVPEDGLYRFTVKGRQNYNRGFVSNRHGR

SEQ ID NO: 91874 - protein, 235 aa, Unknown
  Obtained from environmental sample
  DOMAIN (2)...(229): ABC 3 transport family
  misc_feature (1)..(235): Xaa is any amino acid
MIGDGLSHVGFGTLAIAVPLGLSPLKVSIPLVMLAAFLLLRIRESSKMQGDAAIAIISCSSLAIGVIIISLTVGMNTDVCNYMFGSILAIKQGEVYLCVVISAVILFLFIFFYNKIFSVIFDENYAKASGTNIEFYNVLLALLTAVIIVIGMRIMGAMLISSLIIFPALTSMRLLKTFKSVVVCSAFLSVICFFVGMVISFAYNVPTGASIVAVNLISFLVFCLISFFKRKKELL

SEQ ID NO: 91875 - protein, 350 aa, Unknown
  Obtained from environmental sample
  DOMAIN (198)...(319): Anticodon-binding domain
  misc_feature (1)..(350): Xaa is any amino acid
MPQWAGSCWYYLRYLDPRNDKVFAGRDKIDYWAPVDLYVGGVEHAVLHLLYARFWHKVLYDVGVVNSKEPFIRLVNQGMIVSFAYQRKDKTLVPVDQIEKKHDGVFIEKANGEEVTEVIAKMSKSLKNVVNPDEIVRNYGADSLRMYEMFMGPLEVSKPWSTAGLIGVSRFLEKLWAISEKCASSSENAIGAEQRLELTRLLHKTIKKVSSDTATLNFNTAISQMMIYSNELIKLDGVPPSLWKPLVIMLSAYAPHLGEELWEKLGNKGSVSKHPWPAYDESLTVDEEVTVVVQVNGKIRDKFGAAYNTSTEELEKTARALPGIQKWINCKTIAKVIVVPDKLVNIVLKN

SEQ ID NO: 91876 - protein, 108 aa, Unknown
  Obtained from environmental sample
  misc_feature (1)..(108): Xaa is any amino acid
MDRKGICVAGNITVDNLYSVRGLPRPGELTTITGTQRSTGGALCNVIGDLAIMDNNLPLTALGRIGSDSDGDFVLDTLRVHKNIDLSMIRREGKTSFTAVMADEITKE

SEQ ID NO: 91877 - protein, 278 aa, Unknown
  Obtained from environmental sample
  DOMAIN (147)...(238): PEP-utilising enzyme, mobile domain
  misc_feature (1)..(278): Xaa is any amino acid
YGLGEAVVGGMVTPDKLYVFQRDDGGEVVIRQMGCKDKKIVYDERGGTKHVPVPELEAYRWALSLGQAERIARGVRAVSKAYGGCIMDTEFCIDEKDELWFVQARPETRWNEEFEKHPDVIFMRRKEVDAQAAAVAEILVEGNGASRGAGQGKVKFLRSALELNKINKGDILAAERTDPDMVPGMRMASAILADVGGDTSHAAITSRELGIAAIIGIQSLDKLRALDGQEVTVDGTRGRVYRGLLPLHDVGGEMDISALPPTKTKVGLVLADVGQALF

SEQ ID NO: 91878 - protein, 298 aa, Unknown
  Obtained from environmental sample
  DOMAIN (2)...(244): PEP-utilising enzyme, TIM barrel domain
  misc_feature (1)..(298): Xaa is any amino acid
IKSRGFRTGKEHYVQPLAQTLALFAMAFYGKPIIYRTTDFKTNEYRNLLGGVLFEHFEDNPMLGYRGVSRNIHDWEIEAFKLARGVYGGSNLQIMLPFVRTLEEARSMRRYLAQVHRLQSGQDGLKIIQMAEIPSNAILAKEFIREFDGFSIGSNDMTQMVLGTDRDNASLAHIYDEEDPAVVWAILTTIFSGQKYGKKVGFCGQGVSNSVILRGLVAIAGITSASVVPDTYYQTKFDIAAVEAEKIPASGLGDWLIEQHHERLEKLLETKGYGHILKKYVKPEDLNDWYEGELRRSK

SEQ ID NO: 91879 - protein, 502 aa, Unknown
  Obtained from environmental sample
  misc_feature (1)..(502): Xaa is any amino acid
MIDNTQAENVGNGIRFSNLDRKVTSVFVDIDFGNIQTVGMFVEWTDEGSTYRYTKQLYKYLPHENYAILQPLGKVSELTITFGGDLSLIVLKSIVINKPIPFYFSGLRLLVVSLLLFAIILFAYKPLRAKTAYYLFEYTFDPKNKRQNIVYACTVALLILFSWICVYTSVGGGINTSTWSEQYNRFLVDALIEGRTYLNYGNPEKLLNAEHPYSWLAGDERYDWKLDYVWYKGKFYSYFGVVPAVILYVPYKLITGNYLSNHGGIFLFAAISIILLARLWRFFVNKYMPDIRFMLYLLSFLTLFFASGWFCPLRFTRFYSIVAAAGFMFVAAGILLLFESVEREKPVRWKLVLACLCLALAVGCRPNLLFASLLVPVILWRQKLWKYLPLIAAPYIAVAIPMCVYNYVRFGSILDFGFNYNMTNLNAMAYSQVNPIGRVINTVNAILSYLFSMNRYSFFFPYVESIPQHGRFFWPTIKFYDNGYGMINFPIVLCLFFFFKSI

SEQ ID NO: 91880 - protein, 294 aa, Unknown
  Obtained from environmental sample
  DOMAIN (1)...(157): Glycosyl transferase family 2
  misc_feature (1)..(294): Xaa is any amino acid
ERCVEQTRKISDGQNFAIELIVVDDNSTDKSAEKLFEISKKYPELKVFTHEKNRGKGAALRTGFAAATGDYIGIQDADDEYNPMDYLELLKPLLENKADVVYGSRYRKHDTSRVQYFWHTWMNKALTFVSNMFTNLDITDTHTCYKLFKREVIAEVAPTLEEERFGFCPEITCKVAQGGYRLYETAISYNPRNYEAGKKIGWKDGVRALYCLFHYGAHTSPLPMQIILYIFIGAVSLIANVTCFGILNYVGTSLSVSIISALIFAAVVNYILCIMILFRHNSMWNNAGEFLFYC

SEQ ID NO: 91881 - protein, 268 aa, Unknown
  Obtained from environmental sample
  misc_feature (1)..(268): Xaa is any amino acid
MPDYGFFSSPGNAGKTARKVKVLESVKQVRPYLSGFVAKGKAITDPMLRDMIQTQEKLAWNFGRKRRTISMGIYRISLVKWPIIYKGVDPNTVSFTPLQWDCPLTMSEILKQHPKGKEYAFILENEPIHPLLTDSQGFILSYPPIINSNDIGAVQVGDNEIFVELTGSDMHTLNLATSIVACDLADNGFTIEPVEVEYEFETPFGKSMVTPYYFQEPIFCSLSRIEKFLGEKLSADECVSALARMGVKAEKTEDCERGQKTQKTEGVR

SEQ ID NO: 91882 - protein, 265 aa, Unknown
  Obtained from environmental sample
  misc_feature (1)..(265): Xaa is any amino acid
GKPEKGEIRQIRKRGQGLEFESLRDYQEGDSIRLIDWRATSRNRRMDGRLKLIVRNYQEEQDQQILFIIDSGYRLPDHHFDSALEAMLMLSYIALKHGDATAAASFGAHDIWIPPRKGMKAYTGLMNGLYDLHSEPVPSSPFLALENALSRLHRRSFIVLISNFREEDDKSLSWILPHIKKRHLLLLVSFREDEAVKLAFPDKISHNRTDEEVLETAAAFAYLENRRRLYSKWEHSGLLVLETSPKQISADLINKYLRIKKSGKL

SEQ ID NO: 91883 - protein, 352 aa, Unknown
  Obtained from environmental sample
  DOMAIN (171)...(308): HD domain
  misc_feature (1)..(352): Xaa is any amino acid
MESEKKLVILVDDNIANLKIGNNILEEKYIVATSPSAEKMFRLLENNTPALILLDIDMPEMNGYEAIKLLKSKPKTKDIPVIFLTAKTESNDELEGLSLGAIDYITKPFNPALLLKRIEVHLLVEGQRKELQYFNENLQKMVEEKTQSILELQNALLKTMAELVECRDDITGGHIERTQRGIEIMLEKIERSGVYLEETKGWDKNLLLQSCQLHDVGKISISDSILKKPGKLTDEEFNVMKKHASFGEQIIEKIETLSKESDFLNYAKIFAASHHERWDGSGYPRGLKENKIPLLGRIMAIADVYDALTSERPYKKAFSHEEAVRIITEGSGTQFDPALVEVFTGAAEQFRN

SEQ ID NO: 91884 - protein, 68 aa, Unknown
  Obtained from environmental sample
  misc_feature (1)..(68): Xaa is any amino acid
MKTDTLIRNEGMEILAKNLGMVEAERFVMLIQKEPFDYTKWQENLFENMTIEEISKKASDYRKGGATG

SEQ ID NO: 91885 - protein, 72 aa, Unknown
  Obtained from environmental sample
  misc_feature (1)..(72): Xaa is any amino acid
MHGNVFEWCWDWYGDYPSEAQTNPMGASSGTVRVLRGGSWSHSAMYLPSAYRIGYAPHFRNYGFGGFRLVRH

SEQ ID NO: 91886 - protein, 506 aa, Unknown
  Obtained from environmental sample
  DOMAIN (49)...(474): Glycosyl hydrolases family 31
  misc_feature (1)..(506): Xaa is any amino acid
TLDEVDGPAPLEPGILSKSGIAAVDDSQTLALDSDGWAAPRREGKIDLYVFAYGRDYRLCLKDFYRLTGPTPLLPRYALGNWWSRYHRYTEQSYKELIERFENEKIPFSVSVIDMDWHHTNIDPALGSGWTGFSWNRELFPNPEAFLAWLHKKNLRITMNLHPADGIRAHEDAYDRIAKRMGVDTERRKPVEFDAANPDFMQAYFEEVLHPLEEQGVDFWWIDWQQGNTTGIPGLDPLWVLNHFHYLDSARRSKRALTFSRYAGLGSHRYPVGFSGDSIISWASLDFQPYFTATASNAGYGWWSHDIGGHMGGIRDDELAVRWAQFGVFSPINRLHSNSNPFNSKEPWHFNLIARSTMTEFLRLRHRLVPYLYAMNRRARYEGEPLIQPLYYAEPYNDIVYRIPNEYYFGTELLCCPLTTPINRETQTAGFKAWLPAGFWIDFFNGRIYSGGRFLEIWRGLDAMPVLAKAGGIIPLADAEPFTNSVENPSALELHDSPALTEVSRL

SEQ ID NO: 91887 - protein, 59 aa, Unknown
  Obtained from environmental sample
  DOMAIN (7)...(58): Ribosomal L29 protein
  misc_feature (1)..(59): Xaa is any amino acid
MKRKEKLKELNGLNDEQLGEKLKDLSISLLKTRFEMKTGHVDNPCMVREIRKDIARVKP

SEQ ID NO: 91888 - protein, 93 aa, Unknown; identical to SEQ ID NO: 90240
  Obtained from environmental sample
  DOMAIN (3)...(83): Ribosomal protein S19
  misc_feature (1)..(93): Xaa is any amino acid

SEQ ID NO: 91889 - protein, 308 aa, Unknown
  Obtained from environmental sample
  misc_feature (1)..(308): Xaa is any amino acid
MGDVITLRGRNFGAAREGAFVSIAGITPTNSSYYTWQDDLILFKIPESGESGLVYVHVKGKKSNGVLFSNSAAVPRQIEGEDFGMEPKIAVVSPQTGAPGTLVTITGNNFGASRENAGVFFSWDYEPLSVNPYVVTEPEFVEVSETELGYEAWNAHEIRIRLPDGAVSGGLKVKTPNGESRSVFFDVTGKPGYKNFKDKRRYTISYSVDVKINEATRPNTLYLWIPLPVTSASQRNVKLVSRSTTPFVENYKGVSLFKLDNLAIGSNHTINLSFNIEVYAVETGIRPASIKQGKTPLNNAYTQNTNLI

SEQ ID NO: 91890 - protein, 138 aa, Unknown
  Obtained from environmental sample
  DOMAIN (1)...(132): tRNA methyl transferase
  misc_feature (1)..(138): Xaa is any amino acid
ITDTEGNILGRHHGLIRYTLGQRRGTGVARNYPVYVAAKNTAANTLVLGDDSSLYSSGFTARQINLIACENLFQPQNLTVRIRYLQKEQRARVEQTGPDTIRVDFEEPQRAITPGQAAVFYDGDTVVGGGTIEVNTNK

SEQ ID NO: 91891 - protein, 1244 aa, Unknown
  Obtained from environmental sample
  DOMAIN (1079)...(1160): OB-fold nucleic acid binding domain
  misc_feature (1)..(1244): Xaa is any amino acid
DHEKRKNPIKPIIGCEVYVSPFSRLQKTGTESDNKYYHLVLLAKNREGYLNLVKLCSFAYTEGFYYRPRIDDELLEKYHGGLIALSACVSGEIPRLIQAGKMDEAEKKACYYRNLFGKDENGEPDFFLEIQDHGIPAAKLRGSLSQRDINKAVVEIARRKGIPLVATNDVHYLDREDNVAHDILLCIGTGKVRTEEKRKRYYGEQFYFKSGEEMAALFPDSGEAIANTVRIAARCKTDVPNIGVKELPRYLPDFEIPDGFDNADAYIRHLVSEGLARRYANEKAAGGEKWQEIAGRAAYELGIIIQMGFTGYFLIVADFINWARDNDISVGPGRGSGAGSIVAYALHITDIDPLKYGLLFERFLNPERISMPDFDVDFANEGRGDVIKYVTEKYGRDKVGQIITFGKLGAKAVIKDVARALGISIPESEMITKLIPRDTKITLQKAIDGEPKLEELSQDARYTELFALAGKLEGLNRHSSIHASGVVIGRTTLYNLAPLFKDPKTGAISTQYAMGHLEKCGLVKMDLLGLKTLDVIKHTEELIRKRGGEFANFSVEAVDENDEATFRMLGEGSSFGVFQFESDGMQDTLKRAKPDKVEDLIALNALYRPGPMANIPRFINSKNGRQAITYPDPSLENALKETYGVIVYQEQVMQVARIIAGYSMGQADLLRRAMGKKKKEIIDKEKIPFLEGALKQGFSKNRAGEIYDILVPFSDYGFNKSHAAGYAVLAYRTAYLKANFPAEFMAANLTNEIHSADEDKLSECISEARKMGIEVDPPDMNRSFKLFTIADGRIVFGLLGIKGLGDGPADEIVSCRRDGPYKDFMDFLNRVDIKAVGKSVIEKLIQTGSFDNLGRRRETLLGNLEQAVEYVQKIKDGKKFGQVSLFMDTGEKEYLDFKFEEFPEISRADKLKTEKELIGFYFSAHPMDEYQAVWKELVKADLGHPEALVLGNHILVGLIKNVKAITNNKGERMAFATLEDYNGEIELTFFPGAWTQCKEKIENDKVAILKGKIEYQQNRDKRSFTVDEYLEPDDIANAEIANKEDTRQWDRFANIRKHAKDMEINLLDLSRGKAEAGTYIAIGMLKSIRTHVDKKGKEMAFGSLQVQSGEIDVLFFAKTWENCKAKAVVGEILALKGTIEAQRDRYNGKDTLLVTSIQDVNKLVRDADKKETGKKTTQASETKMPCREMHIRLAAGAAENHEMLNFLKSCIEENPGSCPVFIHVPVFALDKESETDKDSRETII

SEQ ID NO: 91892 - protein, 352 aa, Unknown
  Obtained from environmental sample
  DOMAIN (250)...(337): Elongation factor G C-terminus
  misc_feature (1)..(352): Xaa is any amino acid
RRVGKFYTCQGKKLEEVRELYAGDVGIITKSATLKTNDTISAGETGIIFKPLSLPEPVHSVAVNAVSKKDDDKLGEFLVRAADEDKTFRYVFNAETKETVISGMGELQINIILDKIKVNQKIEVETRIPRVAYRETITKKASAEYTHKKQTGGHGQYGKVLLDIGPLGRGEGYKFENKIFGGAVPKNYIPGVEKGIAEGMAHGTMAQYPVVDVEVAIVDGKYHPVDSSELSFKLASRNAFREAMRQANPTLLEPIMSLTVFVEDKYLGDVMSDLSSKRGKILGQDSSGGIAEIRAEVPQAELLSYSIGLRAITSGTGSFGVSLDHYAPIAGRIAEDVIKAAEAFKIQEEEDA

SEQ ID NO: 91893 - protein, 217 aa, Unknown
  Obtained from environmental sample
  DOMAIN (143)...(217): Sigma-54 interaction domain
  misc_feature (1)..(217): Xaa is any amino acid
MKFRLLIAEDEKNIREGLAAALELDGHEVATAADGNEAFKRFQKGDIDLVITDLRMPGLSGEELLEKVIAESPGIPVIILTGHGTIEAAVKTMRAGAWDFLIKPVNLDYLSLLVKQALDNRELVLKHKRLLEELAHHKRFQTIIGTSAVMRKVYDTTSRAAPTKASILITGESGVGKELVADAIHELSPRKDKPLIKVHCAALAASLLESELSATRR

SEQ ID NO: 91894 - protein, 518 aa, Unknown
  Obtained from environmental sample
  DOMAIN (378)...(518): FtsK/SpoIIIE family
  misc_feature (1)..(518): Xaa is any amino acid
LCFSAGIFPFITLAIGFAFIRDFEYRSAQSALLNFTGKTGFSLIIIFITVIEILVLQVFKTKLFRQKADTGKSTNLLPPPKDESTAEPARNVKKDEEEKVLEQLFKEGIGDFGNEYVPVIQQPISADDLNDFDQDDYTPKGSDSEEDFGNIGDYDIGIENAGGKGGNENAEAPSFDLINDPENVPINIPSNNPVSDPIDDIYELNSEIEPPPEIEPLQESSLSESSLQESSLQESDSVERALEEAEAAAALHAEQVQKKNAANGSRKKKYKIPVDILNEYPDGEYWVIDQATRDAAMALKETLEEFKIQAEVTGIRKGPVITLFEILPAPGVKLSKIVGLQDNIALRLAASSVRIVAPIPGKHAVGIEVPNAKRNIVSFREIIEGQLHDDQKMEIPVVMGKDISGEAQTIDLVQMPHLLIAGATGSGKSVCVNSMILSILYQRTPAECRLMLIDPKIVELKLYNDIPHLLTPVITEPKKAFQALQYCIYEMERRYACLDSVGVRDIRSYNKRIKRRTS

SEQ ID NO: 91895 - protein, 210 aa, Unknown
  Obtained from environmental sample
  DOMAIN (4)...(84): B12 binding domain
  misc_feature (1)..(210): Xaa is any amino acid
MSRIDEIAQAVEDGKLKIIQDLVTGALNEGVDALDILNEGMGVAMGRVGEKFQKQEIFVSEMLLAARVMKLGVEVLKPKLAGKANVSRGKCIIGTVYGDLHDIGKNLVALMIESSGFEVIDLGVDVAVDKFISTIKENPDVKVVALSCLLTTTMPAMQETVAAIKSSGLAGFKVIVGGAPVTQAFCDEIGADGYSQDAGGAGQLARELAA

SEQ ID NO: 91896 - protein, 294 aa, Unknown
  Obtained from environmental sample
  DOMAIN (85)...(174): Cyclic nucleotide-binding domain
  misc_feature (1)..(294): Xaa is any amino acid
GLRELDIALSQRTLKNTAAADPSHIIQIGDYYKNSGKLTSALYAYNQYLALRPDAPNTDDIKAIITEIKKTPIGTRLEYPPDKMIQKYPKGHLLFAEGEPGHTMYIIQDGSVKITKIVDNKEIILAVLGKGDIFGEMALLEDKPRAATAEVYEDCTLLAVNRENFTNLIQDQSDMVVRMASLMSERIWLLYRQLDNTFIENPLGRIYDALLIQLEKNRVDINSNGSYQCSFGIWELIGMAGMPESENKHLDRKVAGDGKLTFKDDKIQIDKISDILKESVFYRKAQKIAENRKR

SEQ ID NO: 91897 - protein, 394 aa, Unknown
  Obtained from environmental sample
  DOMAIN (12)...(270): Methyl-accepting chemotaxis protein (MCP) signaling domain
  misc_feature (1)..(394): Xaa is any amino acid
NKLIDEQSISINASSSAVEQMTANIHSVTNTLIENSKNVKELTEASENGKVGVQTVSEKIQEIAKQSEGLLQINSVMENIAAQTNLLSMNAAIEAAHAGEVGKGFAVVAGEIRKLAESSSAQSKSTADMLKKIKASIDGITVSSNDVLSRFNVIDDKVKTVSVHEENIRNAMEEQEVGGKQILESINRLKDISVTVKEGAGEMNKSGDHLNRQTVDFIKISNESMSGMNDIVNGAMKEIKSAVVVVDEMSAENNRNFEDLKKEAAKFKVETGNEKKKIIVVDDEETVLTMTRASLENNYEVTTVKSGKEALNLFFKGYVPNLVLLDLIMPEMGGWETFIKIRDISKLHQTPIAIYTTSDDPKDKAKAQELGAVEYIHKPINKTEMLERVKKLLK

SEQ ID NO: 91898 - protein, 408 aa, Unknown
  Obtained from environmental sample
  DOMAIN (62)...(106): Bacterial regulatory helix-turn-helix proteins, AraC family
  misc_feature (1)..(408): Xaa is any amino acid
MKKTNDVLEGVLDTIENNLKDGINADAIADEFSLSSVHLQRLFKQKFKKSIGTYIRSRKLSASIKDLLYSDLNILSIALEYGFSYEQAYILSFKHEFGFTPGDLRRNKQLVRTTPSLQSYVHDSVYKNDFLVGNIINEKYMDDAYFDVIKSHFNIITPENNLKPASLTSNHGGAYNWSYADQMVNRALENGIPVHGHCMVWHDWTPEWMTKGTRAEVEDNLKIYITDVLMHYHGKIYSWDVVNEVMKDFPSAADVTGDWKKCLRNNSPWYKALGASYIETAFRAVRETDPDITIYYNDYFCYNDLYKIEAVYKMINDINNRYKRETGQNRNLIEGLGIQAHHQVKYFDERKVRLPLEKFASLNIELSISELDVTASGYDEGEGKDIIMSENDAALQAGIYAKGFQNIP

SEQ ID NO: 91899 - protein, 158 aa, Unknown
  Obtained from environmental sample
  DOMAIN (1)...(130): Domain of unknown function (DUF323)
  misc_feature (1)..(158): Xaa is any amino acid
GANGYRLPTEAEWEYACRAGTTTAYNTGEEINHDSKWYAGNSGSKTHEVGRKMPNEWGLYDMHGNVWEWCWDGYNGYADMAADSNGLNGGLCRVGRGGGWYDLAQFVRSACRVGTYPWDAHSNLGFRLVRSEFSPCCMMRLSPNGQNGVYTEVLPKAA

SEQ ID NO: 91900 - protein, 89 aa, Unknown
  Obtained from environmental sample
  DOMAIN (6)...(88): Ribosomal protein S15
  misc_feature (1)..(89): Xaa is any amino acid
MALTNESVASIVTKFGKNEKDTGATEVQIALLTERINQLTGHCKQFKKDKSGQRGLLILVGKRRRLLKYIQHTNLDGYRKLIKELGLRK

SEQ ID NO: 91901 - protein, 225 aa, Unknown
  Obtained from environmental sample
  DOMAIN (52)...(203): FAD synthetase
  misc_feature (1)..(225): Xaa is any amino acid
MGMSMRVINWEEYVKIGTRDWGLGTGDCCPKNDNAPDFNTPNCSLLTAHCSFSLAVTIGVFDGVHLGHQSLIHRICEPPAPDSLLPTVVTFSENPMKSLNPAMFTGDIYSLDQKLRHLESLGVKLTVLIDFFEEICKINGRDFIDLLLGSQPVTLLALGKNFRCGHGQDTGVAEIRSLAKARGVETWVAPVVMDGEKPVSSNRIRQALAARRFEEAQRMLGRPWI

SEQ ID NO: 91902 - protein, 571 aa, Unknown
  Obtained from environmental sample
  DOMAIN (22)...(519): ABC transporter
  misc_feature (1)..(571): Xaa is any amino acid
MLRELRIKNLALIENLTLDFAPGFTVFTGETGAGKSILIGAIGLLLGERASSEMIRSGCEDAEVSGSLDIENPRPKLREFLREAGVDAEDGGLIIRRSISKTGKNRIHVNQIPLPLSTLKALGDLLIDLHGQHDHQSLLNEDTHADIVDALPEVSVAKNRYVSSYNAHTAAAQGLRDALRAAREFADKKDVLEFQHKELSTLNLRRGEEAELEQELSLLSTVAQRSECVSGILALLGSDDAGGAAAVGESIQKKLSQINRKLAALCKHDPSAAPYIDEIESARSICADLDMFCSRYLETTDGAAGNESRIEEINSRLAKIQRLKKKYSCTTDELIDKREQLEKDLSLLNNTDADIELLEKKAAKARKECVDAAAMLTSSRKKALNTFDKEVTRRMELLGFTGGSLATSLSPLSEPAPNGMDAIRFLVRTNPGEPFLPLAKTASGGEASRLMLAVKSILAAHDEIPVLIFDEIDTGIGGVLAGEVAKALYSLSSTHQVLCISHLHQIASVADNHYRVAKRVDGGRTVTEVERLDGEQRTLEIARMLGGAGSEAALKHAEELLKSKSTLILGT

SEQ ID NO: 91903 - protein, 409 aa, Unknown
  Obtained from environmental sample
  DOMAIN (230)...(408): Penicillin binding protein transpeptidase domain
  misc_feature (1)..(409): Xaa is any amino acid
MQILSGEVYLSRAQDISRRTFTIPAQRGEIYDRNYAKQLAMNKDSFAVNITPAEVPKGKMDDIIYAVSGIIGVPTDEITAKLPKQFLQSFQPVEIAANVPFNSIAALAERKNTLPGVSWLSKSVRNYTDSGSLSHILGYVGDITRDELTSLYNMGYQQGDIIGKSGIEKQYDELLRGKEGREIRTVDVRGRRIAGRENVRIHPEVGKNLVLSIDYRLQTLVEEALGPRIGTALVIRPSTGEVLAMVSYPWYDPNIFTDGLSADYKKLAEDPNKPFLNRAIQSSYAPGSTFKIVISTGIYSEKSFPPEQTILCQGVLNFGNRDWLCHVKRPGHGRLNLHNALAQSCNIYYMTAGRDHLGPERIASYAKEYGYGELTEIDLPGEIAGFIPNPQWKERRFHERWVQGDTMNM

SEQ ID NO: 91904 - protein, 538 aa, Unknown
  Obtained from environmental sample
  DOMAIN (9)...(151): GTPase of unknown function
  misc_feature (1)..(538): Xaa is any amino acid
MNNAKNGLLKFIACGSVDDGKSTLIGHILYSSKLLYADQEQALILDSQVGSRSGKIDYSLLLDGLMAEREQGITIDVAYRYFTTEKRSFIVADTPGHEEYTRNMAVGASFADLAIILVDAKQGVLSQTRRHARICSLMGIRYFVFAVNKMDLVAHSKEHFEGIAKEIEKLADELKLGNIIIIPVSATEGDNVTSPSKNMPWYSGPTLLSYLESVNISGSEPEKGFYMPIQRVCRPDHTFRGFQGQIESGKVSLNDTLTALPSGEMVIVKSIYIANVSVESATVGDPVTIQFDREVDASRGCVLMRKAELKIAKEFEATLLWMDDDKLISGNDYWIKIGTKLLPAIVTGIQYKVDINTGEHLLVTSVGKNEIIRCEIVLSEPAVLDEFRLHKTLGELILIDRVSHSTAACGVIETAGKTIENGVLLKDGKNQLAIGLFDSFYYHPEIHTVLRHSPPPTEYKPGDTLPLQGTGYNYPPDFDIPTEADNYANIRNGIFTGFGERNPKFALLNLNGLELDKKPPRDFGKYRKVMLWEKDFEI

SEQ ID NO: 91905 - protein, 69 aa, Unknown
  Obtained from environmental sample
  DOMAIN (3)...(67): ThiS family
  misc_feature (1)..(69): Xaa is any amino acid
MKLTVTGNVKEYADGLTVAKLIELEKVETPLYVTVSINDEFIASGTFEETVLREGDIVEFLYFMGGGQR

SEQ ID NO: 91906 - protein, 273 aa, Unknown
  Obtained from environmental sample
  DOMAIN (29)...(74): S4 domain
  misc_feature (1)..(273): Xaa is any amino acid
VLAFSAAKVRKNKFAWQTIFRTFVFKMELRLNKAISESGICSRREADRYIENGRVTVNGRVADLGTKVTERDKIRVNGHLIKSRARAVYLAFNKPVGITCTTDTNEPDNIIDYINFPERIFNIGRLDKPSEGLIFLTNDGDIVNKILRAGNMHEKEYVVTVDKPITPEFEKRMQRGVPILGTVTKPCKLTRETDTRFRIILTQGLNRQIRRMCEALGYEVLRLKRVRIMNVTLAGLPTGEWRFLTEKEVAEINRMVKNSVGTEEASLQISNSG

SEQ ID NO: 91907 - protein, 107 aa, Unknown
  Obtained from environmental sample
  misc_feature (1)..(107): Xaa is any amino acid
MKYVIIGNSAAGIGAVEGIRQKDSQGEITVITNEPHHTYSRPLISYLLLGKVNEEGMKYRGGSFYKDNNCTLLADTSVTQIDAANKVVLCGGKKIPYDKLLVASGSS

SEQ ID NO: 91908 - protein, 230 aa, Unknown
  Obtained from environmental sample
  DOMAIN (60)...(162): Protein of unknown function DUF58
  misc_feature (1)..(230): Xaa is any amino acid
VFRHEWVQVELKLENRGLLPALMLVLGDAPGNLSVLRLRKIVCSVGRRSWIMMRWQGYCGDRGIFTIGPAMVRGADPLGLFPFQLTAVETSLLYVYPVLCSISIKHPAGIPLGNMISPNPLFEDTSRCRSLRLYIRGDEPRRINWKMSARTGSIMVNEYDATASYPLMIFLNADRNEYPLKKRGIFIERAIEAAAALCLKAVQERQELGIVIYTSSEKDGISVIAPSAFT

SEQ ID NO: 91909 - protein, 62 aa, Unknown
  Obtained from environmental sample
  misc_feature (1)..(62): Xaa is any amino acid
TSMPDWAQKITIFNPLKYLMQVMRMVYLKGSAFSEMIPQFLALSAFAVVLNVWAIVCYKKSS

SEQ ID NO: 91910 - protein, 712 aa, Unknown
  Obtained from environmental sample
  misc_feature (1)..(712): Xaa is any amino acid
ELTVDKSDDLYVRAGGNYYFSYGNTLYICLNSNVKGVEPHRDFMKEAVASHPDAVWKIALFHHDIYGTGDHAGTAFQDAQKMQPDWSPFLDEFGIDLAINGHDHVYGRSMFMKGNKIQSAQMSANLDPLGTNIVKSNPGVYVLPQGILYMALSGSATEKMYAPEAQEWVAYTHGLIGVPEYSVITIDGDTLTFVCYRSDTDAVTDSITLRKTATRADLEKLIPDCEAVKQTVNITGGWYVFQNAIAAAKTALSGSPANINAAYVALYNAYYAITVNTDKAALKSLIDDVKNTLASTVEGMWEGQYPVGSKAALKAVLDKESLTYIDRLATQVEADTAEAILSVAFSAFKGSVSKIPIPWVDVHNISAAGVNQVELVGWKKGDVYYAYLTKQEFAKNNLGGKRSDPADGPANGLGGRGPSESYITRTHIGEWIRYDLNVERAGTYKAALGAINNSGKAQTILLRDADYNILCTFVVPANAVLPASGWKDAPMVSADKEFYLPAGNYFVELYFINDGVGVNVPSGSNVAFPNDAGNRLYPDGADVDILTLERVGDGTPPVIQKDPSIYVLPLPPNSIQGAPARQKGWASEGYVDDQGNVATGISLETFMAATTLVLEVASKPAATNIQMHLIPEGDGTTWAAHEATSANTPALVIDTLYRDGKLVFPLNEMLGYEAWSNSQIMCMIDVSYYNYCWDELNVMKAYLILDLSKLNK

SEQ ID NO: 91911 - protein, 173 aa, Unknown
  Obtained from environmental sample
  misc_feature (1)..(173): Xaa is any amino acid
MQEQKPLLPVINSPKDIKTLNYAGLNRLAAEIRDLIVSTVSQNGGHLASNLGVVELTIALHRVYDSPADKIIWDVGHQCYAHKLLTGRYAYFSSLRKSGGIAGFPKVSESPHDAFNTGHASTSISAALGMLAAEKLLGKPTRAAAVIGDGALSGGLAYEALSHAGQLALPLVV

SEQ ID NO: 91912 - protein, 269 aa, Unknown
  Obtained from environmental sample
  DOMAIN (206)...(268): Peptidyl-tRNA hydrolase domain
  misc_feature (1)..(269): Xaa is any amino acid
MNERLASLLKKYDELTLLIQDPSLVKDQNRYRDVMKEHSHLSEIAELHNSIEGLEKQINDTKALIQEEKDQEMKELAREELKELENKYNTDNEKLKFLLVPKDPMDEKNIIMEIRAGTGGEEAALFAADLYRMYSRFAETKGWKLEIMNSNDTELGGTKEIVFSISGNNVYENLRYESGVHRVQRVPATEASGRIHTSAVTVAVLPEADETEIDIKQEDLRIDVMRAGGPGGQCVNTTDSAVRITHIPTGVTVHCQDEKSQIKTKPKLC

SEQ ID NO: 91913 - protein, 338 aa, Unknown
  Obtained from environmental sample
  DOMAIN (202)...(300): 5'-3' exonuclease, C-terminal SAM fold
  misc_feature (1)..(338): Xaa is any amino acid
MLNTKPPLYLIDAYALIYRSYFAFMTHPLRNSTGKNVSALFGFARTLISLLNDGAPLAETENQLNGSKEAPRLLAAVFDSRTATFRHKMYSEYKATRQKAPDDLHAQVPLVEEFLSALNISSLRADGYEADDIIAALAQKCRAEKRQCYIISSDKDLLQLVGEGTYALRPAKTAKGESPGGQNSGPVWELIGPNEVKSEWGVVPEKILDLLSLTGDSSDNVPGVKGIGEKTAVELMSRYGSLDEIYKNIAGIEGARGRKLAEGKESAYFSQSLIRLDTGVPLPVSDIEQLSAENLNRLAAARVLFREGLRQSAKQLDPDVGAHNAPDSAPVQDSAPTG

SEQ ID NO: 91914 - protein, 288 aa, Unknown
  Obtained from environmental sample
  DOMAIN (41)...(109): PEGA domain
  misc_feature (1)..(288): Xaa is any amino acid
RVRLKPILGIRPGIYLAILYGLVILIILFFFLLFPGLTNPGTILSVKSDPSGAAVRIDGTYMDAAPCDIFVTRGRHRVEVALPGFTEWAEERDFGGAIFGSVFFPRKSNLRVELQSPNPQEAFVEEAAEFAAWTFGGESGVTFHIPPVLSEGVYRLGPKARDPVTRSGMEETLGAAARFANTRSSLRDLLRAKFLLDNLGSGGSPITLLDSLQDILDFLEDNPGTAQWLAETFQGDAASTLRSSSWYQKNGINNEEAWAGLGNEIETFGRLRFREIIAPESAIQSFYI

SEQ ID NO: 91915 - protein, 84 aa, Unknown
  Obtained from environmental sample
  DOMAIN (1)...(71): Preprotein translocase subunit
  misc_feature (1)..(84): Xaa is any amino acid
MFVVMYIFFILPKQKEGKKTEQMRSSLKKGDKVLTMAGIIGVVAHVDERLVSIKTGDTKIDFEKTAIVKLLEADSEKKHEADSK

SEQ ID NO: 91916 - protein, 248 aa, Unknown
  Obtained from environmental sample
  DOMAIN (3)...(246): Asparaginase
  misc_feature (1)..(248): Xaa is any amino acid
MKNILFIATGGTIASLQTEHGLAPGISPNRIIEAVPALQKFCHVDAITILNLDSTNLQPEHWLKMALCIQSNYEKYDAFVIAHGTDTMAYTAAALSYLIQKPDKPIVLTGSQKPVGTDITDAPKNLIDSFYFCTNCGHGGVFIVFDGKVIVGTRARKVKTHSYDAFDSINFPVFALTGDHRIVEYIATQPLTGQLKFFSELNPKVFLLKLVPGLEPDILEYAGHYYDAIIIESYGSGGLPFNEERNLP

SEQ ID NO: 91917 - protein, 483 aa, Unknown
  Obtained from environmental sample
  misc_feature (1)..(483): Xaa is any amino acid
GSVFYIGPYKNLLVISNNSSLYESVISGTVDRYGSSAKKFKTKDYDIAFLISPQALANILGNADGQLKSAVNLLQFPGPVEAALSILPNELRLRLASPIESGNQALQTLIERNSQGAPLVAMIPDNTQYMTLLAAGGLKELLNAVSTISAGVPSGPDWESTLRRADSGVRIAVGMNLEELLYSWSGPQFAVYGLEGRPSPIIAIEIRDEKKRKEVFDKAFKSIFLNENINLTLDGSRIPRIEMPAYLSSLLALMKVNTPSPYYTMHGNYLFICESAETLVEAINAVRRNEVLPKQELWRALSEDNSGPSSFSLYYSLDHSLPFFLKGTGIVQAILKSYSQGLARLGFENKLLNVSLFTISGTGKGLVPVSGYPLDLSRSNERTGKSLYAVSSGKDSRLLLTRGNTVLAVNPVSPNESGIKEFFFSGSASSGVFVVPAEAGNYVEGVAWIANSQGSVSLVNKDMENLRGFPVSTGIKLSASPIS

SEQ ID NO: 91918 - protein, 475 aa, Unknown
  Obtained from environmental sample
  DOMAIN (304)...(387): Hpt domain
  misc_feature (1)..(475): Xaa is any amino acid
LWRRFKAQTGFTNIYENAVKYTEWGYIELKLTSSGFKLIFEVSDTGMGIRKEDIPKLFDSFERFEMKKNRSIEGTGLGLPICKSIVEMMGGMILVDSEYGKGSVFTIIIPAISGNKPEVKSVKALKKERTLFAPNANILIVDDDEINLRVAVGLLELFKISAKTAYSGKEAISMVQKNDFDIVFMDHMMPEMDGVEATGEIRKLGAQYEKLPIIALTANAVQEVKEMFLSSGFSGFIPKPIDMREMYRTLKEWLPADKIELKKEEVPEKEQEASEFIYSMKKINEINTDIGLERVSNMEDMYKDTLELFYKKLTAQCDAMTEKLNAKDVNGFAISIHAMKSQLATVGAMGLSDLALRMETAAKSGDLQLCEQRYPSFKEKMLILHDDLSVVFSDTTTKETSKKKGDPASLKINIDKAFEAANDFDKDTGVNALSDFLNYDFGEQNNADLKNVIAAFEDFNFDSVKEILNRLKSKI

SEQ ID NO: 91919 - protein, 247 aa, Unknown
  Obtained from environmental sample
  misc_feature (1)..(247): Xaa is any amino acid
MAVLLICMSIFFFINYRLFSLLEREDWPALAYYLEQKIYVKGKYSDRYVRLLASSYMVISDFSAVLKLENKVLTAKPSLISKNVLIFGAAKVLNNDHHEAVLFFKNYLGKCGKNDKQWVHWFYGFSQLLNGNFRQAEPEFSSLSVTSDSILITGLSAYFLQNTIEKHSSDSKKCHEAAENGRERVKNALNDIENWQKEKEKMRAEIHIAIINKYINEAGKWIFNKDSANPPLYADLPVTNDNSGKHK

SEQ ID NO: 91920 - protein, 54 aa, Unknown
  Obtained from environmental sample
  misc_feature (1)..(54): Xaa is any amino acid
FGEEKDFHTLRGLILYIAGELPRVGDSFNYQGYKFKVVDKDGNRIDKILITKLA

SEQ ID NO: 91921 - protein, 382 aa, Unknown
  Obtained from environmental sample
  DOMAIN (2)...(176): Type III restriction enzyme, res subunit
  misc_feature (1)..(382): Xaa is any amino acid
DIKTATDIQCKVIPRLSVGESVFFTSATGTGKTFAYLLPLLTNLLVNEKPAFGPRILILAPTLELSSQISSELDFLLDGLPIRSFLAIGSISLDRQIENFKKTKPDIVVGNPNRLLLLAQKKILKLNNLSSLVFDEADRLVSGEMIDDTTELCSLIRKFAKTDSILLAACSATINKKCVEKVQTVFFGDGESRGVSFIESEDNEILRDKIEHWAIFSEKRRKDQTLRSLLAAIKTKKSHVKALVFISKGDEAALVLSRLQYHHVPAAGLFGKIGNKPLSGAERKESLDLFRSGSVDVLVSTDLAARGLDIPDITHVIALDVPADSEVYIHRCGRTGRAGKRGIMVTIGDETQMRLLSSLEKKLKIRVNPKELYMGKVCVPQI

SEQ ID NO: 91922 - protein, 301 aa, Unknown
  Obtained from environmental sample
  DOMAIN (1)...(301): pfkB family carbohydrate kinase
  misc_feature (1)..(301): Xaa is any amino acid
MKQTLVLGSTVVDVLLSIPAVPRRGDDVNITAREYRIGGCAYNVFKTLRLFKSPALLCSPVGQGVFGDIVKKHFEKEGIEAFASIIEEENGCCYCLVEPDGERSFLSLHGAEYRFYRSWMKDIDYSHTGSVFICGLEVEESTGNEIIDFVYEHPELELFFAPGPRIRLIPKKKMERLLNRRDSSNNGPVVHLNQTEAFRFTGKRTLEEAANFITGKTGNSLVITLGEHGCYCLDKNWQEGRYVQAFQAKVIDTVGAGDAHCGAIIACLKEGMSLEEACLKANKISAAVVEIKGAVLPALIQ

SEQ ID NO: 91923 - protein, 61 aa, Unknown
  Obtained from environmental sample
  misc_feature (1)..(61): Xaa is any amino acid
MHIGSYDDEPKTIEMIDDFIQENNLKNDINEKRKHHEIYLSDPRKTEKSKLRTVIRIPVKK

SEQ ID NO: 91924 - protein, 364 aa, Unknown
  Obtained from environmental sample
  DOMAIN (293)...(316): 4Fe-4S binding domain
  misc_feature (1)..(364): Xaa is any amino acid
MTEVIINAKVVKKNLNLRKAQKQEKKKNGKGYWKPLKNYLGKVVSLSSNDLVGKESGIQNFITDFSRENLLDSLESINITGMSGNGFPLYKKMASFLSSKSGEKILLINAVECDPALLHDEWLLKNRYNEILQTINYLTKIISLDKVVLATKNKFIKSNDEILIKVVPPRYPMGEEHFLIRQALSIPLKNNEIPAEHGILTLNIQSIYQIGKILNKCYDNGRFITIADLTKASARIAYVYPNDNILEFLMRAFGKMDNKYFYRGYGVMECTEAKEADAFSNHENFAAYADKLGLDDKNKCKRCGSCTRRCPVKIKVSKIIQSIDNNKVMNYNIYDPKRCIKCGSCTFFCPAYKNVSGYIRNLNN

SEQ ID NO: 91925 - protein, 477 aa, Unknown
  Obtained from environmental sample
  DOMAIN (8)...(440): Major Facilitator Superfamily
  misc_feature (1)..(477): Xaa is any amino acid
ALFIACAAAIGGFLFGFDTSVINGTLDALRFKLGANDAQLGLAASIAVLGAAGGAFFAGALADKFGRRRVMITSSILFLISAIGSGNPYFFTTAGTAGNMIEFIVWRVIGGVGVGAASIIVPAYIAEIAPAPLRGRLATMQQFAIVIGIFSALLSNYFLGEIAGGGAVVMDHTTRLASDVTRIGSFETWQWMFWVECIPAALYGLLVLFIPESPRYLVARKQPKKAGEILGKILSPSVVAQKIEDIKKSLHSEVAPKFSDLLEKVAGKTRLAPIVWVGIGIAALQQFVGINVIFYYGNVLWESVGFTQQDAMKTSVLSSVVNIASTIIAIALVDRLGRKPLLLAGSVGMFVTLGIMAAIFGTAGLDSHGNPEIKGAVAYIAVISANFYVVFFAFSWGPVCWVLLGEMFNNRIRGAALALGGLSQWISNFAISSSFPILLAKIGLGGAYGIYCFFAFVSIFFVLKKVQETKGKELEDM

SEQ ID NO: 91926 - protein, 120 aa, Unknown
  Obtained from environmental sample
  DOMAIN (4)...(120): N-(5'phosphoribosyl)anthranilate (PRA) isomerase
  misc_feature (1)..(120): Xaa is any amino acid
VPKIKICGLFREQDIEFANEAKPDFVGFVFAKSHRQINSEMAALFKKRLNTQITTVGVFVNAEIPSITKLYNSGIINIAQLHGSESEDYINTLKETCDVPVIKAGEHRKCKTCKCRLPAF

SEQ ID NO: 91927 - protein, 272 aa, Unknown
  Obtained from environmental sample
  DOMAIN (1)...(231): EAL domain
  misc_feature (1)..(272): Xaa is any amino acid
MNIPPEKVIAYFQPILSADSKTVYSYEILGRYIDEDGDVHSLGPFFNDLNTTNEEVLQVDRLVRRYALKKYAEEKRTEYLFINIRLAWLIQYTDKPDLMLTLKWAEEFGISLKKLVIEITEEEFNASDAYIRAILHYKAVGCRIALDDYGKSASDIERLAEIKPDIIKINMDYIHSSENSYHYREYLRSVADFAESVGIEVLYEGIETQEQLDICMALKGRFYQGFLIARPHPSMNDAVVNESVFSESIENLYVVLQNRITKTEAIRKSLDA

SEQ ID NO: 91928 - protein, 117 aa, Unknown
  Obtained from environmental sample
  misc_feature (1)..(117): Xaa is any amino acid
MVNILEGAYAEKHKRRGRHAKLPITDQLFMSLKYWRQYVTQKELAYEFEVGEATAHDVIVWVEDTLIKSGKFSLPGKKALLEDNEIEIVLVDVTESPVERPKKNSATGTRVKRNATS

SEQ ID NO: 91929 - protein, 116 aa, Unknown
  Obtained from environmental sample
  misc_feature (1)..(116): Xaa is any amino acid
MLSMIRESSQNALERFFKKIEKNISMTQQAFSLARQKIKWEAFRVLFVLTVNSHYKEYADEIRRWNGMRIYAIDGSKLSLPNDKPLRDYFGTDGAGNTSPTAQGSLLYDILDLLGN

SEQ ID NO: 91930 - protein, 764 aa, Unknown
  Obtained from environmental sample
  DOMAIN (699)...(756): Bacterial regulatory proteins, luxR family
  misc_feature (1)..(764): Xaa is any amino acid
RRVGSRSRVSSVRPLFRGILTALSAAIPDDFDDAPRETMIAVLQKLREWPDVLVIDDFHLISDSAAAAALPVVRSRMPESASFLVLSRNPPPDGLREHVIKGAVRLIDDLRFSGEEISALFGKNGTVLSKSEAERLRAETDGWAAALTAIIMANGKEGYTGIIKTESLNQYIKTYVFEYWERFDDLKKCSVCDALNPSLCEAVTGAADIWVVITALANKTGLVSRYGNNTYKFHALLKEALESELNADEKIDKPSLYKAAARWYMENGDWLHTLDMAAKSGDNDAVEEIARTASEIRDSFGVDAAQYIRLVEKTFLSIPSHIIAQYPRLSMHCALVSLLSRPLSDACVWEDILEKQMEEGLTKGSDLIAATLQTTLDPRYSSRRVAEQFKRLRLSGPVQAAGRTTVVPISLNFPFFHKGPRDFTDISRELPEYLSEVRRHVEPILGPLVKVMAALIESGLRYERGEVSKAEPIAEALAGSVDNLSPELRFCAMVLRAEILRVQGKDAEPEAIGDMIKDTGAHYLSANYLAFMTNIGLGNGDENAAVKWLEGQSPIRSLQLYKVYQHFTTAKAMMVTGKLSAAEKLLDRLVNFSSDYRRSADHIEALALRAVCLWRLKRTKESVAVFTDAILKAREFELIMPIIKNGGAVLPVLQKMLNRLKYGYDEDKLDKAFVNSLLMRSREISKHTPGMFSRAKSRPIKLSPRQSEVIGYLVQNLSYREIGGKMGITVAAVDYHIRVLHEKFDALNTRELLEKAGELGFVEI

SEQ ID NO: 91931 - protein, 492 aa, Unknown
  Obtained from environmental sample
  misc_feature (1)..(492): Xaa is any amino acid
LGAIEALLENNVRVPEDVAVTGFDDIEESALTTPPLTTVRQPLYEIGRTAVELLITKMKGEEVPRRTALQTPLSIRQSCGCFINPNHTLDRHTFSIIQRLSSNTDHLKEHLTSELFSFVAMEMGASIDDDDLREIASSFFDEVEGTRTGVFLSALNRMVRAATLAAAESDDILQWQKILVTIRKFTQGLDAVKKETADNLLHDSYNLFSEAAARQQAHKRLQAEQNAALMRSVGHSIANSFDIPTLSQAIVKMFPKLEINDFSLSLYDKSTKEFLNSKPIIALKRGKKDVPTQDMFFPTKDLVLGGLKYSEQPYHVIVQPLHFKNEQLGMAVFRDGPLTGYIYDILGEHLSGALQGALLMKKIQEQSLDLEEKNKELEVLRQKEHLRLEAIQRELQIGRTIQESFLPESMPQPEGWESRALFMPAREVSGDFYDAFALEDGRIAFVIADVSGKDVGAALFMSLIRSLIRAFSEHSVEGAGTRSRRGTGQRYI

SEQ ID NO: 91932 - protein, 258 aa, Unknown
  Obtained from environmental sample
  DOMAIN (18)...(258): Homocysteine S-methyltransferase
  misc_feature (1)..(258): Xaa is any amino acid
MKISDSYTALLSLAKERILLLDGGMGTMIQRFNLTEKDFWQHKGNNDILVLSRPDVIESVHTEYLKAGADIIETCTFNSNAISQADYGLEGECYKLSKAGAEVARRAIDAFGGTSRKFVAGSIGPTSKAAGMASKVDDPASRGITFRELANAYQTQIKGLLDGGADILLIETVFDTLNCKAALYAASLEQEERGVRVPVMVSGTISDASGRLLAGQTLEAFWNSVSGYDLFSVGLNCALGAEEWARILPSFQELQMFL

SEQ ID NO: 91933 - protein, 126 aa, Unknown
  Obtained from environmental sample
  misc_feature (1)..(126): Xaa is any amino acid
IALFDKDDFYHKSIKRFISVNNLKFITTIAVITETSHMLDFNVQTQIDFLKWINDKGIIIYEIQQKDIRRIIELSVKYSDIPMDFADATLIIVAEQTGIRKIISIDSDFEIYRLPSKERIENIFNF

SEQ ID NO: 91934 - protein, 346 aa, Unknown
  Obtained from environmental sample
  DOMAIN (12)...(102): Phage integrase, N-terminal SAM-like domain
  misc_feature (1)..(346): Xaa is any amino acid
MKKNEMRFYRLLRDFLADYLVTKRNFSGKTAKAYRQTMSLLRNYFRGEKSVNFDQMNFSRFSRGNIYDFLVWLRDTRNNSVQTLNVRLAAIKSFLKYCSEEDIELTAVYLEAAGIHAFKGTKKPYAEYLNPEQLKLVFSSADITTKHGRRDRFFMIFAYETGARIQELLDLQLSGIIRNESGIRIRIHGKGNKIRYVPLLGTTVKHLEAYLSEFHKKDTPDACLFFTIHNSKKTQMKPGAADYFLKKYAKLANGIDGSFPKNLHAHMFRHSIAMAMYKKGIPISYIRDFLGHNSIETTTIYSYSDDETIKKALEAIADKDSNDTSIVRKKNWKGSEQSLLEYCGLG

SEQ ID NO: 91935 - protein, 894 aa, Unknown
  Obtained from environmental sample
  DOMAIN (20)...(435): Alpha amylase, catalytic domain
  misc_feature (1)..(894): Xaa is any amino acid
MPNTVLIAKSTLVWLFQISQKYGREVTRLDQIPDEELDELARRGFTGLWLIGLWERSKASRTIKQWMGNPEAAASAYSLYDYDIAGELGGWGALANLRDRCMQRGIRLGSDMVPNHTGIDSRWMVEHPDRFLQLPYPPFPTYNYNCGNLSGRDDITVQIEEHYFNHSDAAVVLKRIDNNTGHTRYIYHGNDGTSMPWNDTAQIDFLNPEAREAVIRTIIGVCQQFSIVRFDAAMTLAKRHIQRLWFPVPGTGGAIASRAEHSISNDEFNRRIPNEFWREVVDRCAAEAPHTLLLAEAFWMMEGYFVRTLGMHRVYNSAFMNMLKNEDNAKYRATIKNTMEFDPEILKRFVNFMNNPDEETAVAQFGKGDKYFGICTLLVTMPGLPMFGHGQIEGFEEKYGMEYRRAYRDEKADGYLVDRHEREIFPLMKRRALFSGSSEFRLYDVYTEGGSVNENVFAYSNRAWIYGHEERALIFYNNSYYETAGWIKMSDPAIPHGNGKQRDSLHQALALHNGDNWFTLFRDQRSNLWYIRSSKAISENGFFVALKGYEAQVFLDIYEIEDDAKGRWARLHHDLQGRGVSNPQSAIMDIYLGDLYYRFTKLLKQELVSQLHGFFVSGTGGKQKAQAFVESLKETAEKYFETVAHFINGADGKYEAWEGNREQGLGTGDSKKSVKRQAVSDKKEQKTEPWEEFKGYVERLVGLSGYLNASGKTPAERLLKELALRIKERQLVCAAALGYGLLSVLRSVIGKADGSLAANLAFEHWDLDRKLKEHFRVFGANEDEVWRLGEICKAVLRRTGADNPSAISDIVVNKKSAAFSAESFAASLFIDNHPREDFRCLIGVNVFNDVTWFNKEAFESALFYGKLFFVLEGDSAYPHPCSDRTARIADVTRP

SEQ ID NO: 91936 - protein, 348 aa, Unknown
  Obtained from environmental sample
  DOMAIN (8)...(347): Nitrogenase component 1 type Oxidoreductase
  misc_feature (1)..(348): Xaa is any amino acid
MSHYIERPRFFCSLGGALSTLEALPETIPILHCAVGCAGSIAWAQNGGSALQVGGYCGGLSVPSSNVCEQDIVFGGTDRLQEQIESTIELMEGRLYVVITGCVTEIIGDDIRSVTSEFSDRVDIVAANTGGFKGNSYLGYDIVLSEIVKRYVKKGAEKKKKSVNILGIVPYMDCFWRGNLIGVRRLLEKIGVQVNTFFTDEDTLDGVKNSSSAELNIVLSDVYGLETAKTYEETHNIPYITATLPVGPTASAELLRAVAKALKLDVDVEAIIEAESRRYYKYITPLVDVYNDVDLQKYSVIVGDVNYAVALTRFLTDDLGWSPVLVQFTDPLNDEQQAQISAKLKGNG

SEQ ID NO: 91937 - protein, 292 aa, Unknown
  Obtained from environmental sample
  misc_feature (1)..(292): Xaa is any amino acid
MDYLTQKAPPKREDRLKACIVYGGDLCNLADKGRKCGCLSDGKRKFEQGSICLLLPGISILNSIPDNVNIVHGAIGCGACSHSQNANARSGGMARKGTVKDAVWLSTALNESDVISGAENKLYDAILEADKLYRPKTITIIASCVPSIIGDDVDGVVERAKKETAAKLVTVHCEGFKTKIWATAYDAVYHGIARSLFEDPKLEEPFIKDGLYHERIAYNRAHTVNLFNVSSMGYADEQELTRYLNALEQKVNTFPSFADPDNIFALKYAGLSVSVCPTHDDYILKYLEEEYH

SEQ ID NO: 91938 - protein, 43 aa, Unknown
  Obtained from environmental sample
  misc_feature (1)..(43): Xaa is any amino acid
MANTNKQLRVVLRNCGVIDPESIDEYIARDGYLGLEKFSLTGH

SEQ ID NO: 91939 - protein, 889 aa, Unknown
  Obtained from environmental sample
  DOMAIN (381)...(757): SNF2 family N-terminal domain
  misc_feature (1)..(889): Xaa is any amino acid
SDEELQRMKNKTLTHGAVKVSENSVYILSKYNSWTLASKDAGLAGKLTDVKTISNTIHAIQDGMKAEKDTAVIKPLQEQCIIELHKYQEKNGVLPADDADIKRFTRDNPAVQGIYETFLKTDDPLLTQNNVYRKEVEILDGHNTAISALLLLREKMKDATEKNIRAFFPDASETLIAQMQKHEDVFIAKEGCYQLREDFISGDAWKKIDELKAAAEKENTAWKKEKLLYGAGELEKAVGWTPIEDADFSPRSSWVHQEIVREWASNKEALGNSRLDTLSKNDEGKWGVTVYKEWQEHADPLIYYLNGQKQRSKYYDTEAYNKEHDDLFRSFIANHENYRVQLESEYNRKFKTHIVAPVKTYPVEIVGWKDKSKGGKDVKPHQWQSIHHLYRNQRGISALGTGFGKTVTAISLMSLLRQEDKAHRIFLQVPNNKIKDWVEEIHDVMPSIKIASIDPEEPGYSSRDKRYAKYQSMARSDADIILMPESSASEIQLSAENNARITDRVSYLYKMEKSDSTPRQQEMAALKGEYKADSGKTNVTVCFEDFGCDAIFVDEAHRYKNLFSSSLSRETGMNDGRQSAKAMSLYKKCEYIREQNDNKNVYLLTATPLTNSPLEYYNMMQYVAPEELRRMGILTIDGFIREFANIEQGWLYDWGSGQAKQGNILTGFKNLSTLQNLFFAYTDLQNNPEAIGLEKPSAENHPHIIAADKKQTTAVRAISVELDRYKSLQAAERQIEFPGQNFLTFYSQMRTASLDLELYNPVKYKNWNNPKLEALANNAFTNYKETKGLDFLMVRVSPRRAASRGSPSPRLQTQAPSFRLRPQTGHNPAQSNRHRGWTGRESENSSHNSAARLISGPFSPRRMTFSSASASVSASEGSRIGTGSNVSKD

SEQ ID NO: 91940 - protein, 193 aa, Unknown
  Obtained from environmental sample
  misc_feature (1)..(193): Xaa is any amino acid
MKNAKLILLAASFAFAASLTISCSSDSEESGSGGGGSSGGGGSGNGGGGGGYNTTYTLDVDASPYGAGTVTRNPAQAAYDPGARVTVTATPASGYVFSNWSGASNSTSNPVTITMNDDETLTAVFTQTANAVIITLTYWETKETDGLLGTDKALDPRIYFKVIAKNGNSTVSSNNTSDLLNADNVGQTWSLVP

SEQ ID NO: 91941 - protein, 568 aa, Unknown
  Obtained from environmental sample
  DOMAIN (222)...(331): PAS fold
  misc_feature (1)..(568): Xaa is any amino acid
MKSILKRSFVFVAVAVLIVSAYFIAGVLIFANNQYYEINTENMKEAARALINFTSPEIFTDKYVAAEWASLANISGSYRITFISRNGQIIFDTEADSAAMENHLDRIEFQDAINEGIGTARRRSATLGQYYLYAAVAIQDSSGRFAGVLRLSRLIPGFFPRLLSTTFPFLVLGFLIIFVTCIALYYFSRRQSLSIEEKLNSDLNKKTIELNIKAEEAETESRHREVILNSMFDGVITLDSNLSIIFANLKLCSLFGFDKGKNIRGVSLLEFSRSAELEEVAQMVLSTGKPHEFTLKRYISGNQQCFQVFAAPMDMGLPQKPPGIVMVLGDISRLVKLEQVRKDFAANVSHELRTPIHVIQGFAENILDSSLDDRKQIYHFAEIIKKNAVSMDNITRDLLTLVTLESGDAERPPLEDVVLDSVIGEALDLVSVAAKNKNITIDVSCPPNFNVQLYSSLFIQALFNLLDNSIKYSGNGSSIKVHAFQEKDQIVIEVKDNGIGIASEHLERIFERFYRVDRSRSREAGGTGLGLSIVRHIALLHGGTVEAESHAGEGSVFRLRLPEYHNSV

SEQ ID NO: 91942 - protein, 277 aa, Unknown
  Obtained from environmental sample
  DOMAIN (134)...(246): Pyridoxal-dependent decarboxylase, C-terminal sheet domain
  misc_feature (1)..(277): Xaa is any amino acid
GNAIIGKPEEAKYGLTREQLINGYWVLKEKGVKRFALHTMVASNELSAPYHVETARMLFELAVEINKKAEVRLEFINLGGGVGIPYKPEQTAVDYQSLTAVIQKAYDEIIKPAGLDPINIRTEWGRVVTGPYGWLVARAIHKKEIYRKYIGLDACMADLMRPALYGAYHHITIPGKENEALTEVYDVVGSLCENNDKFAVQRSLPKIEVASENGIGDFVVIHDAGAHGRAMGFNYNGKLRCGELLLRQDGSIVQIRRPETTDDYFATLDLAGVRDFS

SEQ ID NO: 91943 - protein, 426 aa, Unknown
  Obtained from environmental sample
  DOMAIN (283)...(395): Pyridoxal-dependent decarboxylase, C-terminal sheet domain
  misc_feature (1)..(426): Xaa is any amino acid
MSEKIFPLDKAALEKIAQKYPTPFYIYDEKAIIENVRRIKAAFSVFSSYKNHFAVKALPNPYILKLLAAEGFGADCSSYPELLLAEMAGMKGEDIMFTANETPASEYRAALKMGAVINLDDFSHIEYLEKTAGLPELVSMRYNPGPLKEGNAIIGKPEEAKYGLTREQLIDGYRVLKEKGVKRFALHTMVASNELSAPYHVETARMLFELAVEINKKAEVRLEFINLGGGVGIPYKPEQTAVDYKSLTAVIKKAYDEIIKPAGLDPINIRTEWGRVVTGPYGWLVARAIHKKEIYRKYIGLDACMADLMRPALYGAYHHITIPGKETEALTEVYDVVGSLCENNDKFAIQRSLPKIEVASENGIGDLVVIHDAGAHGRAMGFNYNGKLRCGELLMRQDKSIIMIRRAETTNDYFATLDLAGLKKFT

SEQ ID NO: 91944 - protein, 182 aa, Unknown
  Obtained from environmental sample
  DOMAIN (1)...(159): Semialdehyde dehydrogenase, dimerisation domain
  misc_feature (1)..(182): Xaa is any amino acid
MQAVSGAGYPGVPSLDIIDNLVPFIGGEEEKSEKEPLKVFGTFINGQIQNAVMPKISACCNRVPLVNGHTACISLAFGLKRPASMEEIKEIWTAYKGLPQEKKFPMAPDHPIIYREEDNRPQPRKDRDVEKGMAIVLGRLRPCNVFDIRFTALSHNTVRGAAGGGILNAELLKHLGYIKAKK

SEQ ID NO: 91945 - protein, 467 aa, Unknown
  Obtained from environmental sample
  DOMAIN (22)...(133): Phosphoglucomutase/phosphomannomutase, alpha/beta/alpha domain III
  misc_feature (1)..(467): Xaa is any amino acid
VASTDGDSDRPLLSDENGVWLKGDSLGILAGKALGIEAVAIPVSCNTAAEKSGFFKEVLRTRIGSPFVIEGIKKLQGKYKSVAGFEANGGFLTESLTTRDALTPIIATIIDSKKQNLKISELLVKLPARYAGSGLTRGFSVDATDGYRIEFENGDIIHLRKSGNAPEFRCYTESKTPEQAELLSDKCIKTFELWKIMGSKLYDELKELTKKEVKHTEENITPMNFEMLRENPKYDEFEKIGKETLERGKAAAFLIAGGQGSRLGFEGPKGAFRLESLGKSIFQIHAENILKLGKNIPWVIMTSPLNNKETIEHFEQNNYFGLNKSLIKFIEQGTIFAMTTNRELIFENNGNLFLAPDGNGGCFHALSASGALKWLEEKGIEVVFLYGVDNILAKPCDPPFIGAFLDSKMAAASKVVKTKYPEEKMGVFAFKNDLPGVIEYSEISPELAKKLDGGNRGSSRVDLQARK

SEQ ID NO: 91946 - protein, 306 aa, Unknown
  Obtained from environmental sample
  DOMAIN (1)...(306): pfkB family carbohydrate kinase
  misc_feature (1)..(306): Xaa is any amino acid
MKKSSFLAVCMNPTLQKTLVFSGLVPDMVNRTGEYRLDASGKGVNVCRVLTQLGKEACHLTQLGGTLRPLFLELCERDGLKVEWVESSSPIRFCYTLIDKEQKTVTELVEESEKVGDGTGERLYEVFKKLIPNYSTLVISGTKANGFSDSLIPEMVGEARLVGCRVILDVRGYDLRNGLTFGANLIKPNLYEFISTFAPELLSEKNADIVKKKVGEIWAEELHKRHRSCVLVLTRGAEPLWYAENEKLAEYAFKSVEPLNTTGSGDAFTAGLAAALEEGASLAGAVAEGARCGALNAALLKPGVIR

SEQ ID NO: 91947 - protein, 135 aa, Unknown
  Obtained from environmental sample
  misc_feature (1)..(135): Xaa is any amino acid
AFVTYKTKEIRDGIEVNDEKEFEVCSSQYSPIVVYDEFLKMAGFEPDFSKRKKGWAFSRDGINAELLEVEKLGWFLEMEIVLDDIEGDTTKETTIKEKKKQLMEFLSELGIEEDAIESRYYSEMLRELAGSPAGS

SEQ ID NO: 91948 - protein, 577 aa, Unknown
  Obtained from environmental sample
  misc_feature (1)..(577): Xaa is any amino acid
MFNRYMVTSEDEMVKKVRNFIDKEETKVLTRYTPKEIADLLDAVGGADKFNTGEVEKSVVNMYGHLQGHIQRGVNELETHTNSILRQKTDTGAFVRGENAYSIVKCAFKDNQIKPKTVTDVKLSVNILDAELISPIFHYQVTVEYLIKDLIAKHIIDSIDKIIEQVKDERIDKGQEELSDSEIIFAKLNRIEQFTDDNAEEAKSKRYAILAKALMDRISDLRAEIDPESFDALNVRENIKKIIDMENIRNRGFNTAINSITSILDTSKMGYQYIENLKNGREVIIREYEDTDVANLPDERYQIKMRYFDNAQLIEDRKAFDVMMKSFETEVQHLWDVLEVIYQDSKSFFRITDFQDLAKKNKSRIRKVIKEKSGEPLYEDIAKVWDEISFVKPADTEVEKSNRTYVWEKDRLRTRIIRMRDKMKRMYDFLYPIERRVMEERLAWLEKEYFRFDYMINPYHLQPGLLLDVDITSIKRKKITLDAMANVLNEFLHGVSKGFSDAAFASFSRRRSTVREDINQSFSAPTEEEPAVASAAPKPKAIAAPGRAAAPAPKKKGVVDSKAKKRPSRGGSQLSEI

SEQ ID NO: 91949 - protein, 65 aa, Unknown
  Obtained from environmental sample
  misc_feature (1)..(65): Xaa is any amino acid
MLQLSAIDQSTFELLKKLQKLPLLAKTRLVGGTALALQIGHRKSIDLDFFGELDFEIQDLIDNIK

SEQ ID NO: 91950 - protein, 103 aa, Unknown
  Obtained from environmental sample
  misc_feature (1)..(103): Xaa is any amino acid
MIKDADKMDKLYHIDFDDSHGALYAILPGDPGRVEKIASHLDNARFFHQNREYTTWLGELSGRTVMVISTGMGGPSTAIAVEELFQTGVRNFIRIGTCGGMAL

SEQ ID NO: 91951 - protein, 362 aa, Unknown
  Obtained from environmental sample
  DOMAIN (206)...(241): UvrB/uvrC motif
  misc_feature (1)..(362): Xaa is any amino acid
MDNQLNSEKTTESLKNLVIDIPSEPGVYLMKDADGQIIYIGKAKSLKNRVKSYFSGDKDIKTNTLMRHVRSIETIIVSSEYEALLLENTLIKQHSPKYNINLKDGKTYPVIKITNENFPRIFRTRRIIHDNSHYFGPFPNVHNVDIMLELIDKLLPLRKCQKIKKDGPCIYYHISRCMAPCCGKINSEEYNLHVQRVQKLLCGETDSLIIDLTSQMHEAARTLQYEKAAQIRNTIKAIENLTSEDSSVQDLNPEDRDYIAWAEEGVLTTFTVFSMRGGKMTGRDLFRTRSAADEWESLETFITSYYDSSRPPPLRIFLQTIISNNITRKQTETVSNESTETPDIVPLLSNWIKTNLNCEPEF

SEQ ID NO: 91952 - protein, 187 aa, Unknown
  Obtained from environmental sample
  DOMAIN (6)...(166): Cytidylyltransferase
  misc_feature (1)..(187): Xaa is any amino acid
MLRIGILGGVFDPVHCGHLAVALLAKEHFGLDRVLFVPSGAPPHKPAVAVSPDDRLNMLNLAVTGLEGCGVWDGELRRSGYSYTVDTLSELGELYKDAKFYFIIGTDNLTEIAKWRSYEEIVARVTFCAAFRPGYGADRPEALAAADIQDFPGPMWGASSTMLREYLGKGRSCRFMIPDAVLEYIKD

SEQ ID NO: 91953 - protein, 79 aa, Unknown
  Obtained from environmental sample
  DOMAIN (3)...(58): Hemerythrin HHE cation binding domain
  misc_feature (1)..(79): Xaa is any amino acid
VPGYAEHKKIHDEFTMTVLKSVKDFESGKRLVLEKFAYFLKDWVLGHVAVMDMQYAVYFRKIATRNKDGKLIITNANIG

SEQ ID NO: 91954 - protein, 250 aa, Unknown
  Obtained from environmental sample
  misc_feature (1)..(250): Xaa is any amino acid
MGHIYSSGRAGRFKSRSKSVEEKYGGISQIEFVHRLAGYDTGEIINKLQYIREKIIKAGLIVNITGSALNAAGAEIAQRFNRFGPPLPRLSAEIGADTQAAQVQEVFASRSLQVGFAALTLNSAPHDTLESTAEYVLTHQLSTGALWEDIRMKGGAYGAVINSNPLENCVSFATYRDPNPVRSLDVISSIFKDAAYGKCSEDYLVKSIIGCYSKETRPQTAAEKGLVDFYRFLYGIEESYHKRKLDRLIS

SEQ ID NO: 91955 - protein, 270 aa, Unknown
  Obtained from environmental sample
  DOMAIN (5)...(269): Amidohydrolase
  misc_feature (1)..(270): Xaa is any amino acid
MTTIIDFHTHFFPPELAERAITRLIENAAPTIAMKNHTDGTVGGLIESMRAGGIGKSVTLPVATKPSQVSTINRGVAAGPAYPEIIQFGAMHPEMEGFEAEIDFMAANGIKGIKLHPEYQYCYVDAPKAFPMYEKLASAGLIVVFHSGKDPGPFTNDHALPPALRKIHETFPALKMVAAHLGGWTVWKEVEETLAGLDLFFDTSAIYKLLPPEDFVRICRKHGIEKILFGSDSPWYDQGASVEWIKKSGLNDTELEAVFGENAKRLLGLC

SEQ ID NO: 91956 - protein, 163 aa, Unknown
  Obtained from environmental sample
  DOMAIN (7)...(163): ROK family
  misc_feature (1)..(163): Xaa is any amino acid
MGKKAIGIDLGGTAIKGAVIDESGICGGVTRVPTEAREGGRRIMENILSLIGRLIDGNGGSAGEFIGVGIGTPGFVDADGSILNGGANMPGWTGMRVYEPIAERFGLKASAANDVTAVALAELMFGAGRGIQNMVCFALGTGVGGGIVTNGRLYKGSHGMAGE

SEQ ID NO: 91957 - protein, 616 aa, Unknown
  Obtained from environmental sample
  DOMAIN (492)...(573): Hpt domain
  misc_feature (1)..(616): Xaa is any amino acid
MCDFCPCHKLDKEPDSIFIWEEHNQITKRTYRNTDRYIEWQNGRVVHIQYSVDVTELIEAKELAERSNRSKNRFLSRVSHEIRTPMNAILGITEIQLENNTLSPDTKKAFGEIYNSGYLLLGIINDILDLSKIEAGKMELAPSVYDVPSLINDTVHINIMQYDSKQIEFTLHVDANIPSKLYGDELRIKQILNNLLSNAFKYTDKGEISFSVATEYAPQGARQVTLVLSVSDTGQGMTSEQLDKLFDEYTRFNTGANRTTEGTGLGMSITKQLVKMMDGDISVESEPGRGSTFTVRLPQGIIGAEALGSDVADNLRQFRVDKAGQMKKGPRIIREYMPYGRVLIVDDVETNLYVARGLMAPYGLSVETATSGLEAVDKIRNGSTFDIIFMDHYMPKMDGIEAAKIIRGLGYVNPIIALTANALIGQAEMFMRNGFDGFISKPIDIRQLNVSLNKLIRDKYPPEVVEAARQQVLKLSMEKSAAEAGQPVSDPELAAVFVRDAEKALARLESIQSHAFRRTDDIRAFVIDVHAMKSALANIGETELSAVALKLEQAGRTVDVPVLRAETPAFLEALREVTKKNKPKQADDDAVEEESDDIRAYLNDKLLVIKKGVRGI

SEQ ID NO: 91958 - protein, 96 aa, Unknown
  Obtained from environmental sample
  misc_feature (1)..(96): Xaa is any amino acid
MKNMDAFEKSIEDNAEKFVPLSDAEKTEVETIINAANKTKNINIRISAYDIEKVKQLSSEEGIPYQTLISSVIHKYITGKLVEEKAILKSMELLRQ

SEQ ID NO: 91959 - protein, 211 aa, Unknown
  Obtained from environmental sample
  DOMAIN (15)...(211): FecCD transport family
  misc_feature (1)..(211): Xaa is any amino acid
MSNRARIFTGAVVSLFIIAAAVSLGSSGISLRDTVLIILHKIFRLPLAQDIDPKNVSIVWLLRLPRVLLAFLVGGGLAVSGAVCQSVLRNPLASPYILGVSSGASLGAGIIIISGIAIPLLGDFSLPLTGFIFGLVSVFCVAAFSSRIDRSMSNNTIILCGMIFSLFLSAVLTMLSAVFSDDLRRIALWQIGSFAMRGWQSVIVLVPCGIL

SEQ ID NO: 91960 - protein, 142 aa, Unknown
  Obtained from environmental sample
  misc_feature (1)..(142): Xaa is any amino acid
MSKQNFTKTAYQNLDDFIYGKALYPVPLKNGMVIGGGVIYPEINFTLPTMSIEKSTMPEVIANYRELITGICDRARELHIPGFVAEIETLPPMTFNPEWGIEVCKVVVDIIKEHDAKHGIKGAVRITANDIREGSGLNTCGA

SEQ ID NO: 91961 - protein, 775 aa, Unknown
  Obtained from environmental sample
  DOMAIN (719)...(769): DNA gyrase C-terminal domain, beta-propeller
  misc_feature (1)..(775): Xaa is any amino acid
MFEYGSSGETAPTGKVIAVAIEDEVKTDYLNYAMSVIVARALPDVRDGLKPVHRRLMYSMGELGLRHNASTKKCARIVGDTMGKFHPHGDLALYDALVRMAQDFSLRYPLLEGQGNFGSLAPDGAAAMRYTEAKLSRFGEEMLRDLEKETVDFIPNFSEEEMEPTVLPTVVPNLLVNGSSGIAVGMATNMAPHNLGEVCDAVCALIDNPEISIDELMKFVQGPDFPTGGIIFGRKGIKDAYKTGRGKILVRGRFTVESSRSGKETIVFNDIPYGVYIKPLLERIGILVRDKVIDGIANFNDESGKDEPVRLVFELKKGAILKVVLNQLFSNTQLQSTFGIINLALVKGKPQCLNLKELLRHFVDHRIEVVTRRTQYDLRKAEERAHILEGLIIALANIDEVVALIRACKDVKEAREKLQERFALSEAQSKAIVEMQLGRLTNLEVEKIEQELAELKTQIAYFKSLLADEKKLLGVIKDETKKAATQYGDKRRTEIVSGEVETINIEDLIKKEEMMILISNMGYVKRLPVSGYRNQGRGGKGMQSAKLAEDDFVNQIFVASTHEYIMFITSEGKAYWMKVHELPEGSRTSKGSHIKSLLMVSPNEDITAIVSFKDFASEEGGPFLLMGTARGVVKKVAVSEFANAKTRGIIAIKLDEGDKLVSALLTSSQDEVVLISRKGRALRTNGEHVRPMGRSSRGVTGMRMGSDDELAGLLRVDAEEKMLVISAYGFGKRVEFGEFSSHGRGTSGQKVYTVSEKTGEIVGCVGVLDGEEIMC

SEQ ID NO: 91962 - protein, 281 aa, Unknown
  Obtained from environmental sample
  misc_feature (1)..(281): Xaa is any amino acid
FLVILLCLSGAAYSINLFWADLFQTINGQNKTPVGTVSIKRNIVQRRMSDRVIWDRLIKESPVYSNDMIRVAGNSEADLHVGGNNIVINENTLLRLRYNKETGEYQIVLTSGSIGLVTDSEGEAVALNIMGQQVKAKPGTALNASAGNNGIALQVSEGAAVVAGENQNREFARELAAGTAVSMDLSGSIRSAPSAFVIHPKPNALYRKSGERLNVDFSWNRINLQPDERLRLEIAEDPYFIGSIHDFNRLNDSARASLPSGLWNWRLTFNGAVLDSGRFTI

SEQ ID NO: 91963 - protein, 497 aa, Unknown
  Obtained from environmental sample
  misc_feature (1)..(497): Xaa is any amino acid
LENTKGNDADLMTKSLPCTAAEGAGLYFTADKGSGERFTYSAAEITKLRELLDRAAPARGNAVQATQLVWRESYTYDRNGNRASKSNAWGVIRYEYDGENRLVKKGDIVITNDKDGNTLTEKGTRYEARYEYNGQNRMVYSEVTSHSDRTHSVSVYDYDALGRRTLTQNVTGQTLRTVYDGRSFEVIREGEAFRDGSLTTSYSSSAQTRGQNNTLRSNEPTGERYRWIGESGTAAATGEGYAVQGSRYGARGVTLYGNGEAVAVSYSSSAGGKSVYLGKDLLGSVRSATVDGGSFRYEYDAFGQPYAGDLDGMMNLGYTGKPYDAATGLYNYGYRDYRPQAARFTTVDPVRDGSNWFAYVNNDPVNWIDPWGLCASDSQKSGINNFPSFYYMGGERWSNTPLNVNGALIEKEGCALIAMADIGMANLVMQNKLLTQNFTLYNGNVIQISNWITPVTLNVPGNFDKNTDKLDFVKTAAAYGMIAERSERKNPENAQDI

SEQ ID NO: 91964 - protein, 113 aa, Unknown
  Obtained from environmental sample
  misc_feature (1)..(113): Xaa is any amino acid
MGMEPWGVAMRAQPWEVSDEFWARVEPLIPKKERDPEKAYRRRPGAGRKEKPPRLVFEGIVRVLRTGCQWKSLPREEYGSSSSIHKHFLDWEKAGSSVTCGGPGWRSATTWRA

SEQ ID NO: 91965 - protein, 267 aa, Unknown
  Obtained from environmental sample
  DOMAIN (1)...(205): Adenylate and Guanylate cyclase catalytic domain
  misc_feature (1)..(267): Xaa is any amino acid
MTAIFTDVRSFSTISEALGDPAKLVELLNFYLTRMSDIVLDNQGTIDKYEGDAIIAFFGAPIHMENHASLACRAAVCMKKAEVEINKEALEMGLITPDVMKTMSEKGIINRIDDPCPLFTRIGINTGDMVVGNMGTPNKMDYTVMGNAVNLAARLEGVNKQYDTGGILISEYTRSHLGDEFVLRTLSRVRVVGINTPLRLYELLEIASEAPPELLKMVKNWEQAFNFYEKHDFRAAQKLFQAIFDKNKGDLAAKKYLNRCAKFISSP

SEQ ID NO: 91966 - protein, 498 aa, Unknown
  Obtained from environmental sample
  DOMAIN (329)...(451): HD domain
  misc_feature (1)..(498): Xaa is any amino acid
MSSTPELVVDEEKIKKAIQSGLPLTITTYTHPKEIEIYIEQVIDSFLKHMNQTKLKDYIVYCVQELVVNAKKANTKRVYFTERGLDINNDGDYLLGMKDFKEDTIGNIAHYLQLQKEKGLYIKIILQVKRNTIHIEIRNNVSANKMEQLRIQDKMARSRQFNSLEDALSQVLDDSEGAGLGLVILVLMLKKMGIDDEAFEIKAKGNLTVARISIPLDKTMIDNMSVLSSEIVQNVNSLPQFPENVLLIQKLINDPASDMPMIARQISMDPALTADLLKIVNSAQYMLSKKVDNISDAVKMIGIKGIKNLLYSYGTQKILGDDTIDKKALWEHSYRTAFYAYNLVKNFKNDAGLLDDVYIGGMLHDMGKIVFSNVHPDLLNRIKGFCNEKNLPVAAFEDISAGMNHAELGALIAEKWNFPDKLVAAIRYHHDPESAPFDCKDLIDTVYLANMFCEYENNNISFDQLETEPLENYGLKNQKQVDTLIERLSAGFNKEGQL

SEQ ID NO: 91967 - protein, 360 aa, Unknown
  Obtained from environmental sample
  DOMAIN (7)...(274): Aldo/keto reductase family
  misc_feature (1)..(360): Xaa is any amino acid
MIYREYGQTREKVSLLGFGGMRFKNVDDHDECVNLMVAAAQGGINYFDTAPGYFETRSETVFGKGFAQMRKLGLPYYCATKTFESAHDGIRREVEAQLKRLDIPAIDFYHIWCITNLDNWKSRKNDGILQTFRKLKEEGLIRHICISSHLIKNEIKELLMEAVFEGVLFGYSAYNFQTRQEAFDAIREKKLGAVVMNPLGGGVIPQHPELFKFICREGESAVTAALRVLWDHPEITSTLVGFDTIEHLKEALQAMEGYKPRTAIELEEVKSKADASFEGICTGCAYCDNCPAGVPIPEYMDAYNQKLLNKNEKDPIGDRLKWHWSLDRAGAAKCTACGQCESACTQHIDIINRLKEIAGN

SEQ ID NO: 91968 - protein, 184 aa, Unknown
  Obtained from environmental sample
  DOMAIN (3)...(183): Uncharacterized protein family UPF0007
  misc_feature (1)..(184): Xaa is any amino acid
MEAAAVICAAGASARMGGVKKEYQKLPAGNTVLGAAVLAFSAVPSIEIIVIAVCPDSQDEARASLAPESLSAGKPKVLFVNGGESRRASVFNALSFLSQYSPCYVLIHDGARPWVTVNLINNTLESAKKHGAVIPLLALTDTPKEFGAGFITRHLKRANTGIAQTPQAFKFPDIFYAQSKAAEV

SEQ ID NO: 91969 - protein, 279 aa, Unknown
  Obtained from environmental sample
  DOMAIN (9)...(279): Fumarate hydratase (Fumerase)
  misc_feature (1)..(279): Xaa is any amino acid
MREINNSHVIELVEKLCIDANCYLNKDIEQELSRRLERENSPLGKNVIEAIIENAKIAREEHVPICQDTGMAVVFVELGTDAHFSGDLEGAINEGVRRGYKNGYLRNSVVRDPIDRVNTQDNTPAVIHYSITKGDKIKITVAPKGFGSENMGALVMLNPSDGIEGIKSFIINTVSKAGANPCPPVIVGVGIGGTMEKCALLGKKALLRPVGSANANEFWRGVEKELLEKINSLGIGPAGFGGTTTALSVNIETFPTHIAGLPVAVNIGCHVTRHAEGSL

SEQ ID NO: 91970 - protein, 285 aa, Unknown
  Obtained from environmental sample
  DOMAIN (104)...(285): Putative RNA methylase family UPF0020
  misc_feature (1)..(285): Xaa is any amino acid
AGSRAFYAADFDALFEGTLSAQWEKIVPKGVGLKVAKVRSNRSQLKAETSIQSVVHKAAAQRLCGKYKVNRLPEDGKIAEVRVYVEKDIVSLLVDLSGDPLFKRGYRSEGGAAPLRETTAASILLLSGWKRKFPLYDPFCGSGTILIEALMYAWDMAPGLGRRFAIEDLLIADGKTEKSVRDEYVSKIDFSRLVRIAGSDEDSRSVSIAASNAARLRDIAEGREPQRGTREANDKAAITLKTMPMKEARSTFEDSGFLVTNPPYGKRLGDQSQSEQIYRENGSLA

SEQ ID NO: 91971 - protein, 160 aa, Unknown
  Obtained from environmental sample
  misc_feature (1)..(160): Xaa is any amino acid
MKSKFFSKTVAWLNLLLAALFLAISGCDLPDAFYIQVASIEGVPETGEAGTPLTLTGNVRPSFASNKDIIWSVKDAGTTGASISGNILSAAASGTVTIRAKIANGAAEGKDYIQDFEIVFSEGDIGTDPSGRTLITNAAIYVMPPAKSEIQNTGADSGGE

SEQ ID NO: 91972 - protein, 85 aa, Unknown
  Obtained from environmental sample
  misc_feature (1)..(85): Xaa is any amino acid
MNISLEKSRKFAIRIYNLYKYLCGEKKEYVLAKQLLRSGTSIGANLTEAQYAVSKKEFVVKATISLKECAETEYWLDLLKETSIL

SEQ ID NO: 91973 - protein, 311 aa, Unknown
  Obtained from environmental sample
  misc_feature (1)..(311): Xaa is any amino acid
TGLSLATSGVISGTPSTANTFTFTVKATNAKGSITKSLSITIASGSSGGGTDIASFAGTWNASGGKSLVFTGNNFNYMVNGTSRYSGSFSISGTRITFSISIGSASATFSLSGDTLIISNHSYDSSVNGTYTKDGGISSGGGDNMTWTAVTDSKFGTTTILAIAYGNSKYVAVGKSGKMAYSTDGTTWTAVANSTFGTSTSTDDSYAIAYGNGTFVAGGYDGKMATSTDGATWTAVTQSVFTTAINAIAYGNGKFVAVGMSGKMAISTDGVTWTAVTDNKFGSNHIEDIAYGGGKFVAVGWSGKIAYLDSN

SEQ ID NO: 91974 - protein, 129 aa, Unknown
  Obtained from environmental sample
  DOMAIN (3)...(125): Uncharacterized BCR, COG1636
  misc_feature (1)..(129): Xaa is any amino acid
SLALFAANEKLELKMCDEYGLRLFLNEVFPDTDYRCKKCYVLRLEKAASAAAQEGFDAFTTTLLISPYQDHDAIRLVGEEAAKRHGIEFLYRDFRPLFREGQAAARSIGFYMQKYCGCIFSEEKRFLVK

SEQ ID NO: 91975 - protein, 171 aa, Unknown
  Obtained from environmental sample
  DOMAIN (77)...(142): Histidine kinase
  misc_feature (1)..(171): Xaa is any amino acid
LTAIEIDASLEQLQRIDNNLSDTSQRDSFFLFLFFSLLVITVILIIIVQYAKLEKAEIKEQHSLAFSQETIMAQERERSRIARELHDTVAQDILQLSLQTEIMNKETDTSKRSLLCGEIVGGQREIMKRIKNICENLIPPDFQRRRLGDALQTLCYNFQQRTNIECQIKIQ

SEQ ID NO: 91976 - protein, 83 aa, Unknown
  Obtained from environmental sample
  misc_feature (1)..(83): Xaa is any amino acid
VQELSTNGKIVVLATQAMLEGSDIELYEVGKRIQANTRILETCDMTVEAAVAKLMWILPLTKSFDEVKKLFYTQVNYDICWGA

SEQ ID NO: 91977 - protein, 281 aa, Unknown
  Obtained from environmental sample
  DOMAIN (6)...(201): DnaB-like helicase C terminal domain
  misc_feature (1)..(281): Xaa is any amino acid
MESKNPITGISMGFEKLDQLTSGLQREEFIVIGARPSVGKTALALNMASNIAFHQKIPVAFFSLEMSSIALVQRIISSEAEVNAQNLRTGFLSSGDYKKIIDVMALLYDGPFYIVDMPNMNLANLRTQARKLRSQQQVEIIFIDYLGLITYEEKTKLARFDQVSIISRAMKSLARELHIPIVVLCQLNRDAQWEMPTLANLRDSGSIEQDADLVLFLNREQPKKNKKGKEEEKPVYSDKIPTDLIVAKQRNGPTGIIKLEMTAKYAKFGPASKDNNTEQIT

SEQ ID NO: 91978 - protein, 98 aa, Unknown
  Obtained from environmental sample
  misc_feature (1)..(98): Xaa is any amino acid
MGFLEEYDFDLLKNEAEILVIREVENQLKTGHEDMCRCNECIVDIAAIALNSVKPLYRFSLLGALYASQAMTEQSYADSVKAAVTQAIKKVKKNPAHD

SEQ ID NO: 91979 - protein, 108 aa, Unknown
  Obtained from environmental sample
  misc_feature (1)..(108): Xaa is any amino acid
MADRLAVINDGLEPVIIETLKSFLLDKAAENYPDKEINAWYHSNSPDGIEFHLDGIRREEVAVMRIPRELYNKFLTDYKKNPKNGIFPQLRVRSYLSVQNLLRSDALK

SEQ ID NO: 91980 - protein, 424 aa, Unknown
  Obtained from environmental sample
  DOMAIN (95)...(354): BadF/BadG/BcrA/BcrD ATPase family
  misc_feature (1)..(424): Xaa is any amino acid
VLTGGITLNRHIIRFIREKAPQIEFIIPETAPVFEALGAAALAPQSGSRLPPADKLLKPNEVRFGTLGALRDWKNKVKFFEKQDGKVRADRSYILGVDGGSTTTKACLVDTETDEVVASHYGRTHGDPVKALKECLAIIQEKVVADTGGKKIDIRLVSTTGSSREILGVFLETPGVYNEIIAHSVGTTYFDKEVETIFEIGGQDAKYVLLKNGVPIDYAMNEACSAGTGSFLEESASGDLSIHSAKDIGPIALEAGAPCKFGEHCSAFINSDIRKAVQQGAGRENITAGIVCSIVANYLNRVVGNRTIGGKIFLQGGVAKNPAVPLAFAMLLNKEILVPPSPELTGCFGVALLAQRKHADGLLEEQSVIIDDIINREIGYERVFTCNACENRCPIQVLNVNEHKYMFGGRCNKYTNMRKHVKDV

SEQ ID NO: 91981 - protein, 392 aa, Unknown
  Obtained from environmental sample
  DOMAIN (20)...(294): Penicillin binding protein transpeptidase domain
  misc_feature (1)..(392): Xaa is any amino acid
AEEELAMEISLLSNKRISNGAILAIENETGAIRVYIGSGSWFNEEASGKIDGVRFRAQPGSCLKPFLYAMALDTGFSPNEIMPDLPTVFGSREAYVPSNFNNRFNGPVRLRIALASSINIPAVYVLERLGVRTFEEYLVSLGFDSIRETMGTHGTGLALGNAEVSLEEMVRAFSVFPRMGLPVELRWTEDAKPVQTAKGQAAPSVMSPYAAWMIADILSDRSSRFVGFGPAPTLATPFESMFKTGTANQFQHIWALGATKRFTVGVWMGNFSGETVIGSTGSSIPARIAAKLLGALEKSAGQEKGQRSTSKVTENLAGPVPQGTTEVQICALSGMAAGPYCTGFTKEFIRNERIPAVCNWHTQAGLLYPSEYRSWLSERFRLGSVKQEGAGR

SEQ ID NO: 91982 - protein, 637 aa, Unknown
  Obtained from environmental sample
  DOMAIN (270)...(634): Glycosyl Hydrolase Family 88
  misc_feature (1)..(637): Xaa is any amino acid
MNKAPVYGTDVVAERYEHSPVSINLPVKKGWNHLVLRFTRTKAGFGGEFGTWLGKLCYYFFRGMERPELPGLLIEGFDYTPPLVETIADLSPEFLALFCLPLPAWTDNENKLGVFGRIFGDARAGDKAVARTVLILKDTVEGEVQCSFSGTQSGNCAFFQGDELVYSCKEAGPFKFECDLQKGRNDFSVISEFPGIEPRWDFQMEATPEKNIPLRMENPFFSPSSSALAWAFAGPFRKTSDAALVGAFDREQLVGVEGERTWWRLDMPACFVRLYNENPLYGHWNYPLGVTLYGLIETARLFKRNDRQASGDAIGSYVYSHAAQSIRTLDYALFDKEHFGGATAVHHLLTSIDSLDDCGSFGSLVLELAKDGGGALPMEFGAAADYTAGHIINKQDRMPEGCFYRRQMMHHFHNETLWADDLYMSVPFLCRYAAYKKDPAILDLAALQFEGFKKYLFMEEKNLMAHVFDLKRNMNTGIPWGRGNGWAIFSLTELLMVLPQEHPRREFLLSFFRQHAAGVLARQDENGMWHQVLDMPASYQETSCTAMFTCAFCRGLRYGWFDGREAAYRNAAEKAWRALENHSIDKSGAVYGVCRGSEFAFNPRYYAEHLLPRLNDTHGIGIVLLAGVELLKSREVS

SEQ ID NO: 91983 - protein, 427 aa, Unknown
  Obtained from environmental sample
  misc_feature (1)..(427): Xaa is any amino acid
MYYDYREKAAAIPSHRFLAMQRGEHEKVLRLSIDLPAEGTIERLCAALVKHPRSAAAPYLREAAADAFDRLLLPAAKTALRTEMRERADAEAIKVFGENLSALLLAAPAGRKTVIGLDPGFRSGCKLAVVDDTGKFIETATIYPHEPQRDRAGATATLQSLIRRRKPRLIAVGNGTAGRESDEFVRTALKGLPDEERPLCVTVSEAGASVYSASDAAIKEFPDLDVTVRGAVSIARRLQDPLSELVKIDPKSIGVGQYQHDVNQTRLKESLDEVVESCVNRVGVDVNLASEELLKYVSGLNRLTAAGIVDYRNRHGAFQSRADLKKVVGLGDKKFQMSAGFLRIPGARNPLDNSAVHPESYGIVKKMAERLNVDIGGLIGNTTLLKSINKNEFVTKDAGLPTITDIVEELEKPGRDPREEFKYAKFD

SEQ ID NO: 91984 - protein, 213 aa, Unknown
  Obtained from environmental sample
  misc_feature (1)..(213): Xaa is any amino acid
ETGDEVERLGIDRTRSAVAEAHFVLWVTSAEEAFGEGEQEGILWAAGVGIKENESVRRDSQRVQVVDIYDNCDDNRGEDRDKMDRLMVIINKIDKNDKYMIEKRLFCERYMFRYVETSITQKLNRERLFNAIGSMLKSIMKDVSTPAIIINERHRGIIAAVVGDIRDCLDNFDREEVAAHTLRLALDRLAELSGHVGNDEVLNGIFERFCIGK

SEQ ID NO: 91985 - protein, 309 aa, Unknown
  Obtained from environmental sample
  DOMAIN (232)...(306): Biotin and Thiamin Synthesis associated domain
  misc_feature (1)..(309): Xaa is any amino acid
MNYFQKSESLYNSAVSNGGGISEADMREVAEWPLDQTALLFAAADQARRLFFGGAVDPCAIMNVKSGGCGEDCAFCSQSARNRAGVAVRGLSASEEIISRCREAWSKGLPFCVVSSGKRLDKSEFQALCETLSECGNDGEKHASLGILNDSDFAALREAGVVCYNHNLETSRDYFGKIVTTHGYDDRVATVRRARAAGLRACCGGIFGVGESWDDRIALCLELRGLGVDTVPINFLNAIEGTRVKQPKETPLEFLKIVSLYRLAMPKATIKVCGGREKNLGLLQPLIFQAGANGYITGGYLTSGGAGVE

SEQ ID NO: 91986 - protein, 100 aa, Unknown
  Obtained from environmental sample
  misc_feature (1)..(100): Xaa is any amino acid
MKTVIIYGIEHKGSNYNVIQLFKEQLNIDENELIEFYLPKDLPNFCRGCNTCFIKGEEFCPDQNYVTPIKNAFNNAELIIFASPVYVFHVTGQMKTLLDH

SEQ ID NO: 91987 - protein, 384 aa, Unknown
  Obtained from environmental sample
  DOMAIN (21)...(195): Type III restriction enzyme, res subunit
  misc_feature (1)..(384): Xaa is any amino acid
MNFEQLGVAPCFIKCLEKRNIKTATDIQCKVIPRLFAGENVFFTSATGTGKTFAYLLPLLTNLLVNEKSAFGPRILILAPTLELCSQISSELDFLLDGSPIRSFLAIGSISLDRQIENFKKTKPDIVVGNPNRLLLLAQKKILKLNNLSSLVFDEADRLVSGEMIDDTTELCSLIRKFAKTDSILLAACSATINKKCVEKVQTVFFGDGESRGVSFIESEDNEILRDKIEHWAIFSEKRRKDQTLRSLLAAIKTKKSRVKALVFISKGDEAALVLSRLQYHHVSAAGLFGKIGNKPLSGAERKESLDLFRSGSVDVLVSTDLAARGLDIPDITHVIALDVPADSEVYIHRCGRTGRAGKRGIMVTIGDETQMRLLSLLEKQLKN

SEQ ID NO: 91988 - protein, 452 aa, Unknown
  Obtained from environmental sample
  DOMAIN (3)...(452): AcrB/AcrD/AcrF family
  misc_feature (1)..(452): Xaa is any amino acid
LSIASTSVRRPVLTLVLSAFIVLFGLIGLKQVGVREYPAIDPPIINVRTTYTGANAEIIASQITEPLESAINGIDGIRAITSTSRDEQSNITVEFNLGANLERAANDVRDKVSRAQRLLPEEADASVVSKADANATAILVLSLGSNNMSLLELTDLGERVQERLQTVEGVAEIGMWGAKKYAMRIYIDPVKMAGYGLTLNIIRSSLDRENAELPAGQLEGSAAIVTLRSSSKLISEDDFRNVILSNNANRYVRLGDVADVVLAAENEKNTLRMNGRPMISLPVVAQPGADQIKIADEVLKRVEEIKKDMPEGVVIQITFDNTHFVRMALSEVEETIVIAFLLVVAVIFLFLRDFRTTFIPMITVPISLIGVFFIIWILDFSINILTLLGVVLAIGIVVDDAIVVLENIYAKIEKGLEPKEAADKGVNEIFSAVISTTLVLCAVFTPLLFMEG

SEQ ID NO: 91989 - protein, 1029 aa, Unknown
  Obtained from environmental sample
  DOMAIN (322)...(743): Alpha amylase, catalytic domain
  misc_feature (1)..(1029): Xaa is any amino acid
MVKFQLKLDKLEKKTSIWAKNRKVRMEFHIDRDMRQKYGLKDSLFSLTGNVFLADMKQTRELAAKFNAKQDPNHPERYIKAGHLYAMGLIDEILHYVVALYREEVQGDVFETALDRLNNNLGEGKTNGLLNEFSKQFPPRPVYKGEKNIEQYLKSKENGESCRALSIEETTLLSLANLNPAFKPFKFLFDDKKLSAKTAYPDAIEEIKAHLKEMPVFGPDGMNLWDFLRSPAIQFPDSLFAQLDYMRRHWGLLISKFMARLLMSLDVINEENKPSFFGPGPSEVLSFAGLDEYEKYSPDLDWMPNTVLMAKSTLVWLFQLSQKYKREITRLDQIPDEEIDELARRGFTGLWLIGTWERSQASKTIKQWTGNPEAAASAYSLYDYDVAGELGGWGALTNLRERCMRRGIRLGSDMVPNHTGIDSKWMIEHPDRFLQLPYPPFPTYNYNCGNLSGRDDITVQIEEHYFSRSDAAVVFKRIDNRTGETRYIYHGNDGTSMPWNDTAQIDFLNPEAREAVIRTIIGVCQQFSIVRFDAAMTLAKRHIQRLWYPAPGSGGAIASRAEHSITTDEFNRRIPNEFWREVVDRCAAEAPNTLLLAEAFWMMEGYFVRTLGMHRVYNSAFMNMLKNEENAKYRATVKNTMEFDPEILKRFVNFMNNPDEETAVAQFGKGDKYFGICTLLVTMPGLPMFGHGQIEGFEEKYGMEYRRSYRDEIPDGYMVDRHEREIFPLMKRRSVFSGSANFRIYDLYCNGSVNENVFAYSNRAWINGREEKALIFYNNSYYETSGWIKVSDPAIPCEGGTRRDSLSEALAIHGESQYFTLLREQKSNLWYVRSSKAICENGFFVGLQGYETQVFLDVYEVEDDVKGRWARLNNDLNGKGVDDPQNAIKDIFLGELYYRFMEILKPEIIISMNELLDKESFADSFKDSIKTFIDTAVNFIGGANGAYDEWTSKDEKGGKINFTAVDKDIIEKEFIAFINRLKKLRDELKKYNADLSVGDKSKSPLFARILECNSNGQRFYSVALSYGLL

SEQ ID NO: 91990 - protein, 429 aa, Unknown
  Obtained from environmental sample
  misc_feature (1)..(429): Xaa is any amino acid
NNPDEETAVAHFGKGDKYFGICTLLVTMPGLPMFGHGQIEGFEEKYGMEYRRSYRDEIPDGYMVDRHEREIFPLMKRRAVFSGSVNFRLYDLYCNGTVNENVFAYSNRVWLNGHNERALIFYNNSYYETSGWIKVSDPAIPCEGGTRRDNLSEALAIHGESQYFTLLREQKSNLWYIRSSKAICENGFFVGLQGYETQVFLDVYEVEDDAKGRWARLNNDLNGKGVDDPQNAIKDIFLGELYYRFMEILKPEIIISMNELLDKEFYADSFKDSIDAFINTAVNFIGGANGAYDEWTAKNEKGVKINFTTVKKEIIEEEFKAFINRLKKLRDALKESAIGKLESPLFTRITECNMNGQRLYSVALSYGLLLLLRLIIGKEADGTHAASLAFDHWDLGRKMREIYRRFGASEAEAWRITDIARAVLSRTSL

SEQ ID NO: 91991 - protein, 187 aa, Unknown
  Obtained from environmental sample
  misc_feature (1)..(187): Xaa is any amino acid
MNKNSGLWLFLGPEIGEKQAAISQIRKNLSQRGELEETVYYAGETAVSVMVSAMRNGSLFADSQLFCVKCVEEIKKKEDLDLLSSCLQSQADNSFVILISEETGISRALEKIIAPANKRIFWELSDSKKAEWVETFFRREGFRIRKEGIETILELVENNTEALKRECSRLTVFLDKNREITGEEAEK

SEQ ID NO: 91992 - protein, 78 aa, Unknown
  Obtained from environmental sample
  DOMAIN (1)...(63): Peptidase S24-like
  misc_feature (1)..(78): Xaa is any amino acid
MESAGIMDGDIAVIQQQNTVRNGEIAVVMLDEAVTLKTFYRESARIRLQPENPKYSPIYCSRDVRVLGKLAHILRSYA

SEQ ID NO: 91993 - protein, 273 aa, Unknown
  Obtained from environmental sample
  DOMAIN (18)...(270): DNA polymerase family B, exonuclease domain
  misc_feature (1)..(273): Xaa is any amino acid
IVHAYPDLKKDRLYFLGRLADGRSFAVVEEKWRPYFHIFESDRDRVLPLLSGLRFEESGDCLESFSGREKLLRLGFSSYSGRSSAASLLEDALVPSPDSGIKPAELFLIEKQIRGPVTVQGNAVPGKRVDVVIRDPQISAPQQAVTVPLRIASVDIETDVNTGVIRAVSTAWADGLCDEITDNGTNVVRGIVRVLANRSSPTPDTHSSSFVFHADEKSLLSAFIEDIRRVDPDVLTGWNFLDFDFPHLAERCKKLGVPFALGRSGDPAKYFPG

SEQ ID NO: 91994 - protein, 157 aa, Unknown
  Obtained from environmental sample
  DOMAIN (5)...(155): Thymidylate kinase
  misc_feature (1)..(157): Xaa is any amino acid
VFVTLEGMEGAGKSTLLTGLTDRLEAAGRAVLCTREPGGSALGREVRALLLRAGSDVVPEAELFLFLADRAQHVARIIRPALARGDVVLCDRYVDSTVVYQGAGRGLDADALRRLCDFAAGSLRPDVTLVLDLDVKIGLARAASRQAADSTLAAEGR

SEQ ID NO: 91995 - protein, 346 aa, Unknown
  Obtained from environmental sample
  DOMAIN (96)...(339): Queuine tRNA-ribosyltransferase
  misc_feature (1)..(346): Xaa is any amino acid
MPVGTQATVKSMSPLELRQCGCPIILANTYHLHLRPGSKLINEAGGLHKFEGWNGSILTDSGGFQVFSLRDISKITDDGVEFQSHIDGSRHFFSPEAVMEIQHELGADIIMAFDECPPSNADPAVIELAVSRTLLWAARCREHHNKLHFLHGYPQHLFGIVQGGVIKPLRERCARELVAMDFPGYAVGGLAVGESVESMYDIANYTARLLPEEKPRYLMGVGTPADILECISAGMDMFDCVLPTRNARNGSAFTSSGKLNIRNSMHTKDFVNPLDKKCTCYACSNFSRAYIRHLYMAGEILAIRLMTLHNIHFYMELVRNAREHIIAGTFGEWKKEMIANMAGDEV

SEQ ID NO: 91996 - protein, 122 aa, Unknown
  Obtained from environmental sample
  misc_feature (1)..(122): Xaa is any amino acid
MHDPRQGTRFAPCILVPVYRHAARFAEFSKSLPKDIQVMVVDDGNCGEESRILYAVGYPTLRLPRNMGKGGAMLAGLRKAAAEGYTHALQIDADGQHDAGDIPRFLAKAKDNPTALVNGCPI

SEQ ID NO: 91997 - protein, 373 aa, Unknown
  Obtained from environmental sample
  misc_feature (1)..(373): Xaa is any amino acid
MEIMRQYKNDVFHLKRSRLNQLFFEAIKYPLVVVYAGAGYGKTSAVHDFTEEHQTTVIWAHVCERDNIRARFWENFINTIGKINAPFAEAACKLGFPDTNEKRNQYMSLMQEFVSMKQRLIILDDFHYLESESVIYFLEECIFFKMPPGTAIILLSRSSPKIKTAGLVSKGLIFNINEDDLRFSENELAHYFRGLNITPYPEHLREIMGDTGGWAFAINLIARSYQKAPHYKAYVSKAMKTNIFQLMEMEIWENISKRLQRFLVRLSLIDHLSVDFISLLAEDKELIEELEKQNAYVRRDNYINAYHIHPLFLEFLAEKQDLISEEQRRKTYKTAGVWCGKHGFMIDALSYYEKIGDYDSIVSSLLSLPQQIP

SEQ ID NO: 91998 - protein, 320 aa, Unknown
  Obtained from environmental sample
  DOMAIN (1)...(319): tRNA synthetases class II (D, K and N)
  misc_feature (1)..(320): Xaa is any amino acid
MDLEMLQKRAFIFRQVRSFFDTKDYLELDTPLLSSDLIPESCLEVFETKRLFPHGSKKESSPLWLIPSPEIWMKKIIAQHKRNVYQICKCFRNGESTGHLHNPEFTMLEYYTMEANYMDSLSLTEELFAFLAQKTDNPLLSPPFERVTVAEAFEKWAGFDLFAEAEKEGGLETQTRRLGLDPMPNLSVGALYDLIFIHAVEPKIKEQKPVALIDYPAFVPCLAKKSENGKTCERWELYYNGIELANCYSEETDPQKVKEFFTDEAVQKEKTALVKHKVDHDYYKIFEIFPQCSGVALGMDRLIMALTNRSTIDSVLPFAL

SEQ ID NO: 91999 - protein, 513 aa, Unknown
  Obtained from environmental sample
  DOMAIN (103)...(334): Glycosyl hydrolase family 3 N terminal domain
  misc_feature (1)..(513): Xaa is any amino acid
MVKNMNIFKIFFFSVLILLTSSVFSLSFFDDGSPEELAEAIEKAMSDDEALAQVFMLGWVGAEPSPLIMDWIHDRNIGGVKIFGWNTGDTLRLARTVGALQEASLKGKFKIPLLVATDQEGGWIRHVKGNTSITPGNMAIGASGYPRDAYLAGYYIGKELALLGINMNFAPTIDLFTNRDSWLISTRAFGSDPVKVGIFGAAYIRGQQAAGIIPTAKHFPGHGDTQLDSHGVLPSINVTFDTLWDRELVPYRMLVKEGIPAVMSGHLAFPRIEANGVPASLSSWFLKDVLRGKIGYRGLVITDDLMMNGATIWAGSVSRAAKQALLAGNDIILFSKTPDLFDPVWNLLSSSMKDDNEFRLRVREAARRTLEIKLRYLRGSLAVTFIPDINKVEKGLPDPEGSAFFLELAARSVTIVKPSKEAAFGTQSEHGVFPLKPEVAGKVLLTGQYLDFFKVGRAAFPGAISYWYSEIFSIDDLVTFARAADTVIFCLSDTEGLRILRRLEALKKRIIVL

SEQ ID NO: 92000 - protein, 365 aa, Unknown
  Obtained from environmental sample
  DOMAIN (145)...(365): Respiratory-chain NADH dehydrogenase 51 Kd subunit
  misc_feature (1)..(365): Xaa is any amino acid
MDKNPMERTLLVCCGTGCIANGAKAVAEALEKAAELMKKPGSETVHLKGGIKATGCNGFCENGPIVRLMPDDISYYNVKPADAEDIVKHIIGEGKIVERLLYKNDEGKKVLSQMENPFYAQQHKIALADAGLIEPGNIKDYLCRGGFEALKKALSMKEEEIIAEVEKSGLRGRGGAGFPTSRKWRQAASYSEIPKYVVCNGDEGDPGAFMDRSILEGDPHRVIEGLVIAARAVNAAEGFMYIRDEYDLALKNVHKALQSAREEGYLGKNILGSGWDFDISVVRGGGAFVCGESSALMASIEGRVGEPRTKYIRSVQRGLWDKPTVLNNVETLANIPYIICNGGAHYKGIGVETSSGTKVFALVGK

SEQ ID NO: 92001 - protein, 55 aa, Unknown
  Obtained from environmental sample
  misc_feature (1)..(55): Xaa is any amino acid
GRGKTGDGLFTVETVNCLGACAIAPVMVVDGEYHPKVKPDQVEAILKTYREKKNG

SEQ ID NO: 92002 - protein, 301 aa, Unknown
  Obtained from environmental sample
  misc_feature (1)..(301): Xaa is any amino acid
MAANDGIVFDSSSGIPIEEQKEILTKINGIAEKRRRHLSQSADESACIKAKNNSAFFPLMVNIAALLILCGGAWFIFFFNGKKDVQVRQGTGVYDLTEKALIDEIRKDSAMSELEQLSKEQERTAAIEAQLAGGLTSISELIKDGKYDQAAKSIENFRYINNEGVFPSSRSAQAKKDFYNKAIDSMDTMITHLRATGGADSLELVSKNSQLEAKMAEMQKTIDTFSSGSSGQARLLKEKDDSISKLEKASADKDRIIASLETDKNNLTQTVSDLKTVSDEKDKKIAELQSVVDVVRQVIKD

SEQ ID NO: 92003 - protein, 475 aa, Unknown
  Obtained from environmental sample
  misc_feature (1)..(475): Xaa is any amino acid
MRALFFTLILAIIINVGLFAQSGPQGSRIVPSAQGDSAIADRYIQWAEQQIKAGQWIQARNALERAADYADVSSDISYLLALTRFNTNESRGSVLQAIENALRTRRWTRYGEPQARLLEAQQFIAMRRYSAALDSLVIFQPVALETADAAMLRLAALKGLVNTGAVSYAVEFRRRMTEAMNRYPRDTRTLRLLFDYANYAYTDGREPSRDDIRVMELALERLPFLLPKDPELAWIAVPFINDIEKARQTLADYRAGSSKPNPASLVPALNLGLLDDIDAVEELFAPAAAETAVVVDKDLVVNVWKLLRSEEGRDHMARKLKAFSGTITEDEDHDGYHESRAVYREGVLEEYHFDADQDRSEDVAIIFNSGIPQWARMPALAAVVFWESYPSVQRAVLENGLYLPAPGGFRFAPLGFTEICASDSTPGILYPQRELLQQNITRRMLASFASSVQQPSVEFAGGIEHIYLENGIPVN

SEQ ID NO: 92004 - protein, 350 aa, Unknown
  Obtained from environmental sample
  misc_feature (1)..(350): Xaa is any amino acid
ERLPFLLPQDPELAWIAAPFINDIEKARQMLADYRAGSSKPNPASLVPALNLGLLDDIDAIEELFAPAFATASAEKSAAVVDKDIVVNVWKMLRSEEGRDHMSRRIRAFSGTITEDDDHDGYHESRAVYKQGILEEYHFDADQDRLDDLVIIFNSGNPQWARMPVLQAVVFWESYPSVQRTALENGLYLRAPGGFRFAPLGFIEICAGDSTPGLLYPQRQPLQQAITRYMLASFAVSVQQPSVEFPGGIEHIYLENGIPTNAEVILGNKTVSYTDFENGRPVTQWLDLDLDGRMETVRRFRKNFFIGKTALSWDELQGRLSQGGSDFRQLLESSESDWNGDGKFESREEY

SEQ ID NO: 92005 - protein, 234 aa, Unknown
  Obtained from environmental sample
  misc_feature (1)..(234): Xaa is any amino acid
MKTFSYGDDAPIAAFATTPGKSALTLIRCSGKGSLELAAKTFSIPEKITQAVGNTVVHGWIVTPNQSRDNLVDRVDDVLVSVFRAPKSYTGEDSLDISCHGGNAGEAVMTALRTTGFRDALPGEFTFRAFMNGKLDLTRAESVMELVSARTDRARSNAINRLSGVLEKEIGAIKKTLLEVLSGAEIYLDYSDDEISAGAEEIAGRLPGERLAWEALARLQKLGAIMAVGTYLSG

SEQ ID NO: 92006 - protein, 309 aa, Unknown
  Obtained from environmental sample
  DOMAIN (54)...(178): PAP2 superfamily
  misc_feature (1)..(309): Xaa is any amino acid
METVLQWGLDCIRQIQTLATPELTFCMWAFTIIGSSAVCMVLIPFVYWCVDEKKSLRLAVVLLISAWINLALKFFLDQPRPFFEGYDPSVGMAAVVMGGFPSAHAQNSLVMWMIIASWKIIPRLSRAVHFGIAAFLCLLIGFSRIYLGVHFPTDVFGGWLLGGLVLAVYFWAGSRIEEWFETHNPRIGLIAAAALAFAMNMYRPFEYLLMPSGMILGLGIGCFLCRRYIGFNASLKDRSGTEKRLTLLVRYVLGITAIALLYVAAGKFINGLRDSGNYHLYVFIRYVLMAVWISAGAPWVFCKLRLARA

SEQ ID NO: 92007 - protein, 172 aa, Unknown
  Obtained from environmental sample
  DOMAIN (5)...(172): Serine hydroxymethyltransferase
  misc_feature (1)..(172): Xaa is any amino acid
MIKELERSDPQVAAIIRNELGRQRLGLELIASENFVSPAVLAAAGSVLTNKYAEGYPGARYYGGCEFADQAEDLAASRARRLFGAEHANVQPHCGSAANMAAYLAVMKPGDTILAMSLAHGGHLTHGAPVNFSGRLFNVLPYGVRADDELVDYDEVLALAARHKPAVIVAGA

SEQ ID NO: 92008 - protein, 130 aa, Unknown
  Obtained from environmental sample
  DOMAIN (9)...(121): FabA-like domain
  misc_feature (1)..(130): Xaa is any amino acid
LSYSSCEENSPQGFASLEGVRVIEQKENTLEIEFSIPETSPYFDGHFPQFSLLPAVAQTELVIRFASAYLGTGIDATEMKRVKFTKFIRPNVTLHMRLEKSESSVGFKIFSPDDESVYSHGTIYFNRESE

SEQ ID NO: 92009 - protein, 355 aa, Unknown
  Obtained from environmental sample
  misc_feature (1)..(355): Xaa is any amino acid
MMKTKFLSTAIGSMPFEDPDYAVGVSLKSMDAPIWPQLPRLGLLEQMEVQYSENIPCAVIDNEKNRMYFQTDCDYSEKFGEFYEAYMTASDADGGTKDFSPMAISEKYSKGIYALLRTLKAKGAKHPWLKVQSTGPITFALSITDENKRAMYYNEEFRDVIVKAIAAKSRWQIQQFKPFAENIICFIDEPILSAFGSSTYVSVKREDVVNILKEVIEAIHAEGAIAGIHCCGNTEWSILVDAGVDIVNFDAFEYGDTIAIYADSIKSHLDRGGVLAWGVVPTSEKIREQTVESLEKKLEEGIDRLASKGIDRNLILQQAMITPSCGTGSLAVDAAEKVFSLMLDLTKRMKEKYKF

SEQ ID NO: 92010 - protein, 139 aa, Unknown
  Obtained from environmental sample
  misc_feature (1)..(139): Xaa is any amino acid
CQAVKAVKENTHLEVICTFTFEKTVQGDYKTMMGVDPVSAMNAVIEAGADIVGANCGNGIERMIDIVSEMRSVNKKIPILVHANAGLPKNVDGQVIFPETPEDMANFAPRLAAVGANIIGGCCGTTPMHIKALKEALQK

SEQ ID NO: 92011 - protein, 87 aa, Unknown
  Obtained from environmental sample
  misc_feature (1)..(87): Xaa is any amino acid
KSDDIAIGNIIGSNIFNIFLILGVSSIASPLEYSVIFNRDIYILILGTVLLLAAMFTGNKRKLDRWEGVIFVLLYTGYVVYMIMRNE

SEQ ID NO: 92012 - protein, 507 aa, Unknown
  Obtained from environmental sample
  DOMAIN (239)...(328): GAD domain
  misc_feature (1)..(507): Xaa is any amino acid
VKKRDAETVNPKIETGTVEVHTETLVIQGKAVRALPFEITESKNTREEVRLRHRFLDLRNPAVKKNIMLRAKVISFLRAKMESLGFTEIQTPILTSSSPEGARDYLVPSRKHHGKFYALPQAPQIFKQLLMVSGFDRYFQIAPCFRDEDARADRSPGEFYQLDFEMSFAEQDDVLRTAETVLYDVFKTFSDKAVSPAPFRRIPYAQAMLKYGTDKPDLRNPLIIEDLTQFFADVDFQPFKNIPVRGIVAPNAAKQPKSFFEKMLAFATEIGMKGLGYISVLEDGSLKGPIVKFLSEEKQTTLRKDLSLKENDTLFFIADVPAAVNGLAGQIRTALGSQLNLVNKNSFELCFIVDFPMYGRSEETGAIEFTHNPFSMPQGGLEALVSKDPLDILAWQYDIVCNGVELSSGAVRNHLPEVMVKAFEIAGYTQADLENKFSSLYNAFHYGAPPHAGMAPGIDRIVMLLAEEENIREVTVFPMNSNAQDLLMEAPCEVSEQQLREVHIRIR

SEQ ID NO: 92013 - protein, 292 aa, Unknown
  Obtained from environmental sample
  misc_feature (1)..(292): Xaa is any amino acid
ICRTAEDRPIPRLKKNQILAGLLVFTVVFLLLFNLVLGKKGKQKQNGLSGRGGQIVYNAEFSLGDMPERAPVTRDVDDLLAQDIQAIEASSRFRSPPAYENFETKTIQQEQGAGTQYRGASAGGGGNQQSGYSESDTQALSASIRKDGGYGQSPAAAVEPAAPVAVPQAAIQSLPIATIGKEDYTRQQLDEYSRLIQMANSQGAYASGANTPSANVQQTQNMNNGRYSEAGGYNPVNNEAGNFRFLDDNVIVPGTIIHAILVSKIDTDYPGPIHARVTENVYDSKTGKNLLI

SEQ ID NO: 92014 - protein, 178 aa, Unknown
  Obtained from environmental sample
  misc_feature (1)..(178): Xaa is any amino acid
MGLFIYSIFFAIKPRVFLFIELLVLLPLLAALSFVGMKDLVLFENYIKIIFVAVFSGFLSLKVYYSTMEGIANKKLIEMESEAARDALLRFETIWNWVECGIVIINAVTKEIIDINPVAVRMFGRERSAIIGNRCHEVFCPADKSSCPILDFDQEVDRSEREFLNAKGERLPIIKSVI

SEQ ID NO: 92015 - protein, 248 aa, Unknown
  Obtained from environmental sample
  DOMAIN (107)...(170): PASTA domain
  misc_feature (1)..(248): Xaa is any amino acid
ADSGKDPAAGTIVKAGRRIRLVVSQGVIVNRIENYIGRNIEDVRMDLQTVAASSGNQFLSLKEPLMYDFSSETPGTIIRQKPEAGTDISGPTRLEFVVSRGQADSVVTVPQFVGFPISSALEQIGRAGIAFEFTIRELMEGEKGETVVSQNPPAGVSVTSNDILRLTVNSPSRLGENEVFGLFAYTMPKNPYPLPVRLEALLPSGERNQLIGVDYPGGRFTAPYRLPVDSVLVLYLMNREIYREIVTH

SEQ ID NO: 92016 - protein, 109 aa, Unknown
  Obtained from environmental sample
  misc_feature (1)..(109): Xaa is any amino acid
YNLWLVEDNCDALGSTYTIDGVLKFTGTIGDIGTSSFYPPHHMTMGEGGAVYTSDPLLHKIIRSMRDWGRDCACPPEKTTSVGTALTGSTANCLLGMTTNTSIAISATT

SEQ ID NO: 92017 - protein, 177 aa, Unknown
  Obtained from environmental sample
  DOMAIN (26)...(162): Phosphoribosyl transferase domain
  misc_feature (1)..(177): Xaa is any amino acid
MDKDFNLDKYIRKVPDFPKKGILFYDITSILCQPEAFQFCIEAMVDIYKDKKIEAVAAIEARGFLFAAPFAVRMGIPLIPIRKKGKLPGTTLSKKYELEYAQAEIEVHKEDVPAGKRILLTDDLIATGGTLNAAKALLNEGGAEVPEIFGVVALPFLGYEKALSPTPVTTLIQYHSE

SEQ ID NO: 92018 - protein, 328 aa, Unknown
  Obtained from environmental sample
  DOMAIN (114)...(287): Phage integrase family
  misc_feature (1)..(328): Xaa is any amino acid
CPYLKERGKRFNLTQAYAKRGKMVVVNQLLPYFGKMKMDAITQEEIEKWFDYMVNKGYKNTYTNGIFAIFRVMMNWAAKKKVIPADPTGDVILLKNDRKPLKIITQDEFKALFVKDWRKVWGDDLIACLGNKLAALTGMRAGEVLGLRGENVRESHIQVYKQYDKFGYRDTKTKDRRNIPIPPQVMGELRELMAVNGDGYLFSHNGGSKPVPTRYFYDAFLEALEKIGMGKEEIKERGLCFHAWRHFCNTELQKAGLTIQKVQAVTGHKTDRMSEWYSHFDPMDFAEVPKIQEGWLSGEPGDGPEGGGESQRPVELRIVKPEPELKMA

SEQ ID NO: 92019 - protein, 192 aa, Unknown
  Obtained from environmental sample
  DOMAIN (3)...(189): Putative serine esterase (DUF676)
  misc_feature (1)..(192): Xaa is any amino acid
MTESVTLKYPVVLVHGLIAHDRPGIIKFWGKIPQALRESGARVFFGNTDSWGDYESNANILKTTIDDVLQETNSEKVNIIAHSKGGLDSRYFIWKYNYGGKVASLTTVSTPHHGAELADLIYRQKIIHSQFARQALLAFGKLYGDKNPDLFKVNYQLTTEYMQKFNNEILTDGRVHYQSLYTVMNDSSDDPI

SEQ ID NO: 92020 - protein, 275 aa, Unknown
  Obtained from environmental sample
  misc_feature (1)..(275): Xaa is any amino acid
VTDREGPVCRPEPDRNYQAYKPLLENAGQVYISGREEPFTSRYGRLLIRHIARDYPGLRFAFMTNGLLCRRKTWERLGISGRVDEIYVSLHSVPKSYDTLFRNLGALAAMKRNGELQKLQFNFVLTSANYAELADFVRLAENFSAVAWIEEAPAICRPEYKDYEILKTILKDPVFDLPHVFLLPGLSKIRQEPLHPSDSKTLSVIIPVHNAEKYLAECLDSVLGQTYKDLEVIVIDDGSTDNSAEIYAQYAAQDPRLKIIRQDKAGPSAARNAGL

SEQ ID NO: 92021 - protein, 494 aa, Unknown
  Obtained from environmental sample
  DOMAIN (345)...(370): The GLUG motif
  misc_feature (1)..(494): Xaa is any amino acid
SDDVGGIAGRNTGTIINSRNTATVSGRTRVGGIVGENQGKIDNSYNTGAITGSQQVGGISGGNSSSGNYIKNCYNTGNVISTTATTTSNAGGIVGQSSALVEYCYNTGNVSGTGGVGGIVGYTNTGSAIQNCVSLGARVTGNGTSNGRIAGTNSNTVTGNLARIDMKVGISGSEALVTTGAAGNNAGANVSLGTALSSVFNTNWLSTLWTIPTGNLTINGDLPTLKDNTQSPAPTLPAAYNPPGTADNPFEVKNEADLRKVGTGTDGWTLSAHYRQTQDIAMTTSNFPPIGNNTNRFTGEYDGDGKTITGLTVTGTIDYLSLFGYIGTTGTVKNMIVTGTITQSGYAFTGGIAGYNEGTIDNCSFSGTVSGNSTSDYIGGIVGQNNGTIINSRSAATVSGRNQSGGIAGRNQGTIENSYNTGAVSGNQQVGGIAGINIGSGNYIKNCYNTGDVTSDSASGANTGGIVGNNQALVESCYNTGNISGGSVVGGWIL

SEQ ID NO: 92022 - protein, 274 aa, Unknown
  Obtained from environmental sample
  DOMAIN (136)...(274): Uncharacterized protein family (UPF0051)
  misc_feature (1)..(274): Xaa is any amino acid
LDYPSVDYQDIVYWAAPKTTEKSTEIDPELIETFKKLGISLDDEKLSNVAVDAVMDSVSVKTTHSDELSKHGIIFCSISEAIREYPDLIKQYLGSVVPIGDNFFAALNSAVFSDGSFVYIPKGVRCPMDLSTYFRINAKDSGQFERTLIVADEGAFVSYMEGCTAPQRDENQLHAAIVEIVVMKDAEVKYSTVQNWYPGNKDGEGGIYNFVTKRGICKGHNAKLSWTQVETGSSITWKYPSVILKGDNTVGEFYSVALTNNHKQADTGTKMIHL

SEQ ID NO: 92023 - protein, 265 aa, Unknown
  Obtained from environmental sample
  misc_feature (1)..(265): Xaa is any amino acid
VFESFWTGMNRNYIFWDIDPTDWDAVYTTYKPKFAELDIRKEEDVVKGYNYFREITKDLIDGHYHLTINNSYATILQRAGYDGYISPLRARKLAQSDYQDHSSLYNYIFYQLPTIYLKNSFQSITTIEGRNLSTVLGKVNTTEKNICYFYFNRFRFTGYFYSGGENYLDYTPIRDILEELANTLSDPSLDGVIIDLRGNGGGYVNDLNILWGSLLMGNEFMGGYNRMKIGEGRLDYGPRVPFKIRSANYFYQKNIPINPHPVTAP

SEQ ID NO: 92024 - protein, 271 aa, Unknown
  Obtained from environmental sample
  DOMAIN (52)...(120): POTRA domain, FtsQ-type
  misc_feature (1)..(271): Xaa is any amino acid
MTANFSYAPSAKKGAKTRPAVKIEKSLKRILIIAGIIFSAELIWLFGISPFIPFSVIEVNTLADLNRSDILQAASIDETSSFMSTNVKEVQRKLSNIILIESAKVTKRFPDKLTISLIPRKPVAVTLASLNGRQTPLFIDRQGVFYKTGDLLSGDSSELPILSGLDNPQVFMQLPASLAPLTEKISVIAAASPELLSAISEIRIEQKSWEGYELVLYPVHSSIKVRIENDLTEEILRYMLLMLNVFEASYNKPQEIDFRSGIGSYKIKENS

SEQ ID NO: 92025 - protein, 286 aa, Unknown
  Obtained from environmental sample
  misc_feature (1)..(286): Xaa is any amino acid
TNIDNNANDQRTPSLGSLCDAVLTLRTPYDDIAEQIEDAAYFEYEQGGLEHAVEQLSGLARFFEGLRNKNEEVSRDLAQVYLLIGQIYLYAGNFEESIAWINNSIVVDDMYPVSYHSLALAFRSIGDESMSIKSLEQEIRVAPGNYYSYLLLADLYEKNGDFARFEDVLRRLLERAPDNVQGLHRLIRHCERVGEGANVDLLRRRLLGNTTGLSRIEAVIRAYHLAQSGRECEAAEFLEAWGEEAPDVSINHLANAHIYGQMGLHSKKRREMSLFRIKNHAREDVM

SEQ ID NO: 92026 - protein, 356 aa, Unknown
  Obtained from environmental sample
  DOMAIN (266)...(330): Oligopeptide/dipeptide transporter, C-terminal region
  misc_feature (1)..(356): Xaa is any amino acid
MALLEVRNLTINIRRGKKFYTAVNGIDFKIDAGEIIALAGESGSGKSLTALSVPGLLSARAKIAGGEILYSSDNGTVDLCKTEEKSLRQIRGKEISMIFQEPRQSLNPLMKVGAQITEALELHNARTGARNVERVYGDMRQGISPNKIPFKNNVTGRTTSKKLALEMLEKLQFPQPDKIMDAWPHQLSGGMCQRVMIAIAAICRPRLLIADEPTTALDTANQNYILELLKQINREFGTAILFISHDISMARHFCSRFLVMYSGRIIEEGPSEAILSSPLHPYTIALAASIPCKENSGKPLANIPGRAPPLEITLPGCHFAPRCPKAQTQCKESLPPLADAGNGRYVRCFFAEGTNV

SEQ ID NO: 92027 - protein, 254 aa, Unknown
  Obtained from environmental sample
  DOMAIN (45)...(254): ABC transporter
  misc_feature (1)..(254): Xaa is any amino acid
MSESSNPIIVIRNLSAAYVSRNFGWFGKKEIKPVLNNINLDINTSEIFGLTGESGCGKTTLARCILGLIDYEGEIIIDGQKQDGFDPGHNIQMVFQDTASSLNPVKKIGWLLEEPLIIKGISYPSVPHSLDHVRASTAAISLRSSIHRLGAKEQRARKVDEMLARVGLDSSCKTRRVHEFSGGQKQRICIGRALMLQPKILIADEAISSLDVSAGAQILNLFRELRDSLGLTIIFISHNTGAVEYLCDRVLQLK

SEQ ID NO: 92028 - protein, 426 aa, Unknown
  Obtained from environmental sample
  DOMAIN (294)...(426): Domain of unknown function (DUF323)
  misc_feature (1)..(426): Xaa is any amino acid
MKYFPLVQVFLFLFGLFLSVPAVSQTAGPRYALVIGNGAYRHVDSLPNTVNDASGIAKKLSGLGYSVEILFDSDLAGMGRAVSAWIRQLSTDRASEGFFWYAGHGMQVSGENYLLPVDINAEDEAGIVYGSYPLGRILLSLEQTARNKLNVVVLDACRDNPFKNLPGGSRGLSRGFVTVEHPPQDIFVMFSTSPGTTAADGDNGQNSPFAEAFLKYMDSDEILPVMAGLVTRETMRLTGGKQRPYQNGSIVSELYYSLSSGAPARDLPAGSSSASLSAAPSGAPAGNPPSVAVPSPVMAAIPAGNFFMGSPVIELDRDPLGETRHRVNMSAFYIASKELSVGEFRRFVEDTGHITTAEADDGAQAYDEAKNEWVFRAGANWRNPGFRQGDDHPVVCVSWFDAVKYCNWLSAKEGLKPAVYHYRPNR

SEQ ID NO: 92029 - protein, 169 aa, Unknown
  Obtained from environmental sample
  DOMAIN (1)...(161): Alpha-L-arabinofuranosidase C-terminus
  misc_feature (1)..(169): Xaa is any amino acid
DRVKIGCMTGGLGTLAATDRLNVWKRAAYYPFTQFMKYGRGVSLRPAVECDTFDIPGYAIQHQFQYRTHEGIGYIESAAALDDQKGELNIFVINIDWENDRQVELNVDGFKGYKLIEHIQLYSDSIDAMNTFENPNNVIPSVNPDTVLRDGKITANLKKLSWNVLRLAI

SEQ ID NO: 92030 - protein, 502 aa, Unknown
  Obtained from environmental sample
  DOMAIN (129)...(304): Integrase core domain
  misc_feature (1)..(502): Xaa is any amino acid
MEKAKEILRLSLHMGLSQREVAANLRFDGTGCSLGMVNAVLARVKEAGVADPLSLDTKELGSIIYPPEHGGRKEEPDFPYIDKEMKKKGVTLFLLWEEYKVRHPEGCMYSQFCAKYREYRKQNSVYMRKVYKAGEQMLVDWAGLTMKYNGGGGTEKTAYVFVAVLPASSMLYAQPLADMKMESWIEGHVNAFEYFGGVPRLLVPDNAKTAVTKANRYEAELNKTYKEMAGHYGCAIVPARPYSPTDKAPAETGVQIVERRIIAKLRHTKFFSLEELGEAFRAELEALNDRPFQKQAGSRRSVFLSTEQHELMRLPARRYEYARFKQAKAGFDYHVALDKEHYYSVPYQFAGREVHIRSTSRTVEVFCEGGTDSMPCAQHGSPQTFHYRAFPHAENHRAVADWSPERFMSWAAKTGDKTKAYITWLLERKEHPQQAFRTCAGILRIGATVTPQRMEEACALALERNVYSYSYFAKLLENRKPGTPLVHENLRGKDYFTGGGHV

SEQ ID NO: 92031 - protein, 381 aa, Unknown
  Obtained from environmental sample
  DOMAIN (239)...(378): ATPase family associated with various cellular activities (AAA)
  misc_feature (1)..(381): Xaa is any amino acid
VFKGLTQRVQRILSTKAQEEAQRFNSDQLLPEHIIIALLKDGDGTACKALVFLRIDLQEFKNSLESAIPRIPGLTIHSDVPPSKRTKNMLDIATEEARIMGSEFLGTEHLLFAAMREQDSSVQVYLNQRAVDTDMMRVIIQTTFNQSSASRKDDYVPLERFQPHFINRERTAVHHRTGVETDRQPRIKPAPFPVLTPVLDAFSRDLTALARAGKIDPVVGRKAEINRAVRILARRTKNNPILVGEPGVGKTAIVEGLAQLFVSEAVPDALAGKRILCLDMGLVVAGTKYRGEFEERIKKILREVSQAGNIILFIDEIHSIIGAGSAEGTLDASNMLKPGLSRGEIRCIGATTLAEYRKHFEKDAALERRFQAVVVEEPSFD

SEQ ID NO: 92032 - protein, 407 aa, Unknown
  Obtained from environmental sample
  misc_feature (1)..(407): Xaa is any amino acid
MDDLRYRISGEARPALIKGSLGSSDVSLFATGSWMGDLSVNFGVSRSELGLGFASPESPLLFKQEVDLTLSLWINKRWFVEADFADDSAQNTYKAGYQGQPGEFLQYAVVGNAGLDFPSFPYLDLGGDSPSSFGLYGRFGTSELGIHTLVRYDAASREEKVFTGGRERTYSDLQPQNTMRGISFVLPDTDLNPEITIYIEDDKGAVRDSTGRRWRYAVQSEYAFSRTHGILELSIRPSGMVAVAYSKGGDNNPWISSMGSYDGTQKGFLTDVQNWFGSSVDLSSYPQCGNGAAMPDKVDFAMGPALVVYQPGMFSPFEKRNRYDAPSSFAEKAALVHPSSGSEINGFELILLENTAVTDVTLFPGIVSQKGVYELVSTAGYNDLRSPAVCFPLAVGYPEIYLPSSAV

SEQ ID NO: 92033 - protein, 55 aa, Unknown
  Obtained from environmental sample
  misc_feature (1)..(55): Xaa is any amino acid
DVWAQDNQYGKRINAGLKGVRFVGDGDAFAGTGAANADDFDDIAVGSGNSVADYL

SEQ ID NO: 92034 - protein, 344 aa, Unknown
  Obtained from environmental sample
  misc_feature (1)..(344): Xaa is any amino acid
MKKFFIDIETYNESVALRTRGLYRYAENAEIMLVGYALDDEPVCVWDAVNESTPGVFMKIANSIDENEYQIVAHNAAFERTIFSKQDGIFKALHDRKNWHCTMAQALAHGLPGGLQYLSDIFKLSGDKAKDPEGRSLVNLFCSPRDGKRATRSSHPDEWEKFKEYCRRDVEAERALYYKLPAWNCNQSERAIFNLDYEINSRGFMVDVALAEAAVAIVKKEKQSRDNKVFELSGGRVTAGTQRDKMLEHILKEYGVTLPDMTESTLTRRLEDPDLPQAVKELIALRLASAGTSARKYQALLDSVSSDRRLRGTLQYCGASRTGRWTGRIFQPQNLPRPSFGNDE

SEQ ID NO: 92035 - protein, 405 aa, Unknown
  Obtained from environmental sample
  DOMAIN (6)...(198): DEAD/DEAH box helicase
  misc_feature (1)..(405): Xaa is any amino acid
VKFTPRPYQRLIAEHILEHPRCGVWAGMGMGKTAATLFALNILRYIDYNPTLIIAPLRVATSVWPAEARKWDDFRDIDIVPITGSVADRRRALQIPTEFHTINYDNLPWLVDEVGGPEGWRWKTVVADESTRLKSFRLGGHGGQRARALSKVSFGSDAVADLFDKKKEGKLSDVKRFAYIERFIELTGTPSPNGLLDLWGPLWFLDKGARLGRTFTAYSRRWFAPKHPFSQELAPFPHSAKEITEKVTDICLSVRAQDYFPLKEPIVVDVPVELPFKARKIYDAMEREMYAELSTGTAEASMAAARTIKCLQIANGAVYLDGGGYEEIHDAKFAALDDIIEEASGAPVLVAYHFKTDLIRLKARYPHGRGLGKDASVINDWNAGKVPLLFVHPASAGHGLNLQDG

SEQ ID NO: 92036 - protein, 247 aa, Unknown
  Obtained from environmental sample
  misc_feature (1)..(247): Xaa is any amino acid
ETFKRQLDEGKSIEEIAKYYARTVSAIYHRIRLTNLIDGIKVMFRDEKINISGAALIASLPSEDQEKFLKKYENKKPNPWDISGFIHSVQKHTLKFIADKKCEKCKNRTHNTTPGLFDDFNSLEDVCFDGECYAKKWLGFIGESIVKQGIETENNLIIDRDIPDFIPKKTKTVTIGAIEYDLLSPNEYKWQETKKKSSSKTAWLLSKKWNGGTYSIEVTRVAYEKSEQQANHRTSYAEDPVKDFMVD

SEQ ID NO: 92037 - protein, 475 aa, Unknown
  Obtained from environmental sample
  DOMAIN (12)...(150): ABC transporter
  misc_feature (1)..(475): Xaa is any amino acid
VKEVVSEGVQELVNLLQEFDKVSEAFADPDADYDKLGARQAELQEKIEAADGWNLDSRLDLAMDALRCPPASDLVDNLSGGEKRRVALCRLLLKKPDILLLDEPTNHLDAETVAWLERHLREYAGTVIAVTHDRYFLDNVAGWILELDRGEGIPWKGNYSSWLEQKEQRLAQEEKGESDRRKQLQRELEWIHMSPKGRHAKSKARIAQYEKLFLDDEREKIKESKITIPAGPRLGQLVIEAKGLSKAYGERLLFENMEFTVPPGACIGIIGPNGAGKTTLFKIITGREKADAGILRLGESVKLAWADQMREGLEDDKTVWEQLSNGLDIIKLGGENGSGGKEVNSRAYCSWYNFSGADQQKKVGVLSGGERNRLNLALMLKEGANVLLLDEPTNDLDVNTLRALEDAIDTFAGVSLVISHDRWFLDRIATHILAFEDGEVVWYDGNWSEYAEWRREKLGAQADRPHRYVYRRLER

SEQ ID NO: 92038 - protein, 461 aa, Unknown
  Obtained from environmental sample
  DOMAIN (318)...(461): ATPase family associated with various cellular activities (AAA)
  misc_feature (1)..(461): Xaa is any amino acid
APVQAPSASTTAVPFDYVGHDKIRAELEKIKSNIKFQKRRQGAGVGGTIGSKIFVFKGKTGAGKTLVAKHFIEELRRENCLSSEIITSKEARELSKAYADEYAISRFLSETKPAALVVDNATEKPEYIHELILAASKSTQECICVIIGNSEGFDEFFGKNTEDRQRVTQDFNFQDLSLEDLSVILMKKFRERGLLFDPALKKNFLAYIRERKSDPSCEYKNGWLIEKDVIPSIDKNQQARLEKLNSESVTDEDFRTVKAEDLPLKNKPKTVEEILAELDSMIGLAKVKDAVREMAQTIKMQKEREKKGGAKSERLAIHLVFYGNPGTGKTTVARKLGALFQAMELLPSDRIVETDRSGLVAGYVGQTAPMVKAMCDKAMGGILFIDEAYTLSTGGGGDFGKEAIDTLLKRMEDDRGNFVVIAAGYKKEMQDFIQANPGLKSRLPTSLNLRITIPMNYSPSL

SEQ ID NO: 92039 - protein, 308 aa, Unknown
  Obtained from environmental sample
  DOMAIN (2)...(289): Aminotransferase class-V
  misc_feature (1)..(308): Xaa is any amino acid
MALKGFFQEHGERTHIVTTAVEHPAIRNTARFLGGRGAEVTELTVDGDGMLSNGALDSLAINPDTLASVMWANNETGVVFPVRELAEAVKARGGLFHTDAVQAAGKLVIDVKKIPVDMLAFSGHKIHAPKGVGAAYFRKGTPVKAILHGGHQESGFRAGTENVPYIVGLGRACELAAERITDENTRVRALRDRLEKALLEKCAGAKLNGNPAERLPNTTNISFENIEGEAILLHLDEAGIAASSGSACTTGSLEPSHVMMAMGIPYNYAHSSIRFSFSVYSTDEEVDRVIAVMPGIVEKLRGMSPFVD

SEQ ID NO: 92040 - protein, 123 aa, Unknown
  Obtained from environmental sample
  DOMAIN (35)...(112): Bacterial Ig-like domain (group 2)
  misc_feature (1)..(123): Xaa is any amino acid
MKNTLNVLLVRVLGIIALVAVIGFSMTACGDLNVPVSGVTLNKSSISLAVGGTETLTATVSPSDATNKDVSWSSSNTNVATVTNGTVTAVSAGSATITVTTADGGKTAQCTVTVTGANAPTTY

SEQ ID NO: 92041 - protein, 253 aa, Unknown
  Obtained from environmental sample
  DOMAIN (47)...(252): Prismane/CO dehydrogenase family
  misc_feature (1)..(253): Xaa is any amino acid
MDKEILLKVSDGASAAMLEKSHADCVETCFDRSETQKTQCGFGKSGLCCRICHMGPCRISHKSPKGICGATADTIAARNFLREVVGGTSAHSDHGRHLVLQLKAVAQGKAQGYQIKDEKALRRAAKLYGVEEEGRSVEEVALELSNLFLGEFSEQEGFLKTLKLAPKKRQGVWEATGIKPNGVDRMIVEAMHRTTMGVDHDYLHLLHHALQVSLADGWGGSRIASICSDILFGTPSPVKSAANFGVLKKETVN

SEQ ID NO: 92042 - protein, 86 aa, Unknown
  Obtained from environmental sample
  misc_feature (1)..(86): Xaa is any amino acid
MKIVKKILIIVSITVFAIFLILLVTPVLFKGKILKIAKTELNKMLEAQVDFSDLKLSFIRNFPNAYVGLDNLTVIGKGELKARRLW

SEQ ID NO: 92043 - protein, 99 aa, Unknown
  Obtained from environmental sample
  misc_feature (1)..(99): Xaa is any amino acid
MSEGPVTFYEGTDPTGGSLHIGHMVPYFAFRHLRDAGHKGIALLGGGTARIGDPSGKSEMRKMLTYEQLDANTEAIRNQLDRFVSFDDTSAWTVNNKDW

SEQ ID NO: 92044 - protein, 185 aa, Unknown
  Obtained from environmental sample
  DOMAIN (12)...(48): Sigma-70 factor, region 1.2
  misc_feature (1)..(185): Xaa is any amino acid
MNRMWNRKAENDDLLQIYFDQIKTYPLLERDKELELARHACDGDKDALQKLVKANLRLVIKIARSYTAPDIQFMDLIQEGNMGLMHAAEKFDYKKNVRFCTYAGWWVRQFIIRYLANKHRMVRLPHRKEEMLRKVQRTYHSLSQTLMHQPRTEEIAGELGIPVKDIDFILNMSCGILPLEIDSGK

SEQ ID NO: 92045 - protein, 280 aa, Unknown
  Obtained from environmental sample
  DOMAIN (1)...(277): DNA methylase
  misc_feature (1)..(280): Xaa is any amino acid
DYDDNLEHTIWLSIMYPRLELLRELLAKDGSIWISIDDDEGHYMKVICDEVFGRNNFVANIIWQKKHTRANDAKWFSDNHDHILCYARHKETWRPNLLARNESSLGNYSNPDNDPRGVWASGPCHAKTPNEKDIYEIITPTGRKIFPPPGTSWRFNKTKIAELIADNRIYFGEKGNNIPRYKRFLTEVQDGFVPLTIWPRDEVGDNQEAKKEVKEFNANEVFSTPKPERLIERVIMLSTQSDDLVLDSFLGSGTTAAVAHKMGRRYIGIEMGKQAKTHCV

SEQ ID NO: 92046 - protein, 459 aa, Unknown
  Obtained from environmental sample
  misc_feature (1)..(459): Xaa is any amino acid
NSKTHPAALVLRTLALLVFIYQIRLLATDMADTSFFIVSLAGALTVAFFLNQKIQEKVFGYSSHFQNSVSFENGLRKTVQKAGFSSKSKVAFPKTEVLEKPHYVRPLQAVIVIALVPWAIRLFIALPRWFVPGVSGPAVILDSLLLNLDRNYFSTLLPFYWIAITTYFSSRSRLFLRADIIAADTFFLVLFSIVSPFSIEAYRWPVLMIGLFALAFFLQILAFVFSAPPEFKLRKKEGTFAALVLFLLVFAGGALFVRPFQEKAVDRGGGLLEPKLFRFDFSQVIRLESEISVNDDLILIAKKDPYDSHILLRRYTLSAYNPRQGFFRLGDVDEAAHPQSLPSRRTLLQTEEINNFRVNEQEYYIVNFDSSAFIGMNMPVEIIPFETWDASSFNSAYAVVSYTSEVFPYTIMRSVRGRDWSESLGLKPEEYALYTEHGGDEAIAAFAREIVSSPINGSM

SEQ ID NO: 92047 - protein, 416 aa, Unknown
  Obtained from environmental sample
  DOMAIN (1)...(162): HMGL-like
  misc_feature (1)..(416): Xaa is any amino acid
VFDACNDPRNFEAATKAAKKTGKHIQATISYAVTPFHTIEKYAEFAKQLVNIGADSICIKDMAGLLKPYEGYELVKAIKKVTALPVEVHTHATTGMSVATLVKCAEAGAEILDTTISSMSMGTSHSPTETMVEIFKGTEYDTGLDTNLLLEIAAYFREVRKNYKKFESSFLGADTRILVSQVPGGMLSNLESQLKEQGAGNKIDDVLKEIAVVQKDAGYPPLVTPTSQIVGTQAVFNVLFGRYNRLSGEFQDLMVGKYGSCAAPKNPDVVKKALEALKMEKEITYRPADDIPPEYAKLEEEAKKVLGTSTITTEDVLTYAMFPKVAPNFFKTRANGPVVFKAEDAAPAPAAHAPGQAEKYNVNVNGTDYAVVVSPAGTVAVTAPAAAAATCAPPATFTTEDRESYRPVKGRPADSR

SEQ ID NO: 92048 - protein, 412 aa, Unknown
  Obtained from environmental sample
  DOMAIN (58)...(366): Pyridoxal-phosphate dependent enzyme
  misc_feature (1)..(412): Xaa is any amino acid
EAGKDTYTCTKCGGVLEIVLDYDYIKTQISREKFSGKKDFSMWRYLEFLPVEEGARLGPLRVGWSPLYKADALGEILGLKNLYIKDDGLNPTSSLKDRASAIAAARALQAGKDTVACSSTGNAASSLAGAAASLGLKSVIFVPERAPQGKLTQLLIFGATVVSVKGDYAATFRLSAQAIEKYGWYNRNAAINPYLSEGKKTVSMEIAEQLGLATGGFTAPDFVAVSVGDGCTIAGVWKGFKDLYATGLIDKLPRLISVQAEGCCPINRAVQNNTAIEKMEENTLADSIAVGVPRNGDKALAAIRESKGIAVNVSDDEILVAMQLLGKSAGVFGEPAGVAGTAGLAKAAANGLIPRDALVVSIVTGNGLKDVASAQKAAGINGGASGSAAAANLIRIEPDMALLIKEFAKRGI

SEQ ID NO: 92049 - protein, 260 aa, Unknown
  Obtained from environmental sample
  misc_feature (1)..(260): Xaa is any amino acid
MMVNALNRNLQAAIIIDAHERLQLMLDAMPLCCSLWDKDLNIIQCNEAAIKFFHMKNKQEYLEKFFELSPKYQPDGELSSVKAAQFLKKAFEYGSCIFTWMHQMQDGTPVPSEITLVRVSYGDEYIVAGYTRDLREYEQMMKGLEQRDLMLQTVNHVAYILLQSEAEEFKNNLLHCMGMMAGAVNVDRVYIWKNHTKDGRLYCTQLYEWSEGAEPQQGSELTENISYDEGFSYWKETLQAGRCINGPIINLSREEQENLS

SEQ ID NO: 92050 - protein, 364 aa, Unknown
  Obtained from environmental sample
  DOMAIN (27)...(317): ABC transporter transmembrane region
  misc_feature (1)..(364): Xaa is any amino acid
MKHIPKAAFLIPVLEKLFRLLTHRHKIYLIILFVMTVGFALIETLGISVIMPFISMASDPDLINSGWYRKAYDIAGFTSPESFIIGLGIGIICFYVFRGAYSFVLAYTMNRFSYGLYKHFSKKVFKTVLSVSYRLYAVNNSAELMRTITNETIEISRITLNVLQLCSEVFTVLLVYAVIILLNWKMTLIISAVLLIIVLLLLAILTKENKIQGAKRLASGRKMNRTLKETLGNYKYVKLKGNEENILSAYDATVETYTHSEVVNNVLSIMPKNILESIGFSFLVAVVVFIIWVYHDASKVIPVISMYALALYRILPSIHRMLQNVNSIVYLQKSLEGVDESLRQPVESEGTAPLEFNRSIRLKT

SEQ ID NO: 92051 - protein, 393 aa, Unknown
  Obtained from environmental sample
  DOMAIN (48)...(342): Glycosyl hydrolase family 10
  misc_feature (1)..(393): Xaa is any amino acid
NGSPAANSEIKINQTNHQFLFGTGGFEAVELAGGKPDGTPIDEDRAAILKEKLDKLFDFNNYTTLPFYIGRYEYIEGKPDEKRLKAAAAYYKQRGIKTKGHPLCWHTVCAPWLMNYSNAEIYKKVIERIERDVSAFAGLIDTWDVINEVVIMPIFDKYDNAITRICKEYGQIPLVKEVFTAAKRANPNSVLLLNDFDISKDYEILIDKCLQAGIPIDVIGIQSHQHQGYWGAEKVRDVLERFSRFGLPLHFTENTLISGEIMPPHIVDLNDWQVEKWPTTPEGEDRQMREIVEMYEILFSHPKVQAITTWSGSDDAWLHAPAGLLRTDNSEKPAYKALRDKIENEWRTVKNGRTDANGCLELEGFKGAYEVSCMEKTALFELNGNDTLELRLI

SEQ ID NO: 92052 - protein, 538 aa, Unknown
  Obtained from environmental sample
  DOMAIN (225)...(409): Peptidase M16 inactive domain
  misc_feature (1)..(538): Xaa is any amino acid
MKTNGKFNQLPLILCSVLLTFFILTCVSVSTSNYANLGKGGDIIPLTSRALTGKLPNGLRYYIMENSLPENMAQLALVVNAGSVLEREDQRGLAHFVEHLAFNGTKNFPNKDIIEYFRSLGMRFGGDANAYTSFDETVYHFDIPIENVGGVKRIPDKALAVLNDWTYAISFLSEEVTNESRVVLEELRSRSDAMDRVRKKIFPILFAGSAYAERQPIGLAEIIENATSENVREFYERWYTSDNMALVFVGDFDGKKLEAQLAQKFTMPSASKSVNRPLLELPPPKNGNFKVEIITDPELTSTNFMIYYKMKKGAQRGTLGYYREFIIDYLIDYMLSLRFEDAQSDPQSSANESWGGVWRWSSNARFYSMGTEPKTGRAQDALRELLREKESIIRYGFTEIELNLAKMDIVSYMEKLVSEKDKTESRRHVRNFTNHFLYGDDMADVEWEANAVNALLPGIGLKDVLQTARNYFSANDITVFLISPQAEAENLPTAERIKSIFRETQLTNISPKQNNLLSGDLMDKAPPAGDITSENMIR

SEQ ID NO: 92053 - protein, 358 aa, Unknown
  Obtained from environmental sample
  DOMAIN (1)...(352): D-mannonate dehydratase (UxuA)
  misc_feature (1)..(358): Xaa is any amino acid
MRMTMRWFGPGYDPVTLDKIRQVPGISGVITTLYGIPPGVEWKKEELFALKKLVEENGLVIAGIESVNVHDEIKTAGKERDKYIEKYINTLKLIAQADINLVCYNFMAVFDWTRSDLAKPRPDGAFVMAYQQELIDKVNPENMFDVMSEKARGHLLPGWEPQRMADIRKLFELYGNIDEAALFENLTYFLKAIMPTCEQYGIKMAIHPDDPSWSVFGLPRIMKNEEDLLRLVKAVDNPCNGITLCTGSLGSSPTNDIPSIIRGLKGRIHFAHVRNVKHNAPGDFEESAHLSCDGSLDMYAIMKALYDTGFDGPIRPDHGRTIWGEVSMPGYGLYDRAIGLSYLSGLLEAIQKKIKNKK

SEQ ID NO: 92054 - protein, 54 aa, Unknown
  Obtained from environmental sample
  misc_feature (1)..(54): Xaa is any amino acid
AYTEPAVKGDTGGKVLKAAKVDTGLEVQVPLYCNIGDKIKVDTDTGEFVSRSNA

SEQ ID NO: 92055 - protein, 215 aa, Unknown
  Obtained from environmental sample
  misc_feature (1)..(215): Xaa is any amino acid
MRIQDALIKLLMIQPFYGALASVLSIKESDAVKNKEMSLLPSPSLKYNRKWYEELPDAQAVGALMHELLHLLLLHALRQGGREPLLWAICCDMAANDHIPCEMLPDNAVTTEQIELIVKCKLERMRSAEYYYNKLSGLPENSISLLKHEGAVTLPKVNGSMMEADIQKEKDIDNVNEAALKNKLHEIVETASQNGELPPDLLQKIEEIEKQDDEL

SEQ ID NO: 92056 - protein, 541 aa, Unknown
  Obtained from environmental sample
  DOMAIN (152)...(522): Surface antigen
  misc_feature (1)..(541): Xaa is any amino acid
VEADLQSVSDLYYENGYIFNTINRDERKNPVEGVVSYHITIVERGRAHIENIIVRGNDKTKTEVILREIPLEPGDVFSKTKVMEAWRNLMNLQFFTMVTPETPIGSEDSLMDLVFVVEEQPTTDLQFGLTFSGSADPETFPVSGLIKWNDRNFRGSGNQFGAELNGNVNDTASLSVNYNQRWMFGLPFSGGFDFTAQWSKRLAAMNNNPPIFNGNETYAYPDGFVSRDEYNSAYKLPPREFLMEYNQFYLSLGFSTGYRWFTPAGILALGGGVRTGLIRNEYDDDIYRPFDPALRERHNEWTPKNSIWTTLSLDQRDIYYDPSRGYYAYERFGIYGLLWKDSSGNEMEREYYLRNDVKAQYYFTLFNLPVTEKWNFKAVMAFHSGLSFIFKQPGRHQDRLTPLIEEANQLSIDGMFIGRGWNSEFRNKGLLLWENWVELRIPLITGILAWDFFFDAAGVETVQGFYFGINNEGKKNFTIDNMRFSFGGGLRFTMPQFPLRFSLAKRFRTKDGEFIWEQGSMFRNDDPRSGIDPVLSFAISY

SEQ ID NO: 92057 - protein, 328 aa, Unknown
  Obtained from environmental sample
  DOMAIN (1)...(187): MutS domain V
  misc_feature (1)..(328): Xaa is any amino acid
MITGPNMAGKSTYLRSAALITLMAQIGSYIPASQGRIGLCDRIYCRVGASDNLARGESTFLVEMNETAYILNTASEKSLVIMDEVGRGTGTNDGLSIAWAVSEELLDRVKCRTFFATHYHELSLLAHPRIVNRSMEVVEKDGGIIFLRRLREGPTAESYGIHVARLAGLSPSVLDRADQIMSRLRTMSNEQLAMSNDKIKEKREERKKEDDKQIDYVNLQDNKVNKDIIVNCQNNRVNKEVMPGKTKKNVENPEFTAVLREIRFLDPNKITPLEALRLVNEWKGRLAGYSPETLANGDPVDPPSVRPPAMNKKSQSSKDADNTPSLFD

SEQ ID NO: 92058 - protein, 181 aa, Unknown
  Obtained from environmental sample
  DOMAIN (123)...(145): MORN repeat
  misc_feature (1)..(181): Xaa is any amino acid
MIEKDLNKYLIWKGQGVKNGIGKEISSDDVYEGDLVEGKRNGKGKIIYANGNVYEGDFVEGVKNGKGVFTWTDGTVYVGDFVDDKRTGKGKYTFASGNVYEGDFVDGNFHGKGKMTDSDGDVYEGDFVGDKKHGKGKYTLTDGRVYEGDFINNEPHGKGKYTYPDGSVQKGNWKDGKFVVK

SEQ ID NO: 92059 - protein, 518 aa, Unknown
  Obtained from environmental sample
  DOMAIN (361)...(439): Group II intron, maturase-specific domain
  misc_feature (1)..(518): Xaa is any amino acid
VNRGEVNTIKGTNVPRTANLEEKRDALKWEAIDWAAVEQFINKAQTRIAKAMAAGNKKLARELQRMLIHSHYAKLWAIRKVTSTKGRRTAGIDNEKWDTPAKKWQAVSKLKEKNYKAKPLKRVYIPKKNGKMRPLSIPTMDDRAKQALEALALDPIIETTSDIHSFGFRKGRSSHDAREQLFNSLAKKKSAEWAVEGDIKACFDEIAHEWLIQNTPMDKTILKEFLKAGYVYEKELFPTERGTPQGGVISTILANHTLNGLDKHLEDTYKREYAGSGATYRLVVPKVNLVRYADDLIITAPTQERAEHVKETVKQFMAARGLQLSEEKTLITNIADGFDFLGWNFRKYKGKLLIKPSKKAQQNVMEKIRKVIDLCKARTQDELIGRLNPIIRGWCNYHQGTVASGIFSRINHEIFKALWRWACRRHPNKGLRWIKNRYWKNEGNRRWVFKDNLTLLQTCDTKTVRHTKLKLDMNPYIDRDYFYFRKLKMLANRNLGTARKHNADKPGEHPKDGHLFEA

SEQ ID NO: 92060 - protein, 413 aa, Unknown
  Obtained from environmental sample
  DOMAIN (130)...(306): Integrase core domain
  misc_feature (1)..(413): Xaa is any amino acid
MAKYREILRLHSQGISNRDIAVSLECSRNTVRRVLEQAKETGIQWPLPDSMSERALEEALFGKRALSLKCKIPDFEYIHKELAKNGVTLSLLWNEYCENCRMECSRPLMYTQFCYHYQRFAAQNKATLHIEHKPGERMEVDWAGDAASIADNVSGEPIPVYVFVAILPCSGYSYAEGFLNRNMESWITAHVHAYEFFGGVTRILIPDNLKTGVEKADWYNPIINKTYHEMAEHYGTAVVPAGVRQPKAKASVERAVGMLSTGITAALRNRQFFSLWELNEAMRQKLTDFNRKPFQKKPGSRESAFAEERPFLMPLPSKPFELSTWKIATVQFNYHIAVDKMNYSVPYEYIKHKVDVRLTQRMVEIFYQGKRIASHIRLYGHCGQYSTTTEHMPEKHRQYTQWNAERFIRWACD

SEQ ID NO: 92061 - protein, 212 aa, Unknown
  Obtained from environmental sample
  misc_feature (1)..(212): Xaa is any amino acid
MEDVLAVYERPYDENAPVVCMDEKPYQLLGDTREPLPMEPGTVRREDNEYKREGTCSIFIFTEPLSGWRYAQASARRTKKDWAHYIKWLLDEQYPGTYKIILVMDNLNTHVISSLYETFPPEEAFRLAQRLEIHYTPKHGSWMNIAEIELSALATQCLGERRIPDMVTLNEELAAWYTRRNQSQKGVDWQFTAADARIKLNVYFSPREPLVR

SEQ ID NO: 92062 - protein, 152 aa, Unknown
  Obtained from environmental sample
  misc_feature (1)..(152): Xaa is any amino acid
GKESIKLKKKERTELERYCNNGVRSVRLVNRARIILALDTAGGRIADRQESIAERLGVCRQTVNTVKKDFLAAENITKFLQRKPRATPPVPPKITGEMEARIIALACGPAPQGCAHWTLRLLATKCVELCYSDTMSHMTISRLLKKRNLNHI

SEQ ID NO: 92063 - protein, 283 aa, Unknown
  Obtained from environmental sample
  DOMAIN (141)...(283): metallopeptidase family M24
  misc_feature (1)..(283): Xaa is any amino acid
MDRRTAERRLSALRVYLNKKGLDGALISSYENRRYFSGFTGSNGYLFIDKTGEKLVTDMRYTTQAKKEAPGFTVLEYPPAERLDFAAKVSKDLGLRSLLMENNMTVGEYLALKEKLGDIRIEFEGEWYLELRMVKDETEQALIRETIRRAEAGFEKLIPKLFIGMTEKNLADELHYLVAKEGAEAMSFGTIVASGPRGAMAHGIPTDKKIDDGEMVVVDFGAMVGGYCSDMTRTLLFGSVPEERKKVFDIVLEAQQAAIAAIHPGVLAKDVEEAHREIFRRYG

SEQ ID NO: 92064 - protein, 251 aa, Unknown
  Obtained from environmental sample
  misc_feature (1)..(251): Xaa is any amino acid
VFKKNTDKIRTVCDLLEDDCSKDIYTHLIQSRINNIPILESLVSNDSYFVLPQFLELSYKEVFIDIGAYVGDTVEQYINKKSGVFGKIYAFEPDALNFSALTHRSIRLKNEWALADDRLTIIRGGIGAKTELKLFAVPQNQSSFSARLEANFVTDKTENAAEVTVYAIDDYFKEQYVSFIKADIESYESDMLRGAESVIKRDKPLLAVCIYHNASDMFTIPLFIKELCKDYKFKIRQHSYRFDETVLYAYI

SEQ ID NO: 92065 - protein, 118 aa, Unknown
  Obtained from environmental sample
  misc_feature (1)..(118): Xaa is any amino acid
MEEGKMEVSSFFTFPFSLFPCGSVIAVVGCGGKTSLIELVADRLRDKKVLISTTTKIFPPKMKDIVLCETLGQCEGHEPRTGVQCMGLLNRASGKLEALPEALLARLRTRYDIVLLEA

SEQ ID NO: 92066 - protein, 421 aa, Unknown
  Obtained from environmental sample
  misc_feature (1)..(421): Xaa is any amino acid
MSGTFKDLQVPPTLVSFALAPVDVTRVISPEFKRVGSAVVFVSIWVDEVGMPDFEVINRCYSAVHKGIVDGQILAVHTVGRGGISEAMAKMCFGNRIGFKIDEGVNPAELFKPDYAGLVVELDKRVNTDRNVLGIGENCTILGSTIEDKKIVYHNVQIDIDDLYEKWDGVLEGVFPTRAGTGESGGHIYENFLDGINTDTDINANDYPSHKKAKIKVAKPRVLIPVFPGINCEYDSARKFARAGAECDFFVFKNINPQDIDESVKIISEKIANTQILMIPGGFSAGDEPDGSGKFIAAFFRNPRVKDAVSEFLNNRDGLMLGICNGFQALIKLGLVPYGEIRDLREESPTLTFNTIGRHISRIVYTKIRSVNSPWLSNVKAGDVHAVPISHGEGRFVAPASEIKRLFLNGQVAAQYVDYNG

SEQ ID NO: 92067 - protein, 296 aa, Unknown
  Obtained from environmental sample
  DOMAIN (80)...(224): GAF domain
  misc_feature (1)..(296): Xaa is any amino acid
FTRGELWGAVAFQDHTNDRYFDEGCQDLLYSAARIFSNGIIGAEMTHNVKEAIKALKRREEMTSALNRAAVRFLSQSEESFENTMTAGVREIADVFNLDRFSLLRNLTVVDGIRYGGQIYRWDRKSGGTTAPIKGLESFYPEQYVPNWGKIFISGGTINGPVRLMPEADVLLSFGLVSICVTPVFINNTFWGIAFFEDLHTERFFEDDSVEMMRSAAFLCATTFIHAEMERKLASAHEFTRAALDASPVSFAVFDEDAHVIDCNDANLNILGTTKKYYVEHFSEFSPEYQSDGVKS

SEQ ID NO: 92068 - protein, 274 aa, Unknown
  Obtained from environmental sample
  DOMAIN (1)...(195): Domain of unknown function (DUF323)
  misc_feature (1)..(274): Xaa is any amino acid
GLLPYEKPTRLVTLGDFYISRYEITQKQWTALMGYNPSVWQGDDLPVENVSWDSVKVFVDKLNAMIDTGYWEYRLPTEAEWEYAARGGAASSGNAYSGGGWYGGNSGGQTNPVGSKEPNELGIYDMSGNVWELVGDRYGDYDTSARIDPSGPAWGSYRVMRGGGWSSGARACRVSRRMSVSPVFSSNDVGFRLAIGARKRISVSQQMSQLALIEPTHVKKIIKDEPPPRMPAKDSTLKAERSLGYVHKWEKEISVGIGGFYSGDYGGGIAWANR

SEQ ID NO: 92069 - protein, 199 aa, Unknown
  Obtained from environmental sample
  misc_feature (1)..(199): Xaa is any amino acid
MYFSAKRTAAIVLVAVVLCLTVTAVSRAASPDRAVVTFRAGANGTLTASVDGVPIASGDSVSIGKMVVFTAFPAAGYGIAHWTVNGAAIADTSMRTFMVGISNAAPVNVTVSFERTSPCAAVTFRAYGGGTVTASVDGVPIASGDSVSVGKNVVFTAVPDKENGKVRWTVNGSEISDTLMYTLVVGISNAAAINVTAVL

SEQ ID NO: 92070 - protein, 1210 aa, Unknown
  Obtained from environmental sample
  misc_feature (1)..(1210): Xaa is any amino acid
SGSYTKGAEVEITATAADPGKVFDKWTTLSGVVFVPDSSASSAKCAMPPKNVTVTALYRDTTYKILFMAEGGTVSPDSGRTVAGTGRLASLPTPTRTGYTFSGWFTDGGDRVEITTPFRADGAIFARWTLPVYKVTWVADGGAPEPTQDTVSYIGSIAAPDSVIRKAGHVFHGWYRDSTLLDTAKFPIKNVTSDITLYAKWEINSYVVLWWTNGGTSAQFLVSAVTYGGSIDSAISAGSKAGFAFDGWYLNDSLTAPATFPVTDVTGNKAFYAKWIPAYTITFNANGGTMPSGSHTSAVTGAGGRLDSLSLSVTPTRSGYTFDGWYTDTTYITKATVNTVFSGPTTIYAHWVPITYTVTFIIPTGGTATPSSIIVGTNGKLPYWPATTPPNSSNNYVFDGWYTTNTYVTKVDTSTVLFTSNTSLYGRWITVPIFAITFNPAGGTVSPAVGVTGPDSTLAISLPVPEKSGYTFNGWYTEPEGGARVTSSTKFTASGSIYAQWTTGPVSYTITFNPNGGTVTPTSGTTGTGGVLTSLPTPTWSGRNFEGWYTTRTAGAKVTQTTPFTSNDTIFARWTLATYTITFLPNGGTVNPTSMIVSGDNGKLSLLPIPKLNLHAFDGWYTASSGGDKITLNTVFSADAAVFARWIPLYIIRFNANGGTVSIAVDTTGADGKLAALPTPVPANNGETFKGWFTAPASGERVTASTVFTGDATLYAQWSPAAVSYTVTFNANGGLVNPTSRVTTGDGTLAALPTPARENYAFTGWFTSATVGSTEVTTDYVFTGNTTIYARWTPIYTVTFNPNNGVVNPTSAKINAEGLIDGTLPTPTRAGYKFDGWFTTSAATGGLEVTEDYVFSANTTIYARWTLVVYTIIFDANGSTVTVSSGVTGTGGRLASLPTPAARTGYTFDGWFTEEIGGTRVTTSTAFTGDATVYAQWSPIYKVTFDPNGGVVTTASANTGVGGKLTTLPTPTLKDYTFVGWYTEKEGGVRVTTSTVFDDDATIYAQWSLFTHAKVTFSAGVNGTLRATVGGLPITPGDSVAIGKDIVFTAVPNDGYKVAGWTINGAVVVDTFFTYVHAGLSNTTTVSVTFERRVSVASPNREIPSGAAGGDVAAIAPVKALSGVVTVGPNPVRVGGDAAIYWTGGKAVKGSLSVFNAVGQKVAAVNVNGTNKIGTWKVGDVAEGTYLIKGVLKDKNGVRVVVSALVGVVR

SEQ ID NO: 92071 - protein, 194 aa, Unknown
  Obtained from environmental sample
  DOMAIN (66)...(147): Acetyltransferase (GNAT) family
  misc_feature (1)..(194): Xaa is any amino acid
VLETERIKLRRFELIDCERMFYNWANDNEVTKYLTWKPHESIEDTKEILEQWIKNYSKNDFYLWAIVIKDINEPIGSISVVKQSDEINMVHIGYCIGKKWWNQGITTEALKTIIKFFFEKVGINRIESRHDPNNPNSGKVMEKCGMKYEGLMRKADKNNQGVVDYIEYGILAEDYLKNNIEAFEKSHLPSVANG

SEQ ID NO: 92072 - protein, 276 aa, Unknown
  Obtained from environmental sample
  misc_feature (1)..(276): Xaa is any amino acid
AGLFSANNALGEAAAQIAHINVEPDPDGIYRSSPLLYEWEDGFIPSLSLAAAVLFLQVPIEKIELKAGSYLSIPYSEKEIIRIPVDNQGRMFIPYFETWKNDNKRKSFSTVVKAKSNADVFDTVFNDMNNRIAFIAEITADQKDFGPTAFERIYPVSGTHTSIISGILEGLEKRSLIGSVSPLYKILTILLLLTCAFVICNVKKDAKFHLYFLILLAAFSCLVFFRWQYADIYPWYSLPATILFILWAGSFLTRLAHRYREQLLLHSALSRYFPTR

SEQ ID NO: 92073 - protein, 268 aa, Unknown
  Obtained from environmental sample
  misc_feature (1)..(268): Xaa is any amino acid
AYSLSFFHPVPESNTLNYENTLFSKGLLLRTTNAVRDSIYASGNQVLIAQFEELGRLRQQISALRQKEGNNETYIKSLEDKAEALDKSLMQSSAAFRELKADLAINWQSVQKNLQKNEAAIEFVSFQIYDKKWTNTTQYAVLVLRPGMAAPTWVPLCEESTLTELFAKLEGKRPQEQARILYDEYGSALYNAIWRPLEKEMKGVTTIFYSPSGLLHKVPFSAIPVDGKTRLMDKYSLNMVSSTREVTYRNKKAAKLNSAVVYGGLDYT

SEQ ID NO: 92074 - protein, 289 aa, Unknown
  Obtained from environmental sample
  DOMAIN (1)...(288): LytB protein
  misc_feature (1)..(289): Xaa is any amino acid
MGVRRAIELANNHADSPGKVYTLGPLIHNPQALEDLKQRGIEILDEAKLPENLSGAVVIIRAHGISPKTEAELHKRGAAVVDATCPKVKASQLKAASLAKQGHRLFLAGEETHAEITGIRGYAEDGWLQRSDTAGSKQFLQVVSCTEEAESAARLLSEDPEIQNPKTALLAQTTISNEEYHAIGAVISRHFPTLEIIQTICAATKERQDSLRELLDKTDAVVIAGGKDSANTRRLLAIAQVSGKPCAIVETAGDIPPDFFKFETVGLAAGASTPDTVIDEIEQTMSNEQ

SEQ ID NO: 92075 - protein, 861 aa, Unknown
  Obtained from environmental sample
  DOMAIN (609)...(763): ATPase family associated with various cellular activities (AAA)
  misc_feature (1)..(861): Xaa is any amino acid
MNYDKLTIKAQEAINDASAIAQKEDHSQLETEHLLLALLKQQDGIVAPLVERIGTDVGRLTADVETLLKQTPKAFGDAVQLHFSSAASKILAKAETEAAALKDEFVSTEHILIAISAGEGKAAELLKKAGVTKKAILDALRQVRGNQRVTDQNPEGKYQVLERYCRDLTALARQEKIDPVIGRDEEIRRCMQVLSRRTKNNPILIGEPGVGKTAIVEGLARRIVAGDVPEGLKDKKLLALDLGQLVAGTKFRGEFEERLKALIHEVQSAEGKIILFIDELHTLVGAGAAEGATDASNLLKPALARGELRCIGATTLDEYRKHIEKDAALERRFQQVYTAEPSVEDTIAILRGLKERYEVHHGVRIKDEALVAAATLSSRYITSRFMPDKAIDLVDEAASRLKMELDSRPTELDKLERKLLQFSIEKQALSREEDPASKERLAKLEKEIADITAERDAMKARWEAEKVDIQGIRELKQRIEELKIEETRYEREGNLLKAAEVKHGKIPEAQKQLAALANLMEKKRDQAGGSGTAALLREEVSEEDIAAVVSAWTGIPVSKMLSGEMQKYLDLEKALERRVVGQDKALAAVADAIRRNKAGLSDAAKPFGSFLFLGPTGVGKTELAKTLADFLFNDEKALARIDMSEYGEKHSVSRLIGAPPGYVGYEQGGQLTEVVRRRPYSVVLFDEIEKAHPEVFNVFLQILDDGRLTDGQGRIVDFKNVIIIMTSNIGSDLILEEENTGAIRDSLLELLKRNFRPEFLNRIDETVIFNRLGKNEIGRIVDIQLDRLTRRLAERKITLNTSDAAKEFLAERGYDPMYGARPLKRAIQAELENPLAKLVISGKIREGNVSPRTSQATGWFS

SEQ ID NO: 92076 - protein, 218 aa, Unknown
  Obtained from environmental sample
  misc_feature (1)..(218): Xaa is any amino acid
MMIDGIKKIKIIPFIGILSVFFYFLHVILGGLFYEGYNPLAQAVSDLTASNSPSRNIARPFSALYGICAVTFSIGFFVYLKNKINKAVTVSSFVFCIMNTISFFGYTFFPLSESGYANTFQDKMHMIVTVFVVLLTISSLILFFIGFISTKEHKRLGVISIIALLLLMAGAMLINVVPKEYFGAAERINIYTIIIYTGILSLWMKKYIKNNREKTGVK

SEQ ID NO: 92077 - protein, 141 aa, Unknown
  Obtained from environmental sample
  misc_feature (1)..(141): Xaa is any amino acid
MMQSHGKILPFKNNTFDIIFHPVSNCYIEDVNHVWNECYRIIKKGGILLAGMDNGINFLFDDFDKSLEIVNKLPFNPLKNKEQFEKIKNNNVGIQFSHSIEEQIGGQLKAGFILKDLYEDHDSKGLLKDYIPTYIATMAIK

SEQ ID NO: 92078 - protein, 388 aa, Unknown
  Obtained from environmental sample
  misc_feature (1)..(388): Xaa is any amino acid
MSNELISIKAWAEKHSFDQGDTFDYLKGKTLDGVLVKSTNTKVSEVALDSFKGDVLSAQKRKPANKGVKKTKAEKSESSGGKSTLTTLKKIDKPKPASQAKAAPPKEPPAPPPVAEQEPAASVAPPSPPPVQKAERPKPAPEKKQAEKHVAAKPEIHKEEIYEEQEQEQEQEQIEPEQQSVASEPKKTVAFTADVSKVVDPAILARIQKSKQEKASMRNNQRGDKNKGNKNQQNNNRNNGSKQTSATGYSGNLRIQPRQTENKAQAGLQTRRPGFGTTLQDVLSANAPAHKDFLDNRTRGGKGGHGDSRKRGKKGKDSQREREIQKENIEKAQKRVSDVLVSLSKTPVKKVYNKDKIQAEGEEASKVIYVSASVSVGELASLRSSHLQ

SEQ ID NO: 92079 - protein, 381 aa, Unknown
  Obtained from environmental sample
  DOMAIN (264)...(363): Restriction endonuclease
  misc_feature (1)..(381): Xaa is any amino acid
YETLTDILAREPVPGIDKFEVFFRFGTSASKLGLTEQAYRGFSQARTLKQDNFEVNFNLGELEFDRKNYEKAIQLLQAARTQNPDNPAVLRCIGHSLFRLKKPKEAMSIIRKAIELAPDDKESLYTLAECYYEANQVDQAIKIFSHLRADPTMGPSACLISGNIHNEVRRSDLAIQDYEMGLRHEVIRPDILAELRYYLAVSYIKINEIGKALPLLRLLQTDNPSYKDVNVLIGKYQELNANKNLQIFLMASSADFVALCRKIVMTYFAKAKVKIVNISVHKNEWADILAEVNTPKWSDLIMFRFIRTQGSIGELIVRDFHSHLKEVKAGKGVCMTVGAFSEEAKRYTEARLIDLIEKERLSAIMNTVDAKAAALANVKKK

SEQ ID NO: 92080 - protein, 428 aa, Unknown
  Obtained from environmental sample
  DOMAIN (302)...(428): CO dehydrogenase/acetyl-CoA synthase complex beta subunit
  misc_feature (1)..(428): Xaa is any amino acid
MKLLFNRVFDGADEMYAIAEKTVNETLAELGASAPVKLPDTAYLLANIQTYLAKRVTTMGELAACLPDIRKWLADEKARANHRLADAFRAGYATFMAAEAIEACKYAKNPKPYGGEYWGHMSDAEVRELGVPLVTGDIPGFVVIIGPAPSDEEAVDLIKGYQSRAIFVFLIGGIIDQAKRMNVNMGFPVRIVPTGPDIWAVTHIISLVNRAAMIFGAVQPGDREAFDHYSFHRIRAFVNAFDPVADIVVAAGGGAIAMGFPVITNDVKDMWKVPKSLIIQENTKDFIETSLEARDIKIKTANIDIPVAFSSAFEGEIVRRNDTHVDIDSTTMDCFEWVRQKPAQEIEDHSIEIIGKDLDAFEPGAKIAMGIIVEVYGKNMQSDFEPVLERRIHHFINFIEGVMHTGQRDMLRIRVSKNAFAAGFRLKH

SEQ ID NO: 92081 - protein, 389 aa, Unknown
  Obtained from environmental sample
  misc_feature (1)..(389): Xaa is any amino acid
LLSRYGFTQGEAEIAKAALISDMEQTVAEKDRQNSNNYVNAFTQHFLTGESVPDPEWELNAIELLLPGITLEEINERVKGYFSGNDLTVIISAPDAEKASLPKDSEIRAMAAEAQMAEILPPAEGDIRRELLESAPNPLPILSETIDSETGAIRWKLGNGAEIILKETKNKNSEISLYAQARGGTMSASDDTAISAYLAAEMLNASGLGPYSRAELTRALLDKQVSFSFWTQNYLRGFQGGAAVKDLQTLFEMLYISFTEPRFDPEAIKAMLDQYRSSMAFQENDPNAVFQREISRTINRNPRFHPLEKEDLEKADNNAALAFIKKCLNPGDYTFVFTGNLDIPLLRSLTETYVASIPASTPFNAWADIDAGRPSDTTREIKKGREDRS

SEQ ID NO: 92082 - protein, 152 aa, Unknown
  Obtained from environmental sample
  misc_feature (1)..(152): Xaa is any amino acid
VIPGNKTPVAADYDVDNLEQTVGSVTAVIIRPKEGKSTGGVTIYYGMTTTEHGISTELPTAVGSYLVRFDVAAAEGWNAASELIAGVLRIKAEPSTDQTPVAADFNINNLTQTVGNIKAVSITPKEGKSTGAVTIYYAGSTTLPTAGGSYKV

SEQ ID NO: 92083 - protein, 167 aa, Unknown
  Obtained from environmental sample
  misc_feature (1)..(167): Xaa is any amino acid
EGFAAGEKSGYDKAKAVFDAEIAKHKEQMSKYLKQLEDTKKSMINGLEHILLRFCVELTKKIVASELETNKEMISATIKRALSMIADRENILIRVSPGDMEAASGTKDFLSSVTERLENVRIEEDARIAKGGCIIESNSGLVDARLGVQLEEVAELVEKAWESSDMG

SEQ ID NO: 92084 - protein, 330 aa, Unknown
  Obtained from environmental sample
  DOMAIN (31)...(95): ATP synthase alpha/beta family, beta-barrel domain
  misc_feature (1)..(330): Xaa is any amino acid
MIFDTETVSRHFDAYLDFVQAANSIRVYGKVTEVIGILIESSGPSASVGDVCRIEKGGRLICRAEVVGFRKDRTLLMPLGPIEGIHPGMAVAGTGRPLSVQIGDALLGRVLDGLGNPMDGKGPIRATAMRSVFSSIPNPMTRQRIKQVFETGVRAIDGLVTVGKGQRLGIFAGSGVGKSVLMGMLARNCRSDVNVIALIGERGREVLEFIERDLGEEGLRRSVLVVATSDQPALIRIKGALVAASIAEYFRDQGKDVLFLADSVTRLAMAQREVGLAIGEPPASKGYTPSVFATLPQFLERAGTSEVGTITGLFTVLVDGDDMDEPIADA

SEQ ID NO: 92085 - protein, 592 aa, Unknown
  Obtained from environmental sample
  misc_feature (1)..(592): Xaa is any amino acid
TLAYGGDIEFKRIDTPQNYLINVSLSEVRDGENILEIYAEDIYGEPGEMVTKVFGVSTAVPVTTVVEPSRDIWNKGNIIIHGTSFDRNGIDEIKISMDNGISYQRADVIDNQDRPSLWTISLNTRVYMDGQYSIMIRATDGYGVQSFTSTTINIDNTAPMIDLSAPKNGAPIGRTLEVNGQIYDNLKVKLITILLTDTNNPDTFMVVEPPVEDVILQSLDVRSYRDGDYTLTVTAEDMSGNQTIVIRNIKFIKARAASEIAIINPLSGITHCGTAVVSGRITGAVIPESVELMLNKVKHTDVEVNRYGVFRYELPDYFVYEDGSVGISVAFQTSSGEWVASHENLLTVEKFGPVLDINSHKDGDVITGRPWLSGSAYMFRPPGEIVTRQIKTLYGVAKVEVSFDNGRSFLPAKGTGDWKFRLETSQMEMGILPIIVKATFFNDDIAVRRILLIVDPQAPTVKTMGPVENSGYRATINVFGSTMDDYEMDSVEVSLRPGNKFGYSVPGFIQGLYFDINVLGGANFCAGLGLTFLSDNVKVQGNASQTPSGRYSGWSFGFKVLGNIWSQNLGKWFGPDWAFWRTSFTIGAHFSY

SEQ ID NO: 92086 - protein, 457 aa, Unknown
  Obtained from environmental sample
  misc_feature (1)..(457): Xaa is any amino acid
VSFPVKLSGTPDGPKVYYVRAVDTTGALTVKSYMFLIRNNAPSLEVYTPAPGEIVSDSFMLSGRAEYRGGITKLSYEWGKIKGDITLRPGDPYWSIPLTVAKGASGNIKVTAKDKTGKTVNVTRKVELHTTGGGADIPRQTNIQFVFPTRNEIVRGGKTVLGFIEHPVPIQTIAYSQNGFQFQEVPFVSRAGKAWFSYYCDFSTFNPLSDRLSFRFTDVNGANIDKAPEYTLASEESDGVVPRVILNTPLDGEVITGPFEITGIASGASIETVHWRFLGPKLESITKGEAGKTATEAARAFMANSNPPFEEKTTRQNITIPIDFTMITDGEYNCEVYVQTRDGTQSETVYRTIKISTSAPVTRIITPPISRYSNHMILVRGYSGDANGIGKVTISMDRGLTWQDVTLKDDGTWELPLNTAIYTDRVYSALITAEDMYGITSFATAMINIDNTPPAVF

SEQ ID NO: 92087 - protein, 264 aa, Unknown
  Obtained from environmental sample
  DOMAIN (1)...(229): Cell cycle protein
  misc_feature (1)..(264): Xaa is any amino acid
AGIYKQQILWVVMALLIVVLIISIPARYISNSAYILYGLSLIMLVLAIATGSGVSAKGAERWIMIGGFKIQPSEFAKVGLLLALAKRLSEKPVSLYNLTTLIVPVILILVPFALVLKQPDLGTAMVFCVMALPMFYWSSLTLLDVFYVVSPLISLLLSAIPLLLAFNTGVSWGVFESVPWGIFFIIVVVLLYIFRAPLFIWIGVIAGNMATATITTVVWGSVLKDYQKMRITSFMNPQADPFGSGYQVIQSKVAIGSGHIFGKG

SEQ ID NO: 92088 - protein, 107 aa, Unknown
  Obtained from environmental sample
  misc_feature (1)..(107): Xaa is any amino acid
IGLGLFESVYESVLSKLLTQKGLYVQRQVSIPINFEGEHFDEGFRADLFVNGKVIIELKSVKKITDVHKKQLLTYLKLSNTKLGFILNFGAGIMKDGIFRIINGTLD

SEQ ID NO: 92089 - protein, 548 aa, Unknown
  Obtained from environmental sample
  DOMAIN (17)...(332): tRNA synthetases class I (C) catalytic domain
  misc_feature (1)..(548): Xaa is any amino acid
MKTTTGHWADEAAAKIVFEKGEKELYTCASGITPSGTVHIGNFREIISVDLVAQALRDLGKKVRFIYSWDDYDVFRKVPKNMPKQDELDGYLRFPITMVPDPWERDASYARHHEVDVENTLPKVGIFPEYIYQAERYRSSRYAQGIRKALEKRSELKEILDKFRDDDHKIQGEWWPVSVFCEKCNKDETDIEGWDGDWGLSYKCNKCGNKETLDIRKAKGIKLSWRIDWPMRWEYEKVDFEPAGKDHHSQGGSFDTARHVCKDVYDWDAPITFRYDFIGTKGLPGKMSSSSGNVITLDDVLNVYTPEVARYLFAGTRPNTEFTISFDLDVIKIYEDYDKTERIAWKMENAKDEAAYQKERRIYELSQISVEGKTARLESRKPPYQIPFRHLCNLIQIADGDIEKTLADLAANSGGPNSEQLQAVRTRAVCAKYWVENCAPEEFRFRLLPAGGAASLSQEERGKLRPISELEKNAVRILRDDVICKIEVFADDKTCAAAIYAAAEKAGIDGKALFAAAYQALIGKDQGPRLANFLRVINKQRLLDILKD

SEQ ID NO: 92090 - protein, 111 aa, Unknown
  Obtained from environmental sample
  misc_feature (1)..(111): Xaa is any amino acid
KIFYGYKWFISGYGFTGRDHLRVETAAELAKRARKNYILTEAAKFYHHGAYSLIQLDKIAGVYTDDTIPKDAETALISNNIMLHKVPSADEKINWRKFPGQPPILYTEKGS

SEQ ID NO: 92091 - protein, 396 aa, Unknown
  Obtained from environmental sample
  DOMAIN (1)...(376): Glycosyl hydrolases family 39
  misc_feature (1)..(396): Xaa is any amino acid
SVFYWRGNVTPPKDYAQWNKLVAATLQHLIDRYGAEEVTSWPIEVWNEPNLAHFWKDADRNEYFKLFRESIKTVKSVNKKFRVGGPAICGVDDISWLKDFLNFCRDEKLPLDFVTRHLYNITIPERNGRYGYPKISPLSRAFGETNRSREIIDSYPEYSGMEMHVTEFNTSYSPRTPIHDTNLNAAYIAYQLAYLGDTSESYSYWTFGDIFEEWGVPFTPFHGGFGLVANGKIFKPTYWAYKFFKDLGNGECIHRSENTIVLRKKDGSYRGIAWNIVAANNSPAEEGDKLTLCFIPEDGAFKENEYCVITKTVDEEVCNPLKVWHDIGEPANPSHEQIKLLQSVSPLIATNRCHGAPAIELTLGRNALVYFEIFPAPITSDRGFDYERAVNIEFAD

SEQ ID NO: 92092 - protein, 822 aa, Unknown
  Obtained from environmental sample
  DOMAIN (650)...(738): Hpt domain
  misc_feature (1)..(822): Xaa is any amino acid
LFEISNKQEYIDRFYDLMPAYQPDGKTLEDGIGFVKKAFEEGYCRFEWTHQKLNGELIPCEITLIRVKYKDGNIVVGYTRDLREQKAMLAEIYKEGEKSRTMAHWYKSILNAIPLPISVMDVNSNLTFINSAVEKFLNVSCKDIIGKPCSFWNVNICNTQECGIECAKRGEKHTYFSHEDLSYEVNVEILKSLDNRTMGYIEVMHDVTNLTKMAKKQAEAEAANTAKSAFLAKMSHEIRSPMNVILSITEMLLERDGLSQDMREALNKVYNSGYLLLSIINDILDLSKIEANKLELMPVNYDVANLINNTVQLNVMRFESKPIQFELQADENIPVTLFGDDLRIKQILNNLLSNAFKYTDKGEVTLSVGVEYVGRGGTVLVSLVFQISDTGQGMSGEQIKKLFDEYTRFNMEANRTTEGAGLGMTITRNLIDLMYGKITVKSAVGEGTTFTVTLPQKTDGKGISGVIGKETADKLSQFKQNNSVQANKTRLIHEYMPYGSILIVDDVETNLYVAKGLMLPYGLKIDITESGFEAIQKIKDGADYDIVFMDHMMPKMDGIETTKQLRKMGYIKPIVALTANALTGHAEMFLNNGFDDFISKPIDIHQLNRTLNRLIRDKQPSEVIEAAMKEKIEIDKKRNSNTGFQQADEQIVKIFARDAEKAVVAIKKSIQKNLDNEDDIHLYIINVHAMKSALANIGEKELSAEANKLEQAGRDKDINFLLSETSEFLEKLDKVINEIKKREEKNELSEDSEESLVMLKEKLQIIKDACNDLNKKVIKEELNELRKKAWAQETNELLTSIEEHLLHSDFEEASALIDNYNK

SEQ ID NO: 92093 - protein, 285 aa, Unknown
  Obtained from environmental sample
  DOMAIN (51)...(134): Cache domain
  misc_feature (1)..(285): Xaa is any amino acid
TVVDRGIATSTIGGESGYVIAMDAYPWPWADYDPKDFQWYKGAKDAGGLYWTDLYEDHRGRGPVITCAVPFYDQSRGNRIFKGVARSTVLLSDFSRIIESTEAGRSGRIFILNREGIKIYSSEGAAITVGEDGAIAGDNFLESQNPRQRSLGRSMILGAAGLTELELEGIPVYVAYAPVRTLGWSLGVAVSVQEVSAMAMLIENQIWKIADNTKAGMDKYILISAGIIALLLAVTLIGIIFFAVRFTQSITGPILALNDGVREVAGGKLERAVTVKTGDELEQLA

SEQ ID NO: 92094 - protein, 328 aa, Unknown
  Obtained from environmental sample
  DOMAIN (1)...(171): Stage II sporulation protein E (SpoIIE)
  misc_feature (1)..(328): Xaa is any amino acid
MAIAKTIIKNRLQSGKSLIFDMENINRELCGNNIMDMFVTAWICVLKISSGELAYVNAGHNPPLVMRHGHGFGFLVSPPDLVLAGMDDTSYHARMMRLRPTDVLFLYTDGITEAENDKGEFYGKDRLMTFLNANGGMPPRTLIDKFRDDIRAFAGGAEQSDDITMMALRICGTACTGTSITLKASLEDLEKLIAFIGKELETAACPGKESAQIELAAEEVFVNIANYAYAKEASGQVTVEYGIIPAPDGAAMSVVFCDKGRPFNPLEHVDPDTHAPLEERKVGGLGLLIVKKTMDTIYYSRENDANRLEFSKSWRSHDSHGEAWRSEK

SEQ ID NO: 92095 - protein, 784 aa, Unknown
  Obtained from environmental sample
  DOMAIN (245)...(359): PAS fold
  misc_feature (1)..(784): Xaa is any amino acid
WLDPSITRNKWYYNCVNSPNEYTLNIDVDKVSRTRLLWINHKVMEDGNVLGAFCAGLPFDDVMYALFARYDNENVKGYVIDRDGFVHMDSTLSLISVEDNKNIPEADSNPALAAAIESHLMNIEGYFRSNEALQVIKLAKGTYQYVSIEPIAGSDWSVVTFFSNKSLFSIWRLLPLLIFILSAFVLYTLIENIFISRIVIVPLKHLTNSITTEQGGIFGYERGDEIGELARTILDMRFKIHEADERVRLMLDTSPLCCILWDKNINIIECNEAAVKLFNLNNKQEYMNRFFELSPERQANGELSYVLSVRHIKKAFNEGRCVFQWTHQMLDGTPIPAEITLVRISYGGDYVVAGYTRDLREHKMMMQNIRESAAELEAALEKAQAANRAKSNFLSNMSHEMRTPMNAIIGMTLIGKSASEIEKKDYAFEKIEGASSHLLGVINDVLDMSKIEAGKFELSFVEFNIEKMLQKVINVIKFRVDEKNQRLTVNLDPRIPVNLNGDDQRLAQVITNLLTNAVKFTPENGSIHLNARFLYEEDGLCTIQMEVKDTGIGISAEQQSRLFTSFAQAESSTSRKFGGTGLGLAISKHIVELMGGKIWLESELGLGSTFSFTVLLKRGKYEDAESFNDADKAAEQQVSFRGRRLLMAEDVEINREIVQSLLEPTEIGIDCAVNGVEALRMFSEDPEKYDIILMDIQMPEMDGFEATRKIRALEEEIKNSGMSFAKGKTQNNNRDLHKQIPIIAMTANVFKEDIEKCLAVGMNDHIGKPLDFNEVMAKMQFYLK

SEQ ID NO: 92096 - protein, 460 aa, Unknown
  Obtained from environmental sample
  DOMAIN (157)...(225): HAMP domain
  misc_feature (1)..(460): Xaa is any amino acid
GYTLNIDIDKVSHTRLLWINHKVMEDRNILGIFCAGLPFDNVLHALFARYDTENVKGYVIDRDGIVQMDSTLSVISEDDHKSIPEADSDPALAAAIESHLKNINGYFGLDETLQVIKLAKGPYQYVSLKPIAGSDWSIVTFFSNKSLFSIWRLLPLLIFMLSAFLLYSLLENIFISRIVITPLNHLTRSISQTGGEQDGIFGNDRGDEIGELARTIQDMRVKIHEADERVRLMLDAMPLCCSLLDKDLNIVECNEAAVTLFKLKNKQEYLDRFFELSPERQPNGELSYVEVGRHIKKTFAEGRHVFEWTHQLLDGTPIPAEITLVRTSYGGDYVIASYTRDLREHKKMMGDIRAGAEELKAALEKAKSANRAKSNFLSNMSHEMRTPMNAIIGMTLIGKSADGIEKKDYAFEKIEDASTHLLGVINDVLDMSKIEAEKFELSLVEFNIEKMLNKVINVIN

SEQ ID NO: 92097 - protein, 96 aa, Unknown
  Obtained from environmental sample
  DOMAIN (5)...(75): RNA recognition motif. (a.k.a. RRM, RBD, or RNP domain)
  misc_feature (1)..(96): Xaa is any amino acid
MSKSIYVGNLPFAFANEQLSELFAEFGEVKSAKVVIDRDSNRSKGFGFVEMEDEAAEKAIQSLNGKNVGNRALRVNESQPREQRPPRQGGYGNKRG

SEQ ID NO: 92098 - protein, 260 aa, Unknown
  Obtained from environmental sample
  DOMAIN (7)...(260): Arginosuccinate synthase
  misc_feature (1)..(260): Xaa is any amino acid
MEKEKVVLLYSGGLDTSIMIPWLKENYNCEVIAVCADLGQGEELSGLEAKALKTGASKLYIERLTDEFVAGYIFPTMKAGAIYEKEYLLGTSFARPLIAKRAVEIANKEGATAVAHGATGKGNDQVRFELTVMALDPKLKIISPWKDPKWTLHSREDCLAYAEQHNVPVSQSKKRIYSEDRNIWHISHEGGVLEDPWNEPPDDVYTLTNTIEKAPDAAEHIEITFTQGNPVAVSGKAMSPVDLLTALNKLGAKHGIGHVD

SEQ ID NO: 92099 - protein, 309 aa, Unknown
  Obtained from environmental sample
  DOMAIN (1)...(258): Aminotransferase class-III
  misc_feature (1)..(309): Xaa is any amino acid
AKLVKHSFATKVFLCNSGTEANEAAIKFARKRGTKASSQKFHVLSFSDGFHGRTYGALSATAQPKFHVGIGPLPDGFHYAPFNDIQYAKATLDNHDFAAIIVEPLQGEGGVNAASVEFLRFLREYATEHAISLIFDEIQCGMGRTGTLWCHEQAGVTPDIMTLAKPLGGGLPLGAVLCIDDIASCISPGDHGTTFGGNPVACALGSKVIDIVSDKKFLAKVHENGDYLKGKLATLADKFPSVDHIRGTGLIIGVRMKDDPLKLVDECRNRGLLVIKAGMNTIRFMPPLIVTRKDIDKAVKIFEAALSMC

SEQ ID NO: 92100 - protein, 301 aa, Unknown
  Obtained from environmental sample
  DOMAIN (7)...(301): Arginosuccinate synthase
  misc_feature (1)..(301): Xaa is any amino acid
MEKEKVVLLYSGGLDTSIMIPWLKENYSCDVIAVCADLGQGEELSGLEDKALKTGASKLYIERLTDEFVAEYIFPTMKAGAIYEGSYLLGTSFARPLIAKRAVEIAHKEGATAVAHGATGKGNDQVRFELTVMALDPKLKIISPWKDPKWTLHSREDCIAYAEQHGVPVAQTKKRIYSEDRNLWHISHEGGVLENPWNEPPDDVYTLTNTIEKAPDTPEHIEVTFTKGNPVAVNGKAMSPVDLLTALNKRGSIHGIGHVDMVENRLVGIKSRGVYETPGGAILYAAHRMLENLTLDRDTAH

SEQ ID NO: 92101 - protein, 346 aa, Unknown
  Obtained from environmental sample
  DOMAIN (76)...(345): Glycosyl hydrolase family 3 C terminal domain
  misc_feature (1)..(346): Xaa is any amino acid
MTDNPSEIISAVMEALKRNYINEDELNKHLGRILAIRFRLGLFDPPGLCPYDAISEADFMKEEYRSVSREAARKSAVLLKNDGNILPLRPGAVEGSIAVMGPLASELHLDWYAGHPACMIAPLDGLRELYGKDKVAYTDCRDIVSFSTEDGRPLILAEKTFSVGKIGEVPACFYVEDWGWGVRTFTDTQSGLMLEIPYYNPKPGDDAGEPQFITATAKSSLIWFNKNLFNAIPQENGLFLLRTYDNRRVAYPCEPGPVKLRDNAFENTGELFRMNLERDGLSEAVKAAAQAGQVVFVGGNDPMINAREGVDRSSLSLPPRQEELIRHVCAANPKTVLVLLSRLSLC

SEQ ID NO: 92102 - protein, 164 aa, Unknown
  Obtained from environmental sample
  DOMAIN (4)...(156): Aspartate/ornithine carbamoyltransferase, Asp/Orn binding domain
  misc_feature (1)..(164): Xaa is any amino acid
IGQIEGFTIGFCGDLKFGRTVHSLAKALARYPGINMIFISPQELILPEYIKNILEKQNIKFDERENLEKSMPELDVLYMTRVQRERFFNEDDYIRLKDTYVLNAEKMAVGKERMVVLHPLPRVNEISVEVDSDPRAAYFKQAKYGMYVRMALLASVLGAEDVKY

SEQ ID NO: 92103 - protein, 563 aa, Unknown
  Obtained from environmental sample
  DOMAIN (229)...(413): Peptidase M16 inactive domain
  misc_feature (1)..(563): Xaa is any amino acid
MKTKHNLLFNIAQTTVFTILLSVFLTACSNCQDAAMWGDLGKPSDPVPVMENLRTGVLPSGLRYYILENSMPENRAYLTLAVKAGSVLEEDDEQGLAHFVEHMAFNGTERFPESKLVSYLRSLGMRFGPEVNAYTSFDQTVYGIEVPVETDEQKTRRIPETALAVIDDWTRAVTFSPADVDEERPVIMEEYRTRLGAWERLRQKWLPALFRGSPYANRMPIGLPEIIEGAPASRLEGFYRKWYKADNMALILVGDFDGAALEASLTGHFLIEKPAEPMNRPFYDLPLPQKGNLEVLTLTDSELTAAYIRIYYKRAPQARRNDLSYYRSEIIDYLIDTMLELRFEEALLKPETPHVSVNTGTASYAASSRFYVLTSQAKTGSAEASLEDLLKIKEAILRYGFTDSEMATAADILVSELQRLVQEKDKQQSQTYIDSLTDYYLEGGNYADAEWELNAVTRMLPHIKAKDINAAVKDYFASGDLQVFIFAPDSEQASLPDEARVRQMIADSGKMNIAAPRYGAVGSGLLSSMPERGAIVSESTDAETSAIVWELGHGPRVILKSTK

SEQ ID NO: 92104 - protein, 81 aa, Unknown
  Obtained from environmental sample
  DOMAIN (17)...(75): Hemerythrin HHE cation binding domain
  misc_feature (1)..(81): Xaa is any amino acid
MNFRSNLITWSPTYSVGVKIIDDQHKKLFNFINDMYNHIAGNEEAEQAYFKKIIQQIVEHIRINFATEEKILLVTKFPDYI

SEQ ID NO: 92105 - protein, 496 aa, Unknown
  Obtained from environmental sample
  misc_feature (1)..(496): Xaa is any amino acid
DFDKFGRTSTPIQTEVTQEIFTKLDKAGYICERTIEQLYCAKCGRFLADRYIRGICPKCGSAKARGDQCEDCQKLLDPTDLKEPQCSACGSSPTLEKTNHLYIDLPAIKDKLEAWIKTASQKGFWANNAVQMTHAWIRDGLKERAITRDLKWGIPVPKPGYEKKVFYVWFDAPIGYISITGNLGEERSKTGWRDFVNYWWKSPDDVELFQFIGKDNIPFHTVIFPSSLLGSGDKWTMLHHMSSSEYLNYENGKFSKSRGVGVFGTDAMDTGIPADVWRFYIFYNRPEKSDAMFTWDDFQEKVNGELIGNLGNLVNRTLTFVTRYYDSKLPDGKSNGAFWDEVKKREASITEKLDRAELRDAFREIFELSSFANKYFQDSEPWRLRNDDPEKAKEVIRDLSYIVRDLSVLIEPYMPKAAIRIASFFGLSANECLSWRDLGKADGVGDAQITSEVLFAKLEDDQVAALRDKYSGSQQERAQAKPAFSSAVDLRVAKII

SEQ ID NO: 92106 - protein, 349 aa, Unknown
  Obtained from environmental sample
  DOMAIN (3)...(307): Bacterial extracellular solute-binding proteins, family 5 Middle
  misc_feature (1)..(349): Xaa is any amino acid
IKAKDPHWNNFWEAAGMVAFPKHIWENTDFNSIRFEFPVVSGPYAIKQMKIDRSLELVRREDWWGKQKNYNAGKYNFNKIKYNFMEDRNKALEALKKGDFDAYPIYTSSIWINQTDFDAVKKGYVLKNRVFNEEPKGFQGFALNLRRDKFKDVRVRKALSLMLNRELMSEKFMFNQYFLLNTYYPSLWEGHKNPNAPLYPFAPDSARKLLEEAGYTVNTQGKLVDKNGTPFQLTFLNYAEDIRHTTKFQEDLKTVGIESEIETVSLSTFRQRIDEANFDLCWLAWGAARLSDPEASWHSKTANDKGTNNVPGLQDRIIDSLIEAQKTEQSLDARNEILKKLDTRLTEIV

SEQ ID NO: 92107 - protein, 227 aa, Unknown
  Obtained from environmental sample
  misc_feature (1)..(227): Xaa is any amino acid
MRKIITKAIALLIAFSTVTLAQEKGSFTDPRDKKKYKTVKIGEQVWMAENLNYAAKDSECSDKKPANCTTYGRLYDWATAMKACPKGWYLPRNRDWEKLLLFVDSTYKISGGKTASEYLRAKSGWKNDADGTPANGTDKFGFSALPGFPAAPGPNVYIEGRWWSGTDTTRIYNDPRKGEQRFDRSYHIVMDNRRAGIGEAPTALMSVRCIQGDEEKALKADAEEKAQ

SEQ ID NO: 92108 - protein, 107 aa, Unknown
  Obtained from environmental sample
  misc_feature (1)..(107): Xaa is any amino acid
MKKLGFGLMRLPQTNANDAGSIDIKALCRLADAFLEKGFTYFDTSYVYHNGKSENAFKEAVAKRHPREAYLIADKLPMFSITEAKQMLPIFYEELNRCGVEYLIIFC

SEQ ID NO: 92109 - protein, 279 aa, Unknown
  Obtained from environmental sample
  DOMAIN (26)...(189): MatE
  misc_feature (1)..(279): Xaa is any amino acid
MEQNQDAATRLGTESIAKLLFRFSIPAITGMLVNALYNVVDRIFVGQGVGEIALGGLSLVLPLMTIGMAFGMLFGIGAANMISMRLGQGRRQEAENALDHCFFLLIGISIVMMTVGLIFIDPILSLMGAAKGSEAIGYARDYFRIILFGMVFFMTSFGMSHCTRAQGFPTMTMIGMILGAVLNTILDPIFIFVFKWGVEGAAWATIISQFASFVFLFSFISSKKAVVRLNPRVFKPDFSIIKQIMAFGSAQFLLQFLMSTVQLLTNTSVGWYGADALGV

SEQ ID NO: 92110 - protein, 239 aa, Unknown
  Obtained from environmental sample
  DOMAIN (2)...(211): GXGXG motif
  misc_feature (1)..(239): Xaa is any amino acid
MINISAKNLNHKELNKLIRTAAEDVCVDDCFGQRFIGSGMSGKNITINGTPGNAMGAYFNGGTILVNGNAQDAVGDTMNDGKIIIHGNAGDALGYAMRGGCIFVKGDAGYRTGIHMKEYKEKKPVIVIGGKAGSFLGEYLAGGLIVVLGIDSEDVPVWYFTGTGMHGGKIFIRTDKELSGLPAQVSEKVADNDELQEIAPYVSEFAGFFGMDAKKLMKDRYYVLKPNAKNPYKQLYTAN

SEQ ID NO: 92111 - protein, 228 aa, Unknown
  Obtained from environmental sample
  DOMAIN (105)...(181): Bacterial Ig-like domain (group 2)
  misc_feature (1)..(228): Xaa is any amino acid
MKNKQKMFGIIAASVAIIGFSFASCTINVPGDENNSSSSNNNNGEQLYNHCITAAGLCLDGPYTAAQCNGTVSNSCPSNPGGSSPSSSPSGGGSSSSIASGSNVAVTGVTLNLNSLSLPVGNTVTLTPTVAPSNATNKAVTWSTSDATKVTVVNGVVTAVAAGTAIITVTADGGKTATCTITVPAWTAIPENTFGTTLISAIAYGNGKFIAGGASGKMAYSTDGTTWT

SEQ ID NO: 92112 - protein, 311 aa, Unknown
  Obtained from environmental sample
  DOMAIN (1)...(99): Fumarate hydratase (Fumerase)
  misc_feature (1)..(311): Xaa is any amino acid
AVVIGGTSADANLKLVKLASTGYLDHIPTKGSKNGRIFRDLEMEAKVKELAQKSGIGAQFGGKYLVHDVRVIRASRHAASCPVGIGVSCSADRNIKGKITEEGLFLEKMEHNPEQYLPKGGYESLGLSQPVSINIDRPINEVLEDLSKYPVKTPLYLTGTMIVARDIAHAKLAEILEKEGDLPEYFKKHPIYYAGPAKTPKGKPTGSFGPTTAGRMDSYVARFQEKGASLIMVAKGNRTKDVTDSCQKNGGFYLGSIGGPAALLAEQNILSNEILAFPELGMEAIRKITVKDFPAFIIVDNKGNDFFKELI

SEQ ID NO: 92113 - protein, 338 aa, Unknown
  Obtained from environmental sample
  DOMAIN (1)...(277): Serine hydroxymethyltransferase
  misc_feature (1)..(338): Xaa is any amino acid
SLGNQRLLGLDYYSGGHLTHGYRNNVSGRMFDIHGYSVSEKDGLLDYDQIEKQALELRPLILLTGYSAYPRKINFKRMREIADKAGSVFMVDMAHFAGLVAGKVFTDEFDPVPWAHIVTSTTHKTLRGPRAGFVLSVPEFAEALDKGCPLTMGGPLPHVIAAKAVAFREASSPEFRKYAQNIVDNCQTLAASCVKNGLDVLTGGTDNHLILIDVHKSGITGRQAESALHECRITLNSNSLPRDPNGPWYTSGIRLGTAAVTSLGMGKAEMKELGALIAEVIKGTTQPPDKKDPSKKSMAKYDINANVKEQVIGRVKKLLDRFPVYPELDLEFLKKSFV

SEQ ID NO: 92114 - protein, 424 aa, Unknown
  Obtained from environmental sample
  DOMAIN (205)...(273): PET112 family, C terminal region
  misc_feature (1)..(424): Xaa is any amino acid
NRSVVEYALKLGIALDCSITRHCKFDRKNYFYPDLPKAYQVSQLYMPICRDGHLDIEVDGQKKTISIREIHMEEDAGKLVHDAKGADTFMDFNRCGVPLLEIVSQPDFRNAAEVIAYLEKLRETLLYLDVCDCKMQEGSIRADINLSLRPFGGELGVRTETKNMNSFKAIARAIEYERERQIEILEDGGQIVQETRRWDDEKLESYGMRSKENAQDYRYFPEPDLLPMEIDDAWLDSVRNNLPELAYQKRERYCRDFKIPESEAVVLTVHKNICEIFETLARKSGQAVEAAHLLTGEIMRLMNNANILPEDLSLNADKFSTLITLVTGGKINRGAYKETVEAVFTRDVDPESYIAEKGLMMINDDNAVIEAVRAVITENQDSVADYRAGKEKVFGFLMGQVMKKLGGKGNPDMAKKILTYMLTM

SEQ ID NO: 92115 - protein, 352 aa, Unknown
  Obtained from environmental sample
  DOMAIN (1)...(344): Acetokinase family
  misc_feature (1)..(352): Xaa is any amino acid
GAFSVSGLVEEIGGNARFTAKKGGEKHEKKIDAPDHTHALATIQSFFKETGEDSDIAAVGHRVVHGGEKFSKSVLINDEVIKAIEECSVLAPLHNPPNLQGISAAKKNFPDLAQVAVFDTAFHGSLPNYAYLYGLPYKFYEDYKIRRYGFHGSSHRFVAKKTAEILGQNIKDLCLIIAHLGNGCSAAAVKFGNSADTTLGLTPLEGMVMGTRCGSIDPGIILHLIKSLGYDYDKLNKLLNKESGLSGLSGISSDMRVLLGEAEKGVERAKIAIEVFCYRVAKEIGSLVPALPKLDALVFTGGIGENSEPVRKKILSFLNVFKFGEPNGPKVMVVPTNEELMIAMDTEEVVKA

SEQ ID NO: 92116 - protein, 75 aa, Unknown
  Obtained from environmental sample
  misc_feature (1)..(75): Xaa is any amino acid
EHILPDPSPFVFTKELGDFAVIYSLRAYTRRPDLYSVICSNINRNVLDVFKREGIEMIVPQYRSVRNGEKLVRPE

SEQ ID NO: 92117 - protein, 341 aa, Unknown
  Obtained from environmental sample
  DOMAIN (1)...(334): Predicted permease YjgP/YjgQ family
  misc_feature (1)..(341): Xaa is any amino acid
VNQLLLMAQDILSKQVPLGQVALLVLFSLPSVIALSAPFASLVGLLMTVGRLSSDNEILVFLSSGLSFRNVFIPAITVGIVISILSFIANDILLPGGYVQFAQLYRRILVSTPALELEANSVKKYKNTEIITGNVTGNAIDNVLILDKTGNGERRVIMAANAELKDAGRNGLSLDLGRAFVQSSKEIAREDYDYASAGNLRYWVPQEDLIQAMSSVSPREMSSIDVFKEIKRRTLDLNNRLNEKRNKVSSLALTLETSIRAGPASPEWNRRASQFTAFQREAQALQVMRKDRGLSLHWLEFYKKFSIPFGGFSFIFLAVSLGLMAKRSGQTVGFIFGLIIS

SEQ ID NO: 92118 - protein, 273 aa, Unknown
  Obtained from environmental sample
  misc_feature (1)..(273): Xaa is any amino acid
DGITIDPSTYELERVADWVLDPSYEVFGRLEDKVTEGKNVQENNQSNSKEGKMELSEKKIKKLLEENLQRICEKISGIADPIERRAKAVELLEMYDDSELGTLKETITKMVGDCDTAIKAGIESGAKVTELNESLEVANLSLTENQKRLDGLLKENADLSKKLEEALNTLDSAKAFSKDTEKVLNEALAVKNNSVSFAEYEKLREYTKNVVRAYTEQKAVLAKYREDRKKLALKLKSVNEAIERDVAKADTNRKLEERKAKNVAEKKILMTAK

SEQ ID NO: 92119 - protein, 75 aa, Unknown
  Obtained from environmental sample
  misc_feature (1)..(75): Xaa is any amino acid
KGNNKIMAANVDLYSGLVYSMLNIPKELYTPIFAISRIAGWSAHRIEEIICGGRIMRPAYKSVLEERPFIPLSDR

SEQ ID NO: 92120 - protein, 281 aa, Unknown
  Obtained from environmental sample
  misc_feature (1)..(281): Xaa is any amino acid
PQGEPGEPGEIGPEGPQGPPGEDGTGINLIGAFDTEDDLIAASLSGSKGDAVLVAGILYIWDTLNDGWFNTGANIRGPQGEQGEPGEKGDDGEPGTPFRIIAGVADEDELEDLDLSPVLGDHVLVDGQLYAWSPDDDAWIDTGINLRGPQGVQGLQGLQGEPGQRGSRFYVTSTGVNPLPDSWMPGDFILYTGDDDAYFPNSDGDDFAKGSIIEVLRASDMADTPPDRGEVAWRGNLAGRNGQNGADGSRISGVSSEAENTHSLPPTSRRVGDWLLVRVMT

SEQ ID NO: 92121 - protein, 83 aa, Unknown
  Obtained from environmental sample
  misc_feature (1)..(83): Xaa is any amino acid
MHIYKTNGVCSSEINFDLRDGKVYSVSFKNGCNGNLKAVGILTEGMDAEELVKKLKGLRCGKRETSCADQLATAVAQASAGAV

SEQ ID NO: 92122 - protein, 85 aa, Unknown
  Obtained from environmental sample
  misc_feature (1)..(85): Xaa is any amino acid
MPILVKYRKFPVSLIRPLAYIEERQVIECADEKNILKAACTCPYGINSKRRDIRQRIMALTGGSGAVKRRILKALASGERDLLTE

SEQ ID NO: 92123 - protein, 249 aa, Unknown
  Obtained from environmental sample
  misc_feature (1)..(249): Xaa is any amino acid
MKGGNMPVLADLHDAITACMGHGEKSEAAAAFAMCDVGTAIGELPEGVSQTPVQDDMNRQLKKLKLEKYKTAVAQELDLDLRENRSVKSEEAAFIDLARSTFLHRLRFLGIGFAKQMPLKKDGATWAEKWALQWTPESEIQAVEATLKGETVEVAAAYVLKEKLDSCEDIVEASNLIAVLYVCALESSMGLALGVLQRLAADSSNIVKTADAARELSMLILYGDIRKADTEPLKPLLKEIFLRSALMLN

SEQ ID NO: 92124 - protein, 413 aa, Unknown
  Obtained from environmental sample
  DOMAIN (157)...(325): Domain of unknown function (DUF303)
  misc_feature (1)..(413): Xaa is any amino acid
MAFKAAAIFSDNMVLQHGKPVPVWGTGGEDGSFVRVSWESEKSKIQNETAVDGGKWSLSLPPLTVGVTGELIIKNGNNEIRFRNVITGDVWFAGGQSNMEMELINVKNGEAELAACANQYIRFYQVVRRAVVDDDYLREEAASKWQICAPDTAAMLSAAAFFFAHKINADIGIPIGIINCSWGGTSISTWMSREQLMRSRAGQKFIDDYAEKVSGKTDEQYNAEMEEYNSQWRAWDERVRARREKDPDVSWEILNKECGTCPWPQPAGNTSPYCPVNLHTARILRTAPFAIKGFIYYQGEEDEGRYSDYCDMMYYLVDQWRKDWNDRYLPFFFVQLTMYASREDVEAGQPSRNWCALQESQYLASISIENTGMAVIIDCGEYDNIHPFDKQTVGFRLALQALKKVYGKNVDAD

SEQ ID NO: 92125 - protein, 389 aa, Unknown
  Obtained from environmental sample
  misc_feature (1)..(389): Xaa is any amino acid
MQFMSRGWKEELLWKTYEDVDWNKRQSILTNLSGNTNINFHIDHTSNLFSNTVTFSGNGTWREFSYLNEEKYIDPNDPDGKVDEEAMEKKRREQYSQTNYATSYAYNGTLKPFYEDPVFAQTNLQYSFRGTLVKSKKFTEGDGPELTPQWGGWVKEDLSEDILGLNSHRISTNLAANIMDKEQSISASAELPPLDGLINANATFKVWISTSNFRYSMEKKETDEEWQIKPFYITETLRFENIVTFTHNMTYTPRNDTTTPEEENKITYLNSSLSLFSSFTATYTMTWIQKSVFKPDNPDTPYTGGKWVKEDEKELLPKDLRLVYSRSFPSSKYFNNRFNLSYNINTSLNFDLQEHTSSNFQFETGITMGITKFMDLKVSATSQNAVIFR

SEQ ID NO: 92126 - protein, 368 aa, Unknown
  Obtained from environmental sample
  DOMAIN (270)...(368): HD domain
  misc_feature (1)..(368): Xaa is any amino acid
MKVKNENGIEIKGFNSVLKRLRSGPALFTFALCVITIVVIIICENIGFYYQARKIIGYIFLVFLVYSTFIILQGRTILGKELNNSERYLLASLAGSYIIGSVLIKNLASIPEEFPLSLVVPTGLFIMLLAVFMGKRLAVIMAVAIPLGAYFTGAFDFNSYIIALVSGAAASTVLQNAQNRMSLIKAGIVIAAANCFAVVVVLLISQANLYEYPGPLFWAALNGIICGMLTIGFLPPLEHALNAVTPFRLMELSDLNAPILRKLFTTAPGTYTHSLMVANLAEQACQDIGANALLARVGAYYHDIGKMENPDYFVENQTDHNRHDEIAPRLSATIIRSHVKLGVEKAKNLGLPKDVIAIIAEHHGNSII

SEQ ID NO: 92127 - protein, 179 aa, Unknown
  Obtained from environmental sample
  misc_feature (1)..(179): Xaa is any amino acid
MLGLNREEIELVEKIVLFFDSSNPEESALVRNRFECLNALGDAISRYPSVRESQTLRGIHRNEAQLLKALCSFASTAHLLHIPTRVVAARSYLVAKYQAFSMLHILASDEKEFTLPIHKIILTVIHTLMAEEVYFSCLDDPDFSQDIKLNLANDLIMLWDSGTDSRMVRHLPALDTLGL

SEQ ID NO: 92128 - protein, 425 aa, Unknown
  Obtained from environmental sample
  DOMAIN (229)...(418): Predicted permease
  misc_feature (1)..(425): Xaa is any amino acid
LKSDSVKIRPAFFIAFRYLLGRAREGGRYLRGAAAGIALSLIPIIVTLIVADGMIRGITDRYLELGTGHLQIYNYLNTRGPEAALPYIEGVPGVKGAWSERHGLGVVFHGSFSKGVTIRAVEKSFWEDPGSMKYLKILSGEANTDDDRDVLLGEDLANSIGASAGSTVRIMTIRSSSGSRYVPRVTSFTVRGIISSGYRELDSLWCIMSLEAGKQIMQDSSTSFLMLKIDNPYTEAETMANTLYNVLDSDFGVYTWKTLQRSQYSSYESTRQLLLFIMALIVLVASVNVSSATSMLVIERQRDIAVLKASGAGPSFTSAVFLWGAFLTGLAGSVLGIAAGLAIGCSVNSLIRALERALTFFSGIFHGGPVLILDSGYYLETIPIIVNWKMVFTIALLTISATVLASWLPARRAGKLKPIEILRKY

SEQ ID NO: 92129 - protein, 152 aa, Unknown
  Obtained from environmental sample
  misc_feature (1)..(152): Xaa is any amino acid
MKLLKNLLKSPMFVIGASLFLLTLLIALVGPLFYKITMARVGAQYDAPSAKFILGMDDLGRDYVSLLLLGLRSSLFVGFLAGVIATTIGTLIGIYGGFRGGIVDDILNMVTNLFVVIPSFVVLILISASFSEGRSLTLIGVIIGMTTWTGAL

SEQ ID NO: 92130 - protein, 360 aa, Unknown
  Obtained from environmental sample
  DOMAIN (68)...(212): GAF domain
  misc_feature (1)..(360): Xaa is any amino acid
KERTHFDQIFSFILTGFCIGVMIVFQKRIYILDKKKTDLAKESLGTKNKLLEMVAVTSEILLTSEASNLEKTLMEAMELMARCVDVDRMYIWKNRFYGRILIYEQQYEWLKDKDDKKIPRAEPQYSYKDTLPEWESRLSAGRHVSGPVSSIPEKEQKFFSAFGIRSILIIPVFLQENFWGVVTFDDFKQERTFSDEEASILRSGCLLLANATVRYHNQNLLETRLKQQGIMADISRSFISKEPVSQLINNALKQMGEFMGVSRIVVAATDDNIDESWLVYSWYSREEWRHKQAPAGLKKMIAASFPKSVPETGIATIICCNDIKQEYSGRYKNLSSASVRSFIWAPVYVENFFWGLISMK

SEQ ID NO: 92131 - protein, 363 aa, Unknown
  Obtained from environmental sample
  DOMAIN (175)...(348): MlrC C-terminus
  misc_feature (1)..(363): Xaa is any amino acid
DKPITAALDMHATVTTKLLEAVDGFAAYKTAPHVDCAETGAQAARMLLKSIKENCAVHTAHKSIPMMVAGEKSETAAEPMASLIRQCIEAEKEPGIEAVSLLLGFPWADDRHNAVSVLASFSGDIREKAEEIVNDLANSFWKRRKEFAFRAEFYDTGEALAAAYAYAEKGEKPVFLSDSGDNPTAGATGDATDLLEAILKTIDRADRLPTPLLYSGFFDAPTAEKCVKAGEGAELEITLGGNWDTVNGKKIPLRVKVKKIHRNYGSIKADLVLVSFRNLLISITSKHIGFGDEGLLPALEINPADYCLVAVKLGYLEPCFRSIAKKAILATTRGCSNEVLENIPYRNVRRPIYPLDPDMELPG

SEQ ID NO: 92132 - protein, 74 aa, Unknown
  Obtained from environmental sample
  misc_feature (1)..(74): Xaa is any amino acid
MAYKPIEVDRQNLKIMGVRFSDIDTLNSAANAIGSNMFEGFEPTTRSIEIIRDYLSKKITLEQLIKLSKEKAYA

SEQ ID NO: 92133 - protein, 60 aa, Unknown
  Obtained from environmental sample
  DOMAIN (1)...(60): Plasmid maintenance system killer protein
  misc_feature (1)..(60): Xaa is any amino acid
MYMNGREKSEQDLKIPPGNNFEKLKGDKKGWYSIRINDKWRVIFKWKEGYASDVTITDYH

SEQ ID NO: 92134 - protein, 181 aa, Unknown
  Obtained from environmental sample
  misc_feature (1)..(181): Xaa is any amino acid
DAFRLCTKLTSVTIPNSVTSIGERAFTLCSTLTSITIPDSVISIGEGAFLGCSNLTSITLSKKINRIETSLFSGCWQLASVTIPDGVNSIGQNAFGDCGSLTSITIPATVTSIENYAFYCTITSVTFLGYINKDSFSKDVFYISEDVLSGDLREKFYELDDTNGTPGTYTRSTTGTWTRQP

SEQ ID NO: 92135 - protein, 86 aa, Unknown
  Obtained from environmental sample
  misc_feature (1)..(86): Xaa is any amino acid
VLLPNCKPVIIAGAALAFARGIGEYGATSMVSGYIVGKTATVSTSVAYYWQINQDDMAMYWVIINLVMSFVFMMAINAFTKQQVRG

SEQ ID NO: 92136 - protein, 703 aa, Unknown
  Obtained from environmental sample
  DOMAIN (451)...(540): Transglutaminase-like superfamily
  misc_feature (1)..(703): Xaa is any amino acid
MAVLAFLPEQRIKHSVRLILSSSLLFLFSVIAGGVNLNAFAPFAAGLISFALTFLLFNSKPVYSRLAKIAEVEPFFLAWVCLRLLSLSRSGEDVAGQSIALTQFILVWTAVVFLFHNVIIYLCLYPNSRIKAWKEGLVFSLAAGAVLIVTLFVLPADFVRNTVISNLLSEKIPQKISNSDRGIPQRGSGRRTRPRNGDGSGELRGLSEHDWPGRGDGAGQKRQYMVMVVASDREPVYMGSAFRGQLDPVKGFLVNQDEPINDLANQRFFVTWFSNEQEHDIGREKQEVFSLSTLRQKYLPYRPIVIDPVILSDDTGPLRYIHQVVSNTHLGDPLMLVHENSRSLTAFEKSALAAYLEIPLADDDKKLFEEYLRNARLKWRIDRSDIIKSDPYLNFIFSHQIENNQSLKSEGGNEQLENILAILTSFSKYQYNLNPDDDFSIDTLKYFITDSKEGDCVEFSNTLALLGRLAGIPSRVVTGYLVSESLQTEAHLRGLAALRKRLPVLQQFPFDNLFMVTNLHAHSWTQFFIPDYGWLDFEATAFSIPPQGMGDFNNWDVVIPLFDEQQTFSNVKKFPWRAVVKAVINLAILSLICAYALRYGRELILYINSNRGSDDIRTRTRSLYLLLLARLAADGQPIKPASKTAVEYSQLFRGKEDSSCFKPFAEIYSELRWRQFEAPAEMEARFEELKKEYQAILTATRRK

SEQ ID NO: 92137 - protein, 342 aa, Unknown
  Obtained from environmental sample
  misc_feature (1)..(342): Xaa is any amino acid
LIRLKCLVPQNIGQYYQALKAFRDKDPGNVGKNKVVPLGVNEDVRWGLSDFINNFLDPKMTDRDRWINTIADRYITMPGFKNGVKEMNKWYSEGLIYKDFPLMTTADDFYNMIKSGVVGSFCQNWDFIYRTDMNILLDLKKNVPNAEYIPISVTNNKSVMDKPGLRIFIPNSSPNKDAALKYLNWLSKPENYTFLQLGQEGVNHKLVNGVPQTQVMPPQHQWFMNSPNNIDITMPMNGVELGSDAQNAKVLGLSYGTFSPEVISNAYVVSVKDARGPAVWQATTKVNQYSGDLREKADDLLALAITTKSSNFNKVWDDGIKDWKKAGGDEVLKERESLYPKK

SEQ ID NO: 92138 - protein, 526 aa, Unknown
  Obtained from environmental sample
  DOMAIN (10)...(377): Bacterial extracellular solute-binding protein
  misc_feature (1)..(526): Xaa is any amino acid
MKKIALVLVVFLMAATLVFAQAKKATPAPAPAAPLPVTGKLTVEIFDRGSDGGRTLAHNNAWTKWVQEKVKKDLNIDVTFVPVGRWSENTDIVNLMAAGTAPDLCYTYNYDMIADFRDKGGIFDVGPYIESYLPDFKKLQGMDTSIPGKYLVYRDQDPNTLKVYSLRNYVVALARRNVFIRKDWLDKLKMPVPKNMGEFYTALKAFRDKDPGNVGKNKVVPLGINSDVRWGLADFINHFYDTRSIERDLWVNYIGDRYITMPGFKRGVQEMNKWYNEGLIFKDFPLMVTADDFYNQIKSGVVGALCQNWDFVYRTDINILVDLRKNVPDADFIPISITNNKEISDKAGLRIFIPQSSPNKDAALKYLNWLSKPENYNFLQVGQEGVNHRKVNGIPQIITMPPLHTWFMNSPNNIDMTLPMNGVELGSDEQNAKILALNYGTIPPDVISNAFVTSLKNARGPAVWQATTKINQYSGDLREKADDLLAQAIRVKTSEFSKTWDNGIKEWMKAGGEEVLNERNALYPKK

SEQ ID NO: 92139 - protein, 268 aa, Unknown
  Obtained from environmental sample
  misc_feature (1)..(268): Xaa is any amino acid
MDFCFMFDAQNIKSNKLNSTEQYLQHAATCIYAQSIGPMNTRSNSSEDNVIRTLVSGQSRNRYAGAGASELVYPSNHILNYIALKWAAQTVTGTWTLFDRDYKNKSKQNNRAKMKGLPYDPDIKPETEYIKTVDTEINKNEPNPFAVFTRRMTYNYDKDGFTERGPKWNAYIEALRENVKINAERRQNDIDNARENAQSAINDLRNNDSDDKAEKTDKTDRMDTFIRAYNNLKYYRDLVKRRSDDIGRVTAYSVLNSDDGTDVTLTNE

SEQ ID NO: 92140 - protein, 226 aa, Unknown
  Obtained from environmental sample
  DOMAIN (1)...(175): Methyl-accepting chemotaxis protein (MCP) signaling domain
  misc_feature (1)..(226): Xaa is any amino acid
MKKMAEAIREIKQSSDNTAKIIKSIDDIAFQTNLLALNAAVEAARAGEAGKGFAVVAEEVRNLAMRSAEAARNTANMIEESVKNADGGVKITEEVAKSLNQIVDRAGKVGDLIAEIAAASNEQAQGIEQVNTAVAQMNQVTQQNAANSEESASASEELSSQAAELSNMVNEFKLSGRQRRGRKARPAAAKASATARRRGPSEQIGENGDLDRESGESVGGHSDGRR

SEQ ID NO: 92141 - protein, 505 aa, Unknown
  Obtained from environmental sample
  DOMAIN (89)...(204): Miro-like protein
  misc_feature (1)..(505): Xaa is any amino acid
KKNKLDECNHDVNIYDELWDSFQEDLKAFGCTYWALFYKNLFKNGFTIDEEQLKRHFGVPDEIKDQGAAAVGRYLQGLGKNVERLNEARIIILGEKGAGKTSLARRLLDVDAEMPKEYESTEGVETSLWRFPGKDGADVNTHIWDFAGHSITHAVHRCFMSARCLYIYVYNGRIERDNDPVYWLEQIRIHGGDSPVLFLINEKDDHSAVIAEKKMKYEYPSIVGYYHINIGSEDKTKLKEFRQIVMDMVSNNPSWNNQIVSMEAYKIKNKLRECFDKTKSPHITREEFDKIALNCGASAGRIEDILKDLHTLGICLWYNKPEMIEFNMLVLNPDWITNGIYKIINQSFEEHEHILNTSKGTEILKSDKRYKYPHDKVAYLFKLMRLYELAFFKDTDNNIFIPGILSIDMPDGVPVFDDANNRLTMSFVVEKVLPPSITARIIVKRNEEIFNEKLLWRNGAVLKYKGSETFARIIEESRSITVSVKGTERTEYITSLRETINAIFD

SEQ ID NO: 92142 - protein, 130 aa, Unknown
  Obtained from environmental sample
  misc_feature (1)..(130): Xaa is any amino acid
MTSNSGYALLKQMPAILRARAYRLYTKDGRRLIDLWLTGGAAILGHTPPNILREIKNTASSGLYSPFPHFTTERYLKALSKLFPGRSFRLYAAPPPELSVLFSSGEAKLWRPFVNPADPFSATEKAPVLV

SEQ ID NO: 92143 - protein, 348 aa, Unknown
  Obtained from environmental sample
  misc_feature (1)..(348): Xaa is any amino acid
VTVDKIVEAANSCGGNLIEAGRSLELAQKARSGLNAFYKVIEDAKKLLEDEKVMTEDGKGGDKKNSNEKEPDKQNPDKQKKEKSLAKKFKGLVPGSGLSDCVTRIVRASGIAEYHEAQDDVTGNNKLNNLQELVNAASVYPQTMEGLLEFLEDIELDRSLRDNAPQDALNSVTLITFHNTKGLEFKRVIMTGLENGIFPREDKKDEELEEERRLFYVGVTRAMDELYLTSCMMRRMYGKISPMQPSLFLHEIDAGCLKINSIASGFETGKPMARQTFNPYYFDKELEDRAGWKRGQRLFHENYGYGAVMEVQDSEDGPVVRVRFDNGKETRFLSEYQGRAFEKMGADY

SEQ ID NO: 92144 - protein, 295 aa, Unknown
  Obtained from environmental sample
  DOMAIN (100)...(295): Binding-protein-dependent transport system inner membrane component
  misc_feature (1)..(295): Xaa is any amino acid
MMVMLFLLGLAVFGLMALAPGDIVDQIMMQQMFNENQGKAGQNWQTMTDDQLAARRVELGLDKPFYQQYFLWLKRVIGEHNLGVSLISRAPVSFLLSTRIINSLILNIISLIFITIFSFALGVYFSTKAGTKADYAVTFFALVLHAFPGLLLLILLQLFASVSGLFPVTAYPPFPFSQAPGKFVFSYMHHIFLPLFASFLGGIGGSLRMIRATMLDQLGQPYIMSLRSRGIAEWRVYFAHAFRNTLNPYITGSANLLAGLFSGSLILEIIFAYPGVGRLMYEAVLQQDINLVLAI

SEQ ID NO: 92145 - protein, 526 aa, Unknown
  Obtained from environmental sample
  DOMAIN (407)...(518): Toprim domain
  misc_feature (1)..(526): Xaa is any amino acid
MYIGTTGIDGLHHLVFEVVDNSVDEAMQGFCTNILVVLEGNDIVRVEDNGRGIPVDIHPTEHVSALELVMTKLHAGGKFDKKSYKVSGGLHGVGVSVVNALSEWCEAYVHLDGKVYTQRYKIGVAESPAKEIQPNGLPYSYSPSRKGTVIRWKADSSVFETTTHNFDALSNRLRELAFLNKGLKITIRDERLTTPKVHDFMFEGGVKSFVEYLNENKTVLYNEPVYLNGVRDDGLCGQVEVETAIQYNDGFNEIMFSFVNDINTREGGTHLVGFKSALTRTLNEFLKKSKHAKKLDETLSGDDVREGLTAVLSVKVPNPQFEGQTKGKLGNSEVKGIVESVVNEQLELFFDKHPEVINNILEKSVLAAKARIAARQARDATRRKNAMDSAGLPGKLADCSEKDPAKCELFIVEGDSAGGSAKGGRDRRTQAILPLWGKMLNVEKQRIEKVITNEKLQPVIASIGAGCGNEFDVSKIRYHKIIIMADADVDGSHIRTLLLTFFYRYMTPLIEQGHVYLAMPPLYKVS

SEQ ID NO: 92146 - protein, 329 aa, Unknown
  Obtained from environmental sample
  misc_feature (1)..(329): Xaa is any amino acid
SLKLITPLLPIPDWLGGLSSLQKLVIGSDTITSLPDSICDLSSLGEFFVDCEKLTALPENIGNLKNLTELGIESQSLVTLPDSVGNLDKLETLRIEGMSFSVLPESAGNLSSLTRLYLYQTKIKTLPDAIGGLSNLKKIRLLRCVELESLPESIGNLRSLETLYIRGGKLTALPESIGNINSLKGLNLQYTQIARLPDSIGNLTNLVSLLVHSSPNDMWYGGPDGPPNYYEDEKTEKRSPFTMLPDSAVKLVSLKHLILNNSELTSLPDYLGSLPKLERIEIADCNIKTIPSSIQRLADSGELTLLKTEREFNESQWHHRHERKKPRRS

SEQ ID NO: 92147 - protein, 85 aa, Unknown
  Obtained from environmental sample
  misc_feature (1)..(85): Xaa is any amino acid
SKHLKAKRDWNEGGNGLDTYGFSALPGGAGTSAGGFGDTGYGGYYWSATDSNSNAYYRGVYYRYEYAYWGNSDKNDLFSVRCLKD

SEQ ID NO: 92148 - protein, 212 aa, Unknown
  Obtained from environmental sample
  DOMAIN (44)...(202): GGDEF domain
  misc_feature (1)..(212): Xaa is any amino acid
MEDFALEEPHITSRILLNSAAMVTARIKATRKLLFESAYWVQELHRKIHEDPATGLWKQTFLTEEINRILGKPMALIMLKPDRFKILVDSLGHNAGDEAMIKIAAVLKGITRKLDKGWAMRFKSNETGLVINKCDVAEAESVALALAEAIAALPHVPLGEEDFHFTGSIAWGVWPVDGKSWDSLFEGTYKLLMDTWKAGGNTVVHYKKEKAV

SEQ ID NO: 92149 - protein, 205 aa, Unknown
  Obtained from environmental sample
  DOMAIN (36)...(126): Cyclic nucleotide-binding domain
  misc_feature (1)..(205): Xaa is any amino acid
MNGQVNTGIYKVLKKAAIFSNLSGLELDAVVSFLEPRSMKKGEVVFNEGTIGEEMFVIVSGRIEAWVAQADGTQRWSFELKTGDFFGEMSIIANETRSATIVTKEDTELLTLHGVDFYHIVFEYPMIGAKILNSIRIVQNTWFEQISKHLGDIMRWGETARRRALIDELTGLYNRRFLEESAGNRFLQGTLGLRNVSLMMMDLDK

SEQ ID NO: 92150 - protein, 227 aa, Unknown
  Obtained from environmental sample
  misc_feature (1)..(227): Xaa is any amino acid
LTALGGKVSKYIAKNSERIKNWPAWVQEVAVKYSSKTANLYIIHGNIRDFLPKETEEGEFIFAQIHQYIAEIIFGNQNIIAYFNPSEGVSFCTEEMAREYEAVLSRSFPDSDPGDFVSREPEKSFYYLEKYFLMRIPRNRRNPSPRIVLIIDYAEYIIPGGDMLRLSDADRFCLVTLNRWANNTDFTEGDVSIILLTENLADISPRLAASSSTVTIEVPFPDEAVRA

SEQ ID NO: 92151 - protein, 148 aa, Unknown
  Obtained from environmental sample
  DOMAIN (42)...(134): Cyclic nucleotide-binding domain
  misc_feature (1)..(148): Xaa is any amino acid
MTGNSQKSKKNEAQDLSAILKSDLFSDLLPEQAKVIVKRTEILMVRKGGLLFSPVEKAEHVYLLLGGIVRVFKENENGREDEIARFAPGDIIGDFDFARAAEYDAYAEALEESTLLMFPEFGLTMEKFALEEPHIIARVLLNSAAMVT

SEQ ID NO: 92152 - protein, 424 aa, Unknown
  Obtained from environmental sample
  DOMAIN (72)...(183): PAS fold
  misc_feature (1)..(424): Xaa is any amino acid
MAAGRAGSSQLPASVGGGRKEGFMHLNISFSPTFLTIAAIAALSAAVAAFLIYRYFPLHLIYKSKVGFESMLDAVNEPLAVISANHTVRRVNKAYVDMARRSYKACVNSKCYKVLRGLSAPCPDCRLKETLDHSEVKEVEVSPHPSGTGSITITFSSYAMPIRGSAAERCVIEHIRDITALEALKNDLERRNKFLATLTHKLRAAQRSIKAELWVASQIQIGLLPPTLPQLDNMRIDMTYKPVADVGGDMYDFIHIDDAHFGVFIGDASGHGLASSLIGTLSKMSLYNHTHAWLPTAELLGLMNKDLKAHIHTSHYLTAFWCVFDFENNKLTYSRAGHPSQIVLRKDGTLHLLSGDGIFLGITEDAVYEQREFIFEQGDRFFWFTDGIYDIFKDADSVGGGEREFLGYDRFAELIKLTVNLPFN

SEQ ID NO: 92153 - protein, 145 aa, Unknown
  Obtained from environmental sample
  DOMAIN (33)...(145): Ribosomal protein L22p/L17e
  misc_feature (1)..(145): Xaa is any amino acid
MSDVKTKKVLVRVSNGVFILENEDAGNVCYGVGSLYNTRYGVLKMRRLIDILRDNSVERAFGILSVLQNRLKGAPIVEKTLKTAVNNYNQARAKKGGVAKPASELKIRAIFADGGPIIKRARPHSHGRAFPIHKSLSHLTIVVSD

SEQ ID NO: 92154 - protein, 93 aa, Unknown
  Obtained from environmental sample
  DOMAIN (3)...(83): Ribosomal protein S19
  misc_feature (1)..(93): Xaa is any amino acid
MSRSLKKGAFVDTSVLKKTQEMNASGKKQAIKTWSRRSTIVPDMVGLTFSVYNGKKFIPVYVSENMVGHKLGEFSPTREFKGHRKEEKGGGKK

SEQ ID NO: 92155 - protein, 97 aa, Unknown
  Obtained from environmental sample
  misc_feature (1)..(97): Xaa is any amino acid
MVYVCSGTESQKLKWFETINIAGEKLTPQELRNAVYSGPWVTDAKKYFSKNGCPAYKIGNKYLNGTAIRQEYLQTAIAWLAKGDSEEIIEEFMGQHQ

SEQ ID NO: 92156 - protein, 247 aa, Unknown
  Obtained from environmental sample
  misc_feature (1)..(247): Xaa is any amino acid
MDGVEEWLFQDAKINCYVQSVGGGIFELDYQPAAWNYLDTCGGRLAFADRLLPKGAAADTVEHDGIKGSARLGARLCYNELYELVELDKVRRKLSFLLRQSPAAAFGNVEIEKSYQIKRDTIHVSYAITNKGAGAEVFLFAPRIDLALPGEGESFARFYTCKPGAPDAPVHGPLRETDCLKIHDIKNEVQITLSSGKPFDGRIAPVRLKDPDKGEELYQAYCVMPLFQLSLEAGSSWEVEFTMKFTH

SEQ ID NO: 92157 - protein, 295 aa, Unknown
  Obtained from environmental sample
  DOMAIN (4)...(212): 3-beta hydroxysteroid dehydrogenase/isomerase family
  misc_feature (1)..(295): Xaa is any amino acid
MKLLIIGSTGQLGSDFVKIAEQQGRAVIPIDYPQIDIRDKSSVESVIGSTAPDAVINCAAFTAVDDCETDSGAAFALNADACKNLALAAKARSSLLVHISTDYVFDGAASSPYTEDCPTNPQTVYGQSKLRGEEIIAEQYADGGMIFRIAWLYGAGGTNFVKTIRRVAQSNRQENKPLKVVNDQFGTPTWTVSVCRQILSAIDRGERGVFHATCEGACSWFEFAKEIVAAYGIDAEVLPCTTDEFPRKAPRPRYSVLENARLKAQGANIMPEWREAFREFLSTEGEASEKDLVTG

SEQ ID NO: 92158 - protein, 320 aa, Unknown
  Obtained from environmental sample
  DOMAIN (1)...(305): Nitrogenase component 1 type Oxidoreductase
  misc_feature (1)..(320): Xaa is any amino acid
TPSYVGSHINGYFNMMMGFMNYLTGKTGMPTGKTAIFPGWVNPGDIRELKRIAKAMKVNTVFFPDHTGVLDAPMNGKYEMYPEGGTPIEEIRNLGDSNGLIALGEITCVEPAELLEKKWKVPFTLLPLPVGVAYTDQYVMALQEESKHEVPEELEAERGRLVDLLLDSAQYTIGKKVAIFGDPDVVIGLTSLALEMGMVPKYVITGTPKEEFTRRVNSLLARYGVSGCTVKANADLFEMHQWIKNEPVDLLIGTTYGKQIAKAEDIPFIRAGFPVLDRYGGPLQPIVGYAGAIRLVEQITNTLLDRFDRDVADEDFEIVQ

SEQ ID NO: 92159 - protein, 289 aa, Unknown
  Obtained from environmental sample
  DOMAIN (77)...(200): HD domain
  misc_feature (1)..(289): Xaa is any amino acid
DFDIEPETFDAIRHNLHRIEILSEERIAEELNKIILSPKPSYGFKLLDASGLLEVVLPEITNLKGVEKIGECGHKDNFLHTLEVLDNIAKVSDNLWLRWAALLHDIAKPQTKKYDPKIGWTFHSHEFIGAKMVPKIFARLHLPMNEKMRYVQKLVELHLRPIALVEDMVTDSAVRRLLFEAGDDIDDLMQLCKADITSKNREKVMRYKNNFTLVEKKLVELEEKDRIRNFKLPITGEEIMELFNLQPSKPVGIIKDAVKEAILEGIIPNEHEAAVQLAREIFSTKVSAS

SEQ ID NO: 92160 - protein, 196 aa, Unknown
  Obtained from environmental sample
  DOMAIN (4)...(195): Amino acid kinase family
  misc_feature (1)..(196): Xaa is any amino acid
MKYKRILLKLSGEAMMGEQKGGIDPNVVKSIAAQIKELRDRNVDVGIVIGGGNIIRGMVAASMGMDRVTADHMGMLATVINALALQDAVEHLGIPVRVLSGIEMQKIAESFIRRRAMSHLSKGRVVIFGAGTGNPFFSTDTAAALRAIEINAEVILKATNVDGVYSEDPKKNPEAIRFEQITFQDVLERNLRVMDG

SEQ ID NO: 92161 - protein, 596 aa, Unknown
  Obtained from environmental sample
  DOMAIN (25)...(297): ABC transporter transmembrane region
  misc_feature (1)..(596): Xaa is any amino acid
MSRPNISLKEYKALFPYLSRYKAQYIIGVIFLIIVDAAQIAIPQFIRYAIDLISSGDFQWKQILILSLWMVGIMAVVSFGRFLWRYFISGSSRRIEAELREALYAHLQKLSWDFYQKNKIGDLMARSINDLNAIRMAMGMGIVALFDFVFMATSILIIIFVQDARSALVSIIPLPLVTVLILLFGNMVGKKFFAVQSTYSKVSDNAQETFAGISVIKSFVKEWWFIKKFADSNEDYQKANMELVRLFGFFFPFVSFLSGLTVLIMLGIGGLRVINGLMTAGSLVAMFRYLSMLIWPLMGAGFMVNMIQRGAVSLGRINEVLNTTPSIRDGENACAAQSTQGVPALEISNLEFAYRENESVLKGINLKVERGEWLGVMGRTGSGKSTLIKTFTRMTNPPHGAVRVFGLDVCDWQLEELRKLFAVSPQDSYLFSDSIANNIAYGLDDSNFNSHNEREQKIDNAVSFASLSKDLSFFRDGKDTLVGERGLTLSGGQKQRTAIARAAVMDSEFLILDDSLSAVDNETELKILEALRKERKGRTTIIISHRVSTLKYADNILVLDKRKVLEYGSPSQLAAQGGFYGRIAAFQKLESGAVNG

SEQ ID NO: 92162 - protein, 185 aa, Unknown
  Obtained from environmental sample
  misc_feature (1)..(185): Xaa is any amino acid
ESLYKAVIYLEEVVTNLIDAPYSDYEEKLSMIESFNQDQRYNLVCKMGLAIDMIEQAYGDNSKWRWTFVDIEGRFAVTAKNIINLKTAYENMSPGAEYYDSTVYHLRLVKKLIAQAADRYREKYELSTGQILDFKTGINFLGALRRLHIVMSESEEANEVKKKLAIWSAKLETDHKKQEEAKKRT

SEQ ID NO: 92163 - protein, 270 aa, Unknown
  Obtained from environmental sample
  misc_feature (1)..(270): Xaa is any amino acid
RTVPIVALTANALTGNEEMFLSRGFNAFIAKPIDVMQLDAVLNTWVRDRKSIEILKQAEMIAPLIIENANQNIFDSVQIEGLDLVRGKKKYNNDAAYLDILRSWHKHTPALLEKMRNPVFENLSEYAITVHGIKGASLGICADEISSKAEELEHYAKSGNIGKVQADNSMFIGMAESLLANIGELLEKFDVGKKEKPKKHAPDPALLDRLLEAAKSYKSTLMEETMCSIESYDYDSGMELVSWLRQQMDDLEYDAIRQRLESRMPSHIET

SEQ ID NO: 92164 - protein, 915 aa, Unknown
  Obtained from environmental sample
  DOMAIN (299)...(364): His Kinase A (phosphoacceptor) domain
  misc_feature (1)..(915): Xaa is any amino acid
MTRYNNRHTFLFALFSFIIFAAAGLMEMVFTGLQNVMGPIIIMAAAAVLIVVLHHQDRYISEAFSIPLILYLTLTSVSYITGYYADYFFLLCLGITCLGALFFNSHELLKFILVSNLITTFQVLLKIPITASAFAGRTLMSMPMLLFNWFLALTGSLFIYKVITFAEDKSSVAKSAHDSFVGLLISTPDPIVLLDTINRVTYISDSFMRMIHIEQSMYAKGRSIFDLIKDKKLKELFYEILSGGGAYQSIHEVTLDETQHFFDIVVFVITSETKGRLVNIIDVTPVMKAKYEAEAASRSKTAFLATMSHEIRTPLNAIIGLSEIELQKRLPSDTLLDLRKIYNSGTSLLTIINDILDISKIEAGNLELLPADYDMPSIINDTVQVNIMRIGSKNLTFKLKIDPSIPVMLFGDEMRVKQILNNLLSNAIKYTNEGSVILTVGWEKKDDIALISFIVKDTGRGIKAEDLSKLFSEYQQFDTKANRHIEGTGLGLSITKKLLALMNGVINVESEYGKGSTFTVKIPQRIVDETPVGDTLVRDLETFHYKDIHNIDGLRLVRNHMPYGKVLVVDDVETNLDVAKGLLLPYGLSVDTASSGQEAIAKIKAVSEGGDAFSGYDLVLMDHMMPGMDGIEAVRIIRNEIQGEYGKAVPIVALTANALSGNEEMFLSRGFNAFIAKPIDVMQLDAVLNTWVRDRKSIEILKQAEMVMPVIENADQNILDGVQIEGLDLVRGKKKYTNDAAYLDILRSWHKHTPALLEKMRNPLFESLPEYAITVHGIKGASLGICADDISSKAEELEHYAKSGNIGKVQADNSMFIGMAESLLANIGELLEKFDVGKKEKPKRHVPDPALLDRLLEAAKSYKSTLMEETMCSIESYDYDSDMELVAWLRQQMDDLEYDAIRQKLGSRTPGFVET

SEQ ID NO: 92165 - protein, 454 aa, Unknown
  Obtained from environmental sample
  DOMAIN (301)...(454): ABC transporter
  misc_feature (1)..(454): Xaa is any amino acid
LKILAGVDTEFAGETSVSPGFTIGFMEQEPFLENGKTVKEVVSEGVQELVDLLQEFDKVSEAFADPDADYDKLGARQAELQEKIEAADGWNLDSRLDLAMDALRCPPASDLVDNLSGGEKRRVALCRLLLKKPDILLLDEPTNHLDAETVAWLERHLREYAGTVIAVTHDRYFLDNVAGWILELDRGEGIPWKGNYSSWLEQKEQRLAQEEKGESDRRKQLQRELEWIHMSPKGRHAKSKARIAQYEKLFLDDEREKLKESKITIPAGPRLGQLVIEAKGLSKAYGDRLLFENMEFTVPPGACIGIIGPNGAGKTTLFKIITGREKADTGTLRLGDSVKLAWADQMRESLDDDKTVWEQLSDGLDIIRLGGENGKGGKEVNSRAYCSWYNFSGADQQKKVGVLSGGERNRLNLALMLKEGANVLLLDEPTNDLDVNTLRALEDAIDTFAGSSMV

SEQ ID NO: 92166 - protein, 343 aa, Unknown
  Obtained from environmental sample
  DOMAIN (131)...(220): Cyclic nucleotide-binding domain
  misc_feature (1)..(343): Xaa is any amino acid
MSGHSHIESAQALTDVMLVTVLKEQYGTLIQKSSQVAMKIIMQFSRQLRYLNETLAGITLKKTTELGSSHLFEVAHYYYRQKQYSKALYSYTHYLKYCPEGENAAAAQQRITELKAQVKEPIKEFGPGDVNRTYRKDSLFFIEGEPGDEMFIIQKGSVKITKVVGDNEVLLAVLKAGDIFGEMALLENKPRGATAVAYDDCEVTMINRANFEHMIKTQPQLITKVTTLLADRVWLIYKQLANTLIANPLGRMYDSLLIQLEKNRVPLDGSNPYYFSFGLQELTNMVGLSDRDARQMQGEILKNKNLQVINDKLMVSSSGEIVKQVEYFRKMDRIEKSRKETQS

SEQ ID NO: 92167 - protein, 202 aa, Unknown
  Obtained from environmental sample
  DOMAIN (123)...(157): Gram-negative bacterial tonB protein
  misc_feature (1)..(202): Xaa is any amino acid
MLNNERSQRRFRLLLFLAVAAIHALLLFFIAFNVKTASQEAEENARVMKLTDLAEAPPPPPEEELPLVEAIAETMIETETVPLQTVVAAGSLKTNDTSSWDDYLPMHQVSGPPRFDENEITAALVYPPIALRSAIEGRVILELFVDRNGLVQRIIILREEPKDRGFGEAAVKAFTGKRCVPAHANGEAVSARYRYPVTFKIK

SEQ ID NO: 92168 - protein, 281 aa, Unknown
  Obtained from environmental sample
  misc_feature (1)..(281): Xaa is any amino acid
GRTYTSGDLQNWRFASGSTVNCQFANLSLKTRKPSGFARSSIVNLALEASEDDNCEVLQEAQEPITVPPPAARAALTQEHIGDLMQKQIKEADGKLKPQMGWSSWNYFKQLIDEQIIMAVAQGMKSSGLVDAGYVYLNLDDCWQASSRGEDGCLQFDAGMFPSKEGLVKKINALGMKLGLYSSAGALTCEDMPGSLGFEKLDALTFAKWGVEYLKYDWCHVADISTDANYGGLWPTDTPPILYLGIAPLDGNALETSYAAADSAISLTGSAKISKGMLMGL

SEQ ID NO: 92169 - protein, 227 aa, Unknown
  Obtained from environmental sample
  DOMAIN (1)...(226): Domain of unknown function (DUF323)
  misc_feature (1)..(227): Xaa is any amino acid
MGSADSEPGHNENAEPQREVTVSGFYFGKYEVTQKEYQEVMGRNPSWFRGDNLPVEQVSWYDAVQYCNKLSRKEGLVPAYGISCCGNSRTISWNREANGYRLPTEAEWEYACRAGAATAYNTGAAISDDTGWYSANSGNKTHPAGQKPANTWGLYDMHGNVLEWCWDWYGSYANSAQTDPVGALSGVDRMIRGGSWGNLAQFLRSAYRVHYTPSSRYYFLGFRLARS

SEQ ID NO: 92170 - protein, 74 aa, Unknown
  Obtained from environmental sample
  misc_feature (1)..(74): Xaa is any amino acid
MMEMVWIEGGTFTMGSHEDEPGRFDNEGPQHQVIVSAFYMGKYPVTQGDYQAVMGSNPSYFKGDDLPVEKVQLV

SEQ ID NO: 92171 - protein, 408 aa, Unknown
  Obtained from environmental sample
  DOMAIN (203)...(408): Alpha-2-macroglobulin family N-terminal region
  misc_feature (1)..(408): Xaa is any amino acid
YWSSLNDIVPEVLTLSKKIDLEALPNELKYSPVNSWKFEAEPGQYLYVKLNEGTRFYGGYVLAEPYENIFRVENFPKELAILSEGSILSFSGDKRLSMMSRGIREVEFTIGRIRPDDVNHLVSQTSGDVSNINFRNYSFNQYNITEQYAESAVVPIAGERDIGYFSFDFSRYLENIPNKNLRHGLFIFTVRSKQDNYSDRRLIMITDLGFFVKTGADSVKDIFVQSVASGNPVTDAAVSVLGLNGNPIYSTYTDAGGRARIPAFGDTYKNERAPSVFTVVSGEDMSFMAYNANGRNLDYSSFDVGGIYGASDPKTLRAFLFSDRGLYRPGDETRLGLVIKSGDWTVNLGGTPLEFRVTDPRGAEIYNKRIRLSPEGVEDIRFSTHDWSPTGTYTASVYVIQEYRQGDE

SEQ ID NO: 92172 - protein, 675 aa, Unknown
  Obtained from environmental sample
  DOMAIN (242)...(388): Alpha-2-macroglobulin family N-terminal region
  misc_feature (1)..(675): Xaa is any amino acid
GWIAPGELKAKVSVRNLFGTAASGNEVKAQINLSPGHQYFRQYRDYQFRDPYLGKNSFQEFLGTKTTDTEGTAEFNLNLVKFEKATYRLSFYTEAFEKGSGRNVSAEASVYVSPLPYLVGYKADGSLNYIARNTVRNLSFIAINPKTEKMNVNELTLTINELRYVSALVRQPNGVYKYQSIQKEYPVSSKKIIIPASGLEYSLPTNTPGEFKISITGPGDLEYNSLNFSVAGSDNIQRSLNRTAELEITINKNDFRNGEEIELMIKAPYAGAGLITIERDKVYAYRWFRSGGETSMQTITVPAELEGNAYVNVQYLRSQDSPEIFMSPLSYGAVSFSISRENRTNQITLDIPDEAKPGEDFVIKYSTARQGKIIVYAVDEGILQLAAYQTPDPLAFFFRKRALEVKTAQILDMVLPRYSVVQNLAAMGGGSGFDELARNLNPFKRRQNAPVAYWSGIIDAGPEPKELRYRVPDYFNGTLRVMAIAVSDSTLGAGEDRSLVRGTFIISPNAPMMAAPGDEFDVSLTVTNNQKGAGANGRVRIRAIPSEHLSITGNSEFNLQIAEGQEQTLNIPVKALGPLGAAQIRFIASNNNESSELSAYMSVRPAVPYRVSLYSGAIRNKSAETVIDRNLYEEFNTREVSLSYLPAGMAKGLSFFLNNFPYGCSEQITSAVFPF

SEQ ID NO: 92173 - protein, 293 aa, Unknown
  Obtained from environmental sample
  misc_feature (1)..(293): Xaa is any amino acid
NPDFEGFVIEEINFAKQEIIFTNQSILSKKNTSGLTLSEREVYRVEIEEAIKQHFRKQKYLLGKGIKVLTLFFIDRVSHYKGEHDPFIRRYFEAAFDKYKTGDDYFKRFDASEVHAGYFAPKKEQKAVKDGMNEDFFDYVELDDYKGKDKKEIKEAEKEAFSLIMQDKETLLTFPNAIAGTDNEIVKASKKNVAFIFAHSALREGWDNPNVFNICLLKEPRYDTANQKNTRRQELGRGLRLCVNQEGERIQDDSINILTVICPEEFSQYANALQQEYRDSGDIPPPPRQTRRE

SEQ ID NO: 92174 - protein, 495 aa, Unknown
  Obtained from environmental sample
  misc_feature (1)..(495): Xaa is any amino acid
YYNNAGKIAGSEDGIAYYFKEVDKDKNFRISADFYINNYGFTGGRPDLNGQEAFGIMARDYVPQYDIDTGNYTMEALKTVRWDGRYYTGYNRPDGPGGSGNMIMVGGVKRGARVYWRTGVDDPSEDNEAITNPNYVARADFAKFYFLPREFADYSMYGSGKDGIQSRPDFPSAGLTYRLSLEKTNSGFKAKITPPAGVGKGTTKDRIPKDGQVLEYSDRELPFPDLLFEINKEKYYVGFFAARDARVTITNISYEESDAALCPKRVDPRPISITPSFSVQSPSAVSQSEYTLIARSNVEGSLLVSMNGGDALSYKGVWVTETTNASAEPFSLFEIPVDVLSPGDNVFSLVFNPDTNQLKSGYLIGKEYLMTNIKPIYQSFMVNYRTLDTPDGKIWVSPEGKGANSGSRDSPMDIFTAISYVAPGQTIMLMDGIYTPCEAPQMVNGKQRIPIRLIIPRYNSGKPNLAVVSDPEKPTDAERANPDYYKYYKVLKAEN

SEQ ID NO: 92175 - protein, 349 aa, Unknown
  Obtained from environmental sample
  DOMAIN (11)...(338): Beta-lactamase
  misc_feature (1)..(349): Xaa is any amino acid
VSIDTELTDCLNAAIRRQVFPGCALAWVSKGESSIITAGSRTYDDGDVPISENTLYDCASITKAVPVSNLALWLIDRGKLRTDDRLIDFVPEYVGSFRDAVRIQHLLTHTLDFDFRLSGCKDLPPEELLRTILNVKMKCRPGEKFCYSNASSILLGLAAERASGKPLRTLAQEVFFDPLGMTDTTFFIDDDKRSRCVPTEIDPWRGRAVCSEVHDESAYTLQKIMTPGSAGLFSTAGDMLKYIKMLIDGWEQFFSKETAESMQTNQIPHISGACTGLGWELNQEYMGKKRSPSTFGKTGFTGCAVVIDRPRRSGFALLSNYTWPKRKPNRDMINEVRAGAADIVFDNHY

SEQ ID NO: 92176 - protein, 282 aa, Unknown
  Obtained from environmental sample
  DOMAIN (38)...(282): Methyl-accepting chemotaxis protein (MCP) signaling domain
  misc_feature (1)..(282): Xaa is any amino acid
MVKNLRSVISNVQSNSEMVAAASEELNASADQSTQAANSVAASILQVAEGTEKLLALVMETNDNVSKVSFESNQAATNAATVADTSQKTAQAAETGSQTLEAAIYQMNAIQNTIEVLAKEIVGLGERSHEIGQIVETISGIAGQTNLLALNAAIEAVRAGEQGRGFMVVAEEVRKLAEQSQDAAKQIAQLISAIQKDTAKAVQAMETGTKEVKYGSELANNAGVAFVEIEKLIGQTSVQVKEIAESIRKIADANQTVAAKGMEIYKLNQETTEQTQNVSAAT

SEQ ID NO: 92177 - protein, 289 aa, Unknown
  Obtained from environmental sample
  misc_feature (1)..(289): Xaa is any amino acid
YTVTVSATGYNPKTSAAVNVLAGYTILIDMLDNESDDTVTVSPEKGGEGVEVTLTYTVADLKINNQLDFGGVTADIASVLEAGTGTRTYTINAEDASNGVITITAIFTHTDLVIDHIAFSEHDGGHITKNDGDDPFTNAITTAHKGSGEITYHSSDENVATVDSTGTVTIVGVGTTIISAEKAADDTYAHARTTYTLTVNYKPGTADNPFLVSNETELRKVGTGTDGWTLSAHYRQIASFTMTGDNFTPIGNNSTRFSGSYNGDGYTITGLSISGSANNLGLFGVIGAT

SEQ ID NO: 92178 - protein, 457 aa, Unknown
  Obtained from environmental sample
  misc_feature (1)..(457): Xaa is any amino acid
ALFLSVAASTFAQNALFKPFTSFRVIQTDHFEIIFPKESEESARLLASYADNVYDQISSLLDIKVRGRIPVTITPHTDLFNGYYTPIFNHIMLFDTPMDVEWTNFENNLKKLFLHELTHAVSMNTRSKSYDLRYRIFGSLCTPALWNAPQFMVEGVTVSFESLDGTGRANDPHTKQYLRQAVHENKFLTPFQASGVYDRSISSGSGYWYEYGGLFSAWLQQNYGMEKYSQLWKEMGNDSSLSFSVYKSDYFLIFKKVYGVEFTDEWKKFSASFALDGIENNEDELSSRKFRYFAEREYFIAGLTARGDNLYFIESSESKIGVYNTQTGKTKTINAASGVYNIDVSADGKTMLLSGYKYIEDRAFAVVSEHRTDNGRKTGKDYKGLYKARYFRDGVIGLRSELHNNCIVYEMLNGESEILFKGNETLMFSGPQAVDNDRIAFIASIEGKRELWLYNYA

SEQ ID NO: 92179 - protein, 297 aa, Unknown
  Obtained from environmental sample
  misc_feature (1)..(297): Xaa is any amino acid
RGNDFCRKITYSVDKADSVLSNFRNDYNPRIAVTVDMIATGTDVKPVECLLFMRDVRSRSYFEQMKGRGTRTLDKDSLRKVTPSAANNKTHFIIVDAVGVTKSIKTDSRHLDLKPDVSLNELMMSVAMNSRDEDIFLSLASRLTRLDKELTVAEQSKYTESSNGITLRVTVQRLLDAFNDDVIEERARKENNLSARDTITEEQIQETQKVMAEEAAEPFYLPTVRTFIENARKAHDQIIDTVNIDHVNVSAWDTQHSENAGKVIARFKDFINDHKDDIIALSIIYNQSWKNRPLTLD

SEQ ID NO: 92180 - protein, 89 aa, Unknown
  Obtained from environmental sample
  misc_feature (1)..(89): Xaa is any amino acid
MIIPFSEIVNTQKGKNPPVKSKTKLDGYIPYIDIKAFERGIFDIYTDGNKCLLCDEGDILLVWDGAIGKVGIAYKGAVGSTIVKIDVPL

SEQ ID NO: 92181 - protein, 196 aa, Unknown
  Obtained from environmental sample
  misc_feature (1)..(196): Xaa is any amino acid
FGGWNTKADGTGLNYNADAYYTVNASITLYAKWNTGETPCTVTFNTNGATTGTIPPTQTAKAGTSITLPPGTGLVKTGFILGGWNTKADGTGTDYAAVASYTVNASITLYAKWNIPGTTSCTVTYNANGATTGTAPQAKTAKAGESITLPAGLNKTGYTFGGWNTKEDGAGTNYAAGDFYTITGNITLYAKWVNNQ

SEQ ID NO: 92182 - protein, 277 aa, Unknown
  Obtained from environmental sample
  DOMAIN (1)...(277): Glycosyl hydrolases family 2, TIM barrel domain
  misc_feature (1)..(277): Xaa is any amino acid
VNGKMIYIKGANRHEHDEKTGKTLSVEAMVRDIKILKSHNFNAIRTSHYPDDERWYELCDRYGIYLWDEANVESHCFYNQLCSDSRWTYAFVIRMRRMVERDKNYLSVVVWSLGNESGYGSGHEAGAAWIRFYDSSRPVHYEGALNGKLSFHDSWASGKTVTDIVCPMYPTIENISNYVRYSDDYRPLIMCEYSHAMGNSNGSLADYWKAIETHHGLQGGFIWEWRDHGFEAYTHEGVKYWKYGGDFGDEPTDYDFVCDGLLFPDQGLKPAMAECKQ

SEQ ID NO: 92183 - protein, 731 aa, Unknown
  Obtained from environmental sample
  DOMAIN (467)...(687): Methyl-accepting chemotaxis protein (MCP) signaling domain
  misc_feature (1)..(731): Xaa is any amino acid
MKIKFKLSMLIIAIVAVIVTGVSALLLREASSIALDLSKQKTMYLARQRAQYWDGRMGGYIDVLQTVSNIMNFYENLPVEERRQTYEDTMMSVFEDMPDFVRMFTVWKPGAIDGMDAENIGRTGSTPTGQFAYALARDTGEIKPLTAVVVNEVMEQITGPNARAVGMSDPAPFKNMGKDTYAVRIVVPVLNKRLNEVVGAVGCQLDIGMIQPRVEQTIKDFEEVTSMVVYSDNGFVLANYLPEFIGKQIDTETQYGPYLSDVKTAVKNAQEWEGEAYDPELKTNMVMAVANIPIGVSPTTWSVMVGSTEAYILKDVNAMRNFVIILASIALAAAVALIYLVLSRTTAPIVKVADTLKDISEGEGDLTRSIAVHSQDEIGDLALYFNKTLEKIKNLVKNVKNESTVLSNIGNDLASNMNETAAAVNEITSNIQSMKGRVINQSASVSETHATMEQVVNNINKLNGHVEKQSDNISQASSAIEQMVANISSVTNTLVNNANNVKTLREASEVGRSGLQDVATDIQEIARESEGLLEINAVMENIASQTNLLSMNAAIEAAHAGEAGKGFAVVADEIRKLAESSGEQSKTIGTVLKKIAESIKKITSSTENVLNKFEAIDSGVKTVSDQEDNIRNSMEEQGQGSKQVLQSVGDLSEISRQVKGGSNEMLVGAKEVIQESNNLEKATQEITGGMNEMATGADQINLAIHHVNEISNKNREGINTLIKEVSRFKVD

SEQ ID NO: 92184 - protein, 146 aa, Unknown
  Obtained from environmental sample
  DOMAIN (7)...(112): Glutamyl-tRNAGlu reductase, N-terminal domain
  misc_feature (1)..(146): Xaa is any amino acid
MITLRGCALETALTEREKYLRSWTPRSASYVALNTCNRVELYEGSGAVPLRIARHLFRVAAGLESALIGETAILGQIKRAYQEAMTRPLSPELHRLFQNALYAGKLARAETGISRGAMSHSQAVIEILDGLKIDLTQARILLIGVN

SEQ ID NO: 92185 - protein, 165 aa, Unknown
  Obtained from environmental sample
  misc_feature (1)..(165): Xaa is any amino acid
MEIQVQELIDKIKKDGINTASEEASRIKTEAEAEARRIVDVAKKEAENIISRGKQDAERFEKAGIAALEQASRNLVLAFKDEIQALLKKIISSHIAAQYNDDVLKNTLPGLLKSWIEKNSSDLAVILPEDALSRLQSFFKEKFTGELNKGVELKSSRKLTSGFHI

SEQ ID NO: 92186 - protein, 514 aa, Unknown
  Obtained from environmental sample
  DOMAIN (272)...(338): Elongation factor Tu domain 2
  misc_feature (1)..(514): Xaa is any amino acid
MDHMELERERGITIQSAATQVEWKNHTINLIDTPGHVDFTIEVERALRVLDGAVLVLCAVGGVQSQSITVDRQLKRYHVPRIAFVNKCDRMGANPFKVKTQLREKLALNAVLIQIPIGLEDKLEGVVDLVTMKAIYFDGDQGTELRYAEIPAHLKQDAEKYREELIDEVSIFSDELAEKFISGDAISEDLLRAAIRKGTLAEAFVPVMLGSAYKFKGIQPLLDAVNNFLPNPTEVKNYAYDIDNNEQQKELLSDENSPTVALGFKLEDGQYGQLTYVRVYQGALKKGEELMNTRSRKRFKVGRLVRMHADSMEDISEGAPGDIVALFGIECASGDTFCGSGLNYAMSSMFVPEPVISLAVTPKDKKSADQLAKALGRFTKEDPTFRSYVDQESNQCIIQGMGELHLEVYIERMRREYNAEVEVGRPQVAYREAITQRADYSYTHKKQTGGAGQFGKVAGYMEPFPSGDYEFVDNIKGGTIPTEFVPSCDKGFKEAVKKGSLIGFPVVNIRCVIN

SEQ ID NO: 92187 - protein, 83 aa, Unknown
  Obtained from environmental sample
  misc_feature (1)..(83): Xaa is any amino acid
IQWIDKETKVTMKAELYNKSGVVVKVLEILKLQEMQGRLTIMSTKMSTLADRTSTTINTDIIKYNDPIPESVFTREFLRTGRP

SEQ ID NO: 92188 - protein, 294 aa, Unknown
  Obtained from environmental sample
  DOMAIN (207)...(294): SecA preprotein cross-linking domain
  misc_feature (1)..(294): Xaa is any amino acid
LPILYSVNEKESWAAALPAEEFPKMTEKFRERYASGEGLESLLPESFALAREAARRNLGERPYDVQVMGSIVLHQGKIAELKTGEGKTLMVVAAAYLNAIPGKGVHVVTVNDYLAGRDADWMRPVFTYLGLTVGTILSDMDNDRRKENYACDITYGTNNEFGFDYLRDNMCRDMRSRVQRGHNYCIIDEIDSILIDEARTPLIISGAAEDDTFKFAEVNRLIGSLEEIKKKENGDYPDETQGEEVIGDYKLNEQNKNVSFSNNGLAKIEDLLKKRGLIKGSVVDEENFEYIHYF

SEQ ID NO: 92189 - protein, 655 aa, Unknown
  Obtained from environmental sample
  DOMAIN (525)...(644): SecA Wing and Scaffold domain
  misc_feature (1)..(655): Xaa is any amino acid
MSVAAAYLNAIPGKGIHVVTVNDYLAGRDTDWMRPIFSYLGLTVGTILSNMDNEQRKVNYACDITYGTNNEFGFDYLRDNMHRSMESRVQRGHNFCIVDEIDSILIDEARTPLIISGAAEDDTFKYAEVDKLLGSLKEVEKKADGEYPDETQGETVSGDYKINEKNKNISFTNQGLSNIEEVLKKRNLIQGAIVDEENFEYIHYFTQSLKAHKLFHIDVDYVVQDGEVQIVDEFTGRILHGRRYSDGLHQAIEAKEKIKIAQRNRTLATITFQNYFRLYKKISGMTGTADTEAVEFNKIYNLDVVVIPTNLPVARIDEDDVVYLNESDKDKALCDEIAEANKKGQPMLVGTVSIEKSEHVSALLTRRGVRHEVLNAKNHAREAMIIAEAGAKGAVTIATNMAGRGTDIKLGGNPEHRARRRAGTEAAQSDSVEAAKKYAAIFKEEYEKWKTDYAEVKAAGGLYVIGTERHESRRIDNQLRGRSGRQGDPGKSKFFISLDDDLMRLFGGENIKGFMSKVGMSDGEPIYHPWLNKSIEKAQTKVEERNFEIRKHLLEYDDVLNQQRKFIYEQRDAILEDPNLKDRVNTATDDMVASYLDAYSETSRKDPSGAMKELTETLKNKFNYILKTNAEEVKNIETLEKPHLRGTQGRHENKK

SEQ ID NO: 92190 - protein, 138 aa, Unknown
  Obtained from environmental sample
  misc_feature (1)..(138): Xaa is any amino acid
MTTCIMLALVVLGLFSLRALGLDSMPKIDFPIVTVSVVYPGASPDAVEQDVVKKIEEAINPLEQVREISSTSMDSVGIIIAEFELERNPDMAMEDVRSVVSQIRRNLPDTIEEPIVQKIDPSQMPVLSLVLRPISENS

SEQ ID NO: 92191 - protein, 507 aa, Unknown
  Obtained from environmental sample
  DOMAIN (71)...(141): Helicase conserved C-terminal domain
  misc_feature (1)..(507): Xaa is any amino acid
ELLTALKIGFDQVAKNKGQRKAVIFTESTRTQRYVLDLLNVGGYGGQVVLLNGSNNDVISTRVYAEWKERHKDDGTISGSKTADMKAAVVEEFRDRATILIGTEAAAEGINLQFCSMVVNYDLPWNPQRVEQRIGRCHRYGQKYDVVVVNFVNQNNAADKRVYELLEQKFQLFSGVFGSSDEILGALERGIDFERTFYDIVQNCRTDDEINRAFDDLQQEYAEILKEQKDQTIQQVMEFFDEDVTAKLKSCETRTRASLTQFNRWKFNLFAAYGATRVNDSSLAFDYHGKRYIPSWENAKAGGCAFLESNSPIYTDLRDAAKKLDVSVSNIRFNHSALPLAEQTAFFQLGDISGAVSIDKLTYTYGKEGEKEEHLLISIVTDRGAEIDERLFERMMETPATVIGTATPDSRLDKMKAKLLADKRAEIDDANKTSLVQRLGELDAWRNDCEEALIREIDGLRNDIKQKQGQMTANIASLSFQQIVDLQEEINKLNETIVQKQRQMLKS

SEQ ID NO: 92192 - protein, 44 aa, Unknown
  Obtained from environmental sample
  DOMAIN (1)...(39): Flagellar protein (FlbD)
  misc_feature (1)..(44): Xaa is any amino acid
MEIHPDTTLLMLSGKHVVVKEKVEEVIDRIVEYRKRIGGFKNEE

SEQ ID NO: 92193 - protein, 69 aa, Unknown
  Obtained from environmental sample
  misc_feature (1)..(69): Xaa is any amino acid
VKIKTRGYNHGAFHVKTSWYGEPLACIDVHSSNVWMEYSAEINIPDGIHALYFVYKGAGFATLGSFTLE

SEQ ID NO: 92194 - protein, 802 aa, Unknown
  Obtained from environmental sample
  DOMAIN (258)...(410): ABC transporter
  misc_feature (1)..(802): Xaa is any amino acid
VIRGKKGEHQKIIEDARKAGFARARIDGVPVNLDESIKLDKQKKHSIEIVVDRIVIEQDIRSRLAESVETALQTADGLLLVLASDEGKNSEHFFSQKNACPDCGVSIPELQPRLFSFNNPFGACPSCTGLGAKLEFDPDLVIPDPSLSFNEGGVVPYNPDSAWHRSRFESLAKHYKFSLDTPLSKLPKKILDAILWGSRDEIKVRYDNREGTGHFEYQSKFPGVLEDLKRRYLETQSPGIKEWLEKFMSQKHCEDCEGKRLKPEVLGVTVAGKNIWELSRLSVTDSLKFFESVKFNKNEKKISYQILKEITARLGFMRNVGLDYLSLERKASTLSGGEAQRIRLATQIGSSLVGVLYILDEPSIGLHQRDNRRLIDTLLYLRDLGNTLIVVEHDEQTLRVADHIVDLGPGAGVHGGKVVAQGRPEEIMKIPESLTGQYLAGNLAIEIPQERRKGNGKFLKMRGVNEHNLKNINVDIPLGVFTCITGVSGSGKSTLLSDVLYPALANKVYGSNHPEGSYKDIKGVEFIDKVIDIDQSPIGRTPRSNPITYVGGFTAIRDIFANLPESKMRGYRPGRFSFNVKGGRCENCEGGGTIRIEMNFLPDVYITCDVCQGRRFNKETLEIRYKGKNIAEVLDMTIEEAADFFAPIPQVARKMQTLLSVGLGYIKLGQSALTLSGGEAQRVKLALELSRRSTGSTLYILDEPTTGLHFADVKQLMDVIQRLADQGNTVIMIEHNLDVLLQADHIIDLGPEGGDKGGEVVATGTPEQVAALASATAISYTGHYIGEMLAREKKKRKQSGRK

SEQ ID NO: 92195 - protein, 138 aa, Unknown
  Obtained from environmental sample
  DOMAIN (4)...(129): PIN domain
  misc_feature (1)..(138): Xaa is any amino acid
MKNTVIDINIFMDFLFNRRGHENVAELFKFCSNGRVKGFVCAHEITTLCYFLNKAGKDTSKTKEIISKLIKQFTVIEINEALLNNALNSEIDDFEDAVIEVSAIDKNVDYIVTRNTKDFEKSIIQVKTPEEIILLINN

SEQ ID NO: 92196 - protein, 81 aa, Unknown
  Obtained from environmental sample
  misc_feature (1)..(81): Xaa is any amino acid
MSEILTLNMDSEVVKFASTFSRKINKPISRIVEDYFIELKKKNSDDLPLPQNLQDLHGIFEGIDTPDKKELRKMFHEKHGD

SEQ ID NO: 92197 - protein, 176 aa, Unknown
  Obtained from environmental sample
  DOMAIN (6)...(176): PHP domain
  misc_feature (1)..(176): Xaa is any amino acid
MDKKFSSLHTHTVFCDGKDDVETMCRAAYEKGLASIGFSSHAPVGKTGLITTWHMKDEKLGKYIDEINAARLRWEGKLPVYLGLEVDYIKNLRSPLDSDIKDLNLDYTICAVHYLMPPHGEPFTIDGHLEELENGILDGFGGDGESMLNAYLNNVVEMVTLGGFDIVAHLDLVKKH

SEQ ID NO: 92198 - protein, 92 aa, Unknown
  Obtained from environmental sample
  DOMAIN (2)...(89): CO dehydrogenase flavoprotein C-terminal domain
  misc_feature (1)..(92): Xaa is any amino acid
MYALSKDRKNIDRARLAYGVAGPVPTRVPSAEQAAVGKPANGETAAAIAKLVLNDINPRSSWRAGKEFRLHLAEELAKRAIVESLKRAGVSL

SEQ ID NO: 92199 - protein, 456 aa, Unknown
  Obtained from environmental sample
  DOMAIN (143)...(322): Protein of unknown function DUF115
  misc_feature (1)..(456): Xaa is any amino acid
SEADRYIDSLSLNEKIRFFILIEPGLGYMVAPLKRKAPEAKIIALHAEKPRQIPAVQGPMAQVPTVPADSEWCPETGVNVQEFLETEIPDSYAIEIRLLEWRPALNVYGRKYQALVEEAAAFIKRSDASARTTKAFGSRWFKNFLKNLSIIKTVISPVCPANDHLAKISMPFLVTGAGPGLEDAIPIIKRAVKNESASGGLFVLASSSSVAALEANDLIPDLVLSTDGSNWAKLHLYNFFRNNSEKKESRPLAAALTAALPSQCGALPILIISDGSFWQTLILRELQIPFITLPQRGTVTAAALDLAFALTGGQIYIAGMDLANRDIRSHARPYGFDNLIEEKASRVNPAYSQTYKRSSLIKEGGSYGIYASWFEKQLSCYPRPLCPIGKNNSVFDSPKAVLPCATEQVRAVPKFQTIPLNFAFSPCEKALTVLENGLKYSVQSEALQKELKSLIL

SEQ ID NO: 92200 - protein, 279 aa, Unknown
  Obtained from environmental sample
  misc_feature (1)..(279): Xaa is any amino acid
LESEDSLKSADPLESAEPIEFEADIESAITEAPVPAAEPVGIVQKTQASLPVIPVEKETVKETQTLDLSTQLLMKIAEELSSIRSELSTLKKEFSGLRAAPPQAESSEKTYEEDDEKISLTGDEMNNIINTADFTEEAGSDAAIGLSDNEDNSDELNLSTADLDVEIDLIDSNLENLEGETKLGNSSFIDDNIDDNVNENNQISSEARIEIPDDSILDFSSDENDELNDILENGIEPMAPAPAPEDTNYLAEDPLAENSVSEDSLPDLAEMTVDTPLDF

SEQ ID NO: 92201 - protein, 642 aa, Unknown
  Obtained from environmental sample
  DOMAIN (310)...(379): HAMP domain
  misc_feature (1)..(642): Xaa is any amino acid
MEKNQKDNVLFSIGTKLITIISIIVVLSLGSITALVSWMVREDLKIAAEENNFEANRRASEEAEEMLSNIRAASAQLLYTINALSAQKDAAAQQTTAQQAADFFFAQNPRTAAFTYTLKDTRNILVNNNYFLSRDIDQSLAETYFNDNENSMSRAAQGETALLNAAPVFTRPVLALFFPYQMAGEQSGACCVLIASEKLVDSFGSGTNQSFLINDKCDLLIHSDSTLLLNGVNVANFDFIRGIQEAPDRNKQQIVNADFNFEPHTSETSTRKESQYYTAFTKLALGGCIVITGIEYDKVFEGINATTRRNIYLTAAVLFISVMFIWFFSKTISIPLKTLAIAARNIEGGQFKQQFEIKGRDEIGLLGASFHKMSGALHIFGRFTNREIAVKAMRGEIKPGGLNKHATIFFSDIRGFTALSENFTKTFGDKASDKIVFWLNNYLTQMVECVEKTGGVVDKFIGDAVMAHWGTAYSAGSPRKDAFNCVMAALMMRKALYDLNNSRRRDDHGNPAIRIGCGINTGIVTAGQIGSELRMEYTVIGDPVNIASRVESLNKPLGTDILITENTWNLVGSKFITEEMPPVTVKGKERPLRLFAVVNHVDNHKGPFTLADLRELLDIEPPEMSKVDVNAYEEKYRIGAAI

SEQ ID NO: 92202 - protein, 494 aa, Unknown
  Obtained from environmental sample
  DOMAIN (222)...(479): Competence protein
  misc_feature (1)..(494): Xaa is any amino acid
VPFRALSINGLLVLVHIPAAFLCLLWVLASFEKLRSCPTDSKTPWLILNFWTAPRQLRLLIHRTTAFAAGLTIGIAAGASIPAAAHFGIPENTIRGISGTLLDDPRIISGGRAMSTISLRMATGNKGARATASGQITVFFPEEYALRLREFGRGTEVAADGDLREASGGFNMGDYTFMAQALHITKMAPALERFRTGLRLGLTERFTDSRSGGAWAGLALALLLGIRDNLDTGFAALYRDAGCSYILALSGMHLAILVSLISFFLQKPLGLKAAAITGAVIIIAYCFIVGPLPSLNRAALMYLLGVVSVLGMLRRDMLSLLCMAFLLQLAFTPSSGFSLSFILSYLALAGILVIGRAINNVFMGKIPALLLQPLSASLGAFIATAGVSAWFFTDLRPVGILAGLALAPLASVFMVLSIAWLGLDSIIPVLSFLPGKALSLLYRLMEKTAALAAAAPGIKANPFLILLLSLLITVTILWLDRRRRIIAGHLEPFA

SEQ ID NO: 92203 - protein, 346 aa, Unknown
  Obtained from environmental sample
  misc_feature (1)..(346): Xaa is any amino acid
MVKHPEKDEICVIETGDTGNNRISAWNYKAKERLFSLQTGEAASFINYSAGGKYIITADFKGSHFILLDSANGKTISQINIPAGGVTFGITGKTEQNIFLYQGKNEDFEGQILYLDLASRSVIGRFKAPADFSYPVIFGNNRFLAGINSSGLLLTDAASGLLLDSIKDIERGSLLFPLNDGFYCLSRKNNTLYRFSVDRAGKIVTNQKLSLLLDKQESVSAFAVNETAAFAGESGNLFMAALTADRQIKPTQMAHNFQERITEIAANSASVAFLTENGGLCFLPLDYKLIRDNNKFFLEKTNAFTRITAIAPFSNLRNAADPYILWQSDNTPDNAENRIFRFYHRR

SEQ ID NO: 92204 - protein, 140 aa, Unknown
  Obtained from environmental sample
  misc_feature (1)..(140): Xaa is any amino acid
MQTTAMLFPGQGSQSVGMGKDFYDSGENPGPGARKRFEEADKILGRDLSRIIFGGPIEELTETRNTQPALFVVEAVITDVLSSGGVVPMCVAGHSMGEYSALYAAGAVTFEDGLRLVAARGEAMAVAGRENPGAMAAVMG

SEQ ID NO: 92205 - protein, 164 aa, Unknown
  Obtained from environmental sample
  misc_feature (1)..(164): Xaa is any amino acid
MESHLNPETIEKAYALAKPAYAAFGIDTDKTISAAMDIPISVHCWQGDDVTGFEGADGLSGGGILTTGNYPGRARNGDELRADAEFAFTLIPGTKRFNLHTFYAEPAGKRYQGMSLNLNTFKNGWTGQRKIKFPWILTRAFSRIPWPIPALPFQAPTRRSGISG

SEQ ID NO: 92206 - protein, 142 aa, Unknown
  Obtained from environmental sample
  DOMAIN (26)...(134): Alcohol dehydrogenase GroES-like domain
  misc_feature (1)..(142): Xaa is any amino acid
MKTKAIRLYGTNDLRLEEFELPEIHDDEILAKVVSDSICMSSHKLAVQGGAHKRVRHNLAQNQPIIGHEFCGVIEKVGAKWVGKFSSGDKFAIQPALNYLDDSGVPTLWAPGYSYEYIGGDATYIVIPKEVMEMDCLLEYHA

SEQ ID NO: 92207 - protein, 407 aa, Unknown
  Obtained from environmental sample
  DOMAIN (26)...(134): Alcohol dehydrogenase GroES-like domain
  misc_feature (1)..(407): Xaa is any amino acid
MKTKAIRLYGTNDLRLEEFELPEIRDDEILAKVISDSICMSSHKLAMQGGAHKRVRHNLDKNQPIIGHEFCGLIEKVGAKWAGRFSPGDKFAIQPALNYPDDSGVPTLWAPGYSYEYIGGDATYIVIPKEVMEMDCLLEYRADNFFMGSLAEPVSCVVGAFNAQYHTKSGSYIHSMGIVEGGALALLAGVGPMGLGAIDYAIHNNRKPSRLVVTDIDDRRLARAAQLLSVEEAKKNNVELHYVNTRDISDPVGYLKSLNGERLYDDVFVFAPVKPVLEMGGSLLGRDGCLNFFAGPTDTAFSASFNFYNVHYESHHIVGTSGGNTDDMKESLAMMARGKLNPVFMITHIGGLDAAVKTTIDLDKIPGGKKLIYTHKKLPLTAIDDFETAGKANPLFAKLADICGRYG

SEQ ID NO: 92208 - protein, 111 aa, Unknown
  Obtained from environmental sample
  misc_feature (1)..(111): Xaa is any amino acid
MVAVILGVSVCACKSKDSGMTIRSGTLTIGMSIEYPPMEYYADDGKTPVGFDVDMGKAIAAKMGLKAEFVDTAWDGIFAGVETRRYDCIMSAVTITPERLTAHNSQSPISA

SEQ ID NO: 92209 - protein, 430 aa, Unknown
  Obtained from environmental sample
  DOMAIN (240)...(391): Polynucleotide kinase 3 phosphatase
  misc_feature (1)..(430): Xaa is any amino acid
MAGGKGTRVSSIASDIPKPMIPICGRPILEHQIECLKKNGLTEIILVIGHLGGYIKDYFGNGGRFGCGISYYDETEPLGTAGALYKLKNISDDFILLNGDIIFDIDFQRMINFHREKKAQVTLAVHPNSHPFDSALIVTNDNNQVTRWLNKEDERAYYKNQVNAGIHIISAEFIENCPQSKEKVDLDRDMLKPSISGGKIFAYSTPEYIKDMGTPERYAQVTSDIEEGIVGQKNLSVKQKCVFLDRDGTINKFNNFITKPENFELIEGASEAIKKINSRGYLAIVITNQPVIARGETDFETLDLIHMKMETELGKHGAYIDDLFYCPHHPDKGFPGERPEYKIECDCRKPKPGLILKAAKKYNIDLSRSYMVGDDTRDVNAGKNAGCIPVFLTNDKPVEGMNNIKTFANLRDFTELFLSREEIYDAALPA

SEQ ID NO: 92210 - protein, 332 aa, Unknown
  Obtained from environmental sample
  DOMAIN (1)...(329): DegT/DnrJ/EryC1/StrS aminotransferase family
  misc_feature (1)..(332): Xaa is any amino acid
MDAVLTAMVEDRIGPGEQAKLLVQTVREKIKFDYCLSLRSPAIALHMALKSLNIEMGQGVLISALSPLYFRRVIEDLALIPHYCDVNPSTACVSKETVSKALEGGQDIKCMILHHTLGFVPNSDVVSELGIPVIEDCSRSYGTEIIKEENAASAPIFTPVCTILGLEERDMLTSGGGALLYSLNRRDAALLRGHSDLPPEYGLPDMNAALAVVQFKEAAKNLLKRREIAELYTQSAVRTRHKMFIRQGTEYNNYAFPLILETGLNDVKAYARRKEIAVENAFENTLAGSGAVPPEKCPHAYSLSLRTVLFPLYPRLGMTSAGKVAKLIMTLP

SEQ ID NO: 92211 - protein, 108 aa, Unknown
  Obtained from environmental sample
  misc_feature (1)..(108): Xaa is any amino acid
MKRRAVLLVNPQKGGARKLGNEILKELFSMNIEADIYSIKDRPVISQDKKYSVAIVLGGDGTVLSAARAVSPFGIPIFPLNLGTFGFIAEVQPLEWRDVFGKWMAGKV

SEQ ID NO: 92212 - protein, 312 aa, Unknown
  Obtained from environmental sample
  DOMAIN (8)...(312): Bacterial protein of unknown function (DUF853)
  misc_feature (1)..(312): Xaa is any amino acid
MDTNESGEHKIWIATGKNPVYMNPKMVNRHGLVAGATGTGKTVSIKVLAEALSDMGVPVFMADIKGDVSGLCMAGEPNSRVDERVQSMGIPNFAYSAYPVRFFDVYGKKGIPVRTTISEMGPILMARILGLNETQTGVLQIIFKIADDDGLLLIDFKDLRAMVQFVGDNAKEYTTKYGNITSQSVGAIQRGLLTLSSGGGELFFGEPALDIKDWLACDEKGRGFINILDCVTLFQNPLLYSTFLLWMLSALYEMMSEVGDLDKPKMVFFFDEAHLLFTDTPKALLQKIEQVVRLIRSKGVGIYFITQSPSDI

SEQ ID NO: 92213 - protein, 316 aa, Unknown
  Obtained from environmental sample
  DOMAIN (105)...(139): Putative Fe-S cluster
  misc_feature (1)..(316): Xaa is any amino acid
GFHAAGDLLDEFDPSIPLEVPVFLELLACPGGCLNGPGVTDATSGIIRHVRLRDYADSADNTLDSGMLSQSPLIDVDYPLAPLPELKHTEQEITEALWKVGKDSLADRLNCASCGYNTCRDFACALLDGRAEKSMCAPYMRKLANKTANSLIKSIPSGVVIVDRDLKIIDCNERFAHLLGGEAEELYSLMPGMEGAELAKISSFTQYFQTIIDPSGPETATSDVRVGSKIFHLTVFAVEKGIAAAGVVEDITAPRVQIETTVERARELIKKNVSTVQQIAFLLGENAAESESILNSIIDSYTIKEEEKEEEEEEDA

SEQ ID NO: 92214 - protein, 164 aa, Unknown
  Obtained from environmental sample
  DOMAIN (12)...(35): 4Fe-4S binding domain
  misc_feature (1)..(164): Xaa is any amino acid
MNAAIMNAKAPVYTELAECHDCYKCIRKCPVKSIKVEKGQASILFDRCIYCGRCVMSCPAHAKHYRNDIEKVKLLLADGRKAVVSLAPSFVSEFTDWKPEELIAALKKLGFAAVSETALGADFLSARIARDLASLTARNAASGAAGSSPLMISSACPVIVEYIK

SEQ ID NO: 92215 - protein, 81 aa, Unknown
  Obtained from environmental sample
  misc_feature (1)..(81): Xaa is any amino acid
VNTITVCMGSSCFGKGNAANAEYLTRFIEEHNLQNSVEVSGCLCCNACARGPNIKINDKLISGVSEQTVADIIRKELGLRS

SEQ ID NO: 92216 - protein, 80 aa, Unknown
  Obtained from environmental sample
  misc_feature (1)..(80): Xaa is any amino acid
MKKVTVCIGSACHVKGAGSIVEQLQSLIAQKNCGDKVELAGAFCMGKCATGVSVTVDDEYHSLQPENTKKFFEEQVMKKL

SEQ ID NO: 92217 - protein, 229 aa, Unknown
  Obtained from environmental sample
  misc_feature (1)..(229): Xaa is any amino acid
MKFPWWGTASYRELAPLSAVFAERIKVLSEIALGKPGIVIIPERVFLSPLPPSEYIKSLLVSLVPGGSIDTLSLAKTLISYGYIRVPRVQVQGEFALRGEVLDIFMGADYSSEGTEEAYRVLFDFNTIESIKQFDPALQGTGSVKLSRLVIRPMKEVVWTDERIEALEKNLASFKEFSDGGKSVIERLITHRSVQGEEMFYPLAFEKAGNLLDYLDASGTLLLIDRERL

SEQ ID NO: 92218 - protein, 846 aa, Unknown
  Obtained from environmental sample
  DOMAIN (448)...(610): Type III restriction enzyme, res subunit
  misc_feature (1)..(846): Xaa is any amino acid
MRGEFALRGEVLDISMGDEDDAGDDSAGAAFRVLFDFDRVESVRRFNPSTQGAGPGKEKLGELQIRPMRELIWTDDRIETLSANLAECKEFSDGGKSVIEELITRRSFSGEEMFYPLAFTPNSSRGGAEARRFNILDYLGNEGTLVLVDRERLDNAQESIGREYQSLYMRSRREAQGREFPLPERLLLNFKELIEKFQAEKTRKIISFLSIKSEAGPGCCRVSIPCEPSRSFFGNINYMKDEFAALHASGWHIAVAAESEVQAQRIESMLVPHESLSIIASPLSSGFSLPELKLMVIQENEIFGRRKRPPRSLKTVRSSPLDTFVELNPGDYVVHVNHGIGLFKGIERINTLGFERDYIQLEYAGDETIFVPVEQVNMVQRYIGNEGQPPRLDTVGSKSWENRKGRVKQSVEDIAQRLIDLYSKRKRSQGFAFPQDSEWQTMFEAAFPFEETEDQLRCVEEIKQDMESSSPMDRLICGDVGYGKTEVAVRACFKAIMGGKQAAFLAPTTILVEQHYENFQERFSRFPVRIAMLSRFVDRKNIRLVLEQVKNGEIDLLVGTHRIIQRDVQFKNLGLIVIDEEQRFGVKDKERLKELKTNVDCLTLSATPIPRTLHMSLVKIRDMSLLATAPPGRHPIETFVDEYDDKKIITAIRREVERGGQVFFLHNRIETLKDTRHKLEKLLPEMLIETAHGQMDAQELEDVMRRFIHGGFHVLVSTTIIENGIDIPNVNTIIIDRADMYGVSQLYQLRGRVGRSDRIAYAYLFYPQQKSLSEIAMKRLQTISDFTELGSGFKIAMKDMEIRGAGNLLGREQSGDIYSVGFDLYVRLLDEAVKRLKIQITNLIRR

SEQ ID NO: 92219 - protein, 270 aa, Unknown
  Obtained from environmental sample
  DOMAIN (60)...(270): Conjugal transfer protein
  misc_feature (1)..(270): Xaa is any amino acid
VTEEEADQRERTRREADLNIIEVKNDIFVPVDSTTQRALTKDQVVQNAMQEAMVTPKNFIGGTQFYDYNEHKQYPIVCKVLGLSVLQLEDGEVPIGVPYLSDTLRWEITGDVWRTQDGRNIQLVMIKPLETGLSTNMVLVTTKSIYQIMLTSTRDSYMPMVRFRYPMQMNMYMGTQFNTMHTIEEQRIRKEKEDEGYYLSYNYKIKSGWFKPEWTPTEAWDDGHKTYIRLPRGVLQMEYPTVFEGSTYIVNYRVNENVTDIGQAHKKATL

SEQ ID NO: 92220 - protein, 333 aa, Unknown
  Obtained from environmental sample
  DOMAIN (209)...(313): Peptidase dimerisation domain
  misc_feature (1)..(333): Xaa is any amino acid
MELEKLIIPRFLNYVRYDTESDRHIEKTPSTEGQWELAKILRDELLALGLKDVKITDHCYVIARLPTNTEKENVPCIGFLSHLDTASDVSGKNVKPQFVQNYDGGKIELADGLCLDPEKEPGLAEQKGKPIIHSDGTTLLGADDKAGIAEIMAAVEYFVSNPQIEHGQVEIIFTPDEETGKGLPEFPLKEIKSAFCYTVDGGPLGEIESECFNAWKADIEFYGKVIHIGHARGILANATLMAATFATLLPRNESPEATNGYYGYYCPMEIKGDLEKATLEIFIRDFENSGIERRITALKVFAQTVKTQFPGGEVIVKTQPQYYNMKSKIDEKP

SEQ ID NO: 92221 - protein, 171 aa, Unknown
  Obtained from environmental sample
  DOMAIN (32)...(153): Domain of unknown function (DUF477)
  misc_feature (1)..(171): Xaa is any amino acid
MKTKAIKFCLTLLIIFFVSPVFARENIIDNAGILSREEKESLLALISSAASVYNFDLVIVTEKKIGSGSAEYADAFFDKKGYGLGQNRDGCLFLLVTESRDYSFSTSGRGIKILNSAASDKLESSVVKLLRQGGYYGAFNVFLTDWKEFLALDAKGRNYNFFHQWNLVLVL

SEQ ID NO: 92222 - protein, 299 aa, Unknown
  Obtained from environmental sample
  DOMAIN (4)...(119): Response regulator receiver domain
  misc_feature (1)..(299): Xaa is any amino acid
MDKRRALLFEDSKIFADVLLHVLNEQGYETQLAKNGLEGIKLVYSFLPEIIITAVEMPLFKGCESVRFLKSRPATGKIPIIMLTNAGETSDKFWGEQAGADVYIEKSPENFNELSAQIQRLLNENREINFEAIKKEGEKITDNSLIETVNNILDNKLFQATLIGMLAELSSKVSSLEETVKGVFALLRNACKADMCSIMIKDADDALVVYNANNLGYTEAIAEDFKAITIADFNTRFSDYKVDSKEVYDFFPAGEINERIESYILIPLVNSGDEFATVHIGTSVKEYFSPLILENLNVF

SEQ ID NO: 92223 - protein, 389 aa, Unknown
  Obtained from environmental sample
  misc_feature (1)..(389): Xaa is any amino acid
MKKLFTKITDFETWLSTQPDNTPATAYNVALNGDDFGAKNAAPGSLRYLLGANKTKYINLDLSGSSITDIRQGAFFNCTNLTSVTIPNSVTAIEKNAFNSCKNLTRVTMGNSVTSIGEFAFWHCTSLTSITIPNSVTIIGERAFGGCTSLTSVTIPNSITSIGRYFFWGCKSLTSITIPASVTSIEYYAFMDCDSLTALNVDPSNENFNSDQGILYNKNKTILVLYPSGKKGSFTIPNSIKSIGDYAFSYCTNLTSITMGNNITSIGRGAFDGCSGLTSVIIGNSVTSIGESAFRDCTKLTSINIPNSVNSIGGGYSSGAFQNCTSLTSITIGNNVTSIGDWVFYDCKNLANITIPDSVTSIGWVAFEGTAWLDNQINGVVYAGKVAYI

SEQ ID NO: 92224 - protein, 108 aa, Unknown
  Obtained from environmental sample
  DOMAIN (28)...(102): GTPase of unknown function
  misc_feature (1)..(108): Xaa is any amino acid
MAEAQKKYSVEFVCSAAHFKELPAPVGEEYAVLGRSNVGKSTFINHSLACGPLARVSKKPGKTTLANLYKLDAGLFWVDLPGYGYAEASAAEKDRWSKLIADYCSKRG

SEQ ID NO: 92225 - protein, 520 aa, Unknown
  Obtained from environmental sample
  misc_feature (1)..(520): Xaa is any amino acid
RDVLGFCGSSKFKDRAEIETLLAACLYRLGRYEEVAKIDFTQPVSAKLSEWNQALSLFSAFKVSSAGNIVSAGIAQETKREITDFLFGSLSDDVRRWANGEAFSSTGLLDSVELSALSARPMQRNYGETLLKLRPALSDGGSLFFCYPDLIADLGRAYQYTPSLRDEGVRLFKGWAELLDGQKEDETTKRCKYFVNFFAGRIERERTKYAESTEYFKRALEFSPDELQSDACHWYLLMNAMAGSPAAAMRQALATMSQWNDVNYFSDVLDSLSCYFIGKRQWNNILELFHGLEVTGPSRSLGQYAWIVGRAVQEGYIKTECQGTAGHRIEGSAENFFRIAFEKGKDSFYYRAMAASAMGVPFAVEEDKSSEKTQDNSGPGSELEFLLGFFEYGASSFALPYIQSIEKDLSPTELRKVAEALAASDRWKDSLDLVSRYTSRKNYELTRQDLFLFFPQPYREFIEKYAGEAKLGAEILYGLIHTESYFVSDAISRSGAVGLVQLMAPTAVDMAGRIARSGGP

SEQ ID NO: 92226 - protein, 87 aa, Unknown
  Obtained from environmental sample
  misc_feature (1)..(87): Xaa is any amino acid
GPEHAYLHEIKRAEYVPINDEEAVCAFEYLAKTEGIICAIESAHAIAHLRKIAKNFAKDENIIVSLSGRGDKDVAAIARYRGIKVHE

SEQ ID NO: 92227 - protein, 512 aa, Unknown
  Obtained from environmental sample
  DOMAIN (51)...(415): PEP-utilising enzyme, TIM barrel domain
  misc_feature (1)..(512): Xaa is any amino acid
MGTPCVAGAKGISVQGNTVVIGNKTYNEGDWLTIDGTTGEVFEGQLPLVAPAISKDMNTFLKWCDEIREQSVRGKVKGFQVWTNADQPEDAKRAFDFGAQGIGLCRTEHMFFDKDKLKHFRAMIVADSDEERRKRLKEILPLQQKDFYGIFKAMEGRPVIIRLLDPPLHEFVPHTKAEVEELAADLHVSPESLQPKIDRLVEANPMLGHRGCRLAITYPDIYDMQVEAIARAAVECVKQKIPVNPEIMIPIVITARELKFLRPNAEKILEKVFGDAKVKVPVKIGTMIEVPRAAIRSAHIAHYADFFSFGTNDLTQMTFAFSRDDVASFLPVYLEKNVLDVDPFKTIDEDGVGGLMRVGITMGRAVKPDLKIGICGEHGGDPATIDFCYRAGLSYVSCSPFRVPLARLAGAQAVINNSGKNVKGGETAKAAKPASAKVKGRKKPGREEKKMAEGTVKKTAAKKPAAKKPAAKKTAAKKPAAKKTAAKKPAAKKTAAKKPAAKKTAAKKPAAK

SEQ ID NO: 92228 - protein, 266 aa, Unknown
  Obtained from environmental sample
  DOMAIN (169)...(232): MazG nucleotide pyrophosphohydrolase domain
  misc_feature (1)..(266): Xaa is any amino acid
MTSDTTVSESFKELYDIIIKLRGPGGCPWDQEQTPTTLRGALIEETYECLEAIDENDPDHVCEELGDLFLLATMIGYMHEQEGKFSVADALTKINSKLIRRHPHVFNGLQVKDSAEVLDNWAAIKINQEGRKPKDSILDEVKAGFPPMDRAYMLQKKAAKFGFDWPDTAGVIEKIREELNEAQEAAHSETEADKLEEELGDLLFSVINLCRFLKVEPSVALRRTNGKFIQRFGYVEKKMKEAGHEMKKENLAIMDKFWNEAKNNNF

SEQ ID NO: 92229 - protein, 307 aa, Unknown
  Obtained from environmental sample
  DOMAIN (9)...(306): Phosphofructokinase
  misc_feature (1)..(307): Xaa is any amino acid
MAANKVATKKFGILTAGGDCPGLNAAIRGVCRAAHDRYDMEIIGIANGFRGLIYEDTRKLKPEDFTGILTRGGTILGSSREKPFGAADKDEVASDKVSAIKETYQKLELDCIVLLGGNGTNTTGFKLAREGLNVIGLPKTIDNDIVGTDMTFGFDSALSIGTEAIDRLHSTAQSHSRVIVIELMGHKAGWLSLYAGVAGGGDVILIPEIPYKIDEIASHLEKRARSGKTFSIVVAAEGALSVKEAQMDKKERKKYRLENGPSAAYRIAREIAEATEMETRATVLGYVQRGGVPSASDRVLATSLGSP

SEQ ID NO: 92230 - protein, 357 aa, Unknown
  Obtained from environmental sample
  misc_feature (1)..(357): Xaa is any amino acid
MGAKKRFIDPLTDLGELLLSVEKPGRYTGGEYGRLLNKHSPKLTESVLSAVIAFPDLYEIGMSNQALKILYNSLNGIEGIFCDRSFAPAPDFEGLLRNRNLPLYGLDTGIRLGDVDLLMFTLGYELLITGLLTMLDVSGIPLRRRDRGWDDPLVIMGGPCVSNPLPYADFIDAFWIGEAEGGFFELASDLRDIKKTGGKRDDLLNKLVTHPSVWASGKGKAVRAVDSSFSDRPASHAVFPIPSMKVVHHHGAVEIMRGCPNGCRFCHAGYWYRPARQKDANLVEEEAGFLVKGGGYREITLSSLSSANYQYLEDLLDHLNAKYSPHHVSFQLPSLRVSSFSLNLLEKISMVRKSGLT

SEQ ID NO: 92231 - protein, 280 aa, Unknown
  Obtained from environmental sample
  DOMAIN (30)...(277): Penicillin binding protein transpeptidase domain
  misc_feature (1)..(280): Xaa is any amino acid
INPETGKNLVLTIDRKIQTLAEKALGMRMGAVVVLRPTNGEILAMVSYPWYDPNIFNQTDLEEAYLALLDDPNKPFINRAIQSSYPPASTFKVIMTTGILAENAFPLEQLVECKGEIDYGDRQWHCHIRRGHGRLNLQRAMAQSCDIYYWTVGRDYLGIENIITYARDYGYGDATGIDLPGEISGFLPTPQWKERRLHERWQGGDTMNTSIGQGYTLVTPLQMANMAAMVVNDGVIYKPHVLKEVRDPKTGAVETSVVPRVLHKSDVDKSVFAMVRRDMR

SEQ ID NO: 92232 - protein, 389 aa, Unknown
  Obtained from environmental sample
  DOMAIN (130)...(233): Protein of unknown function DUF58
  misc_feature (1)..(389): Xaa is any amino acid
MGLLILLVIIIAFTAAALRQEAGLALTGAVFFLPWFYSLVMTLVLALIHSRRARRAFIRLSPRELAAGTQAEAVYSEGNTVASVGRILQLPGILVRCRVLLATKDGRRISHDFNPNDYDSEKSPHFFTVKKRGAYFSAYDEFALFDVFGFFRFAFLLSAGANARLLASPGAAQEPVSVHARAGESNQQPEFSFQRTDNLIDHRPYIPGDDPRRINWKLYGHGGGLFVREGEREPPPHSNIVIMVDCEYDQSLYKLAEAARGIDVLCENAMAAAQACMESGMDVLIGYTGVVVKAVKDRSDIPQLLPAKQASSLAWPAALPISAFPEIPPAFMPPAPDDYSILILALPRSASDTALDRFLKNTAARRAGKNNTVDLIFFCDNGVIQRQRQ

SEQ ID NO: 92233 - protein, 268 aa, Unknown
  Obtained from environmental sample
  misc_feature (1)..(268): Xaa is any amino acid
KTIAVATLLLLVFIGGFLFLKPSQRRAAQKGGGLLEPKLFSFDFSQVLRLDTEISMNDDLVLIVKKDPADNHILMRRSVMSGYSKKQGFYRMEEIDEKIHPLRLPSRPVEFQREGFKMASQVRQEYFIVNFDAAAFIGMKEPIEIIPYENWDASSFKTAYLVESLTSDAGYEHYSQSTYNEDGDLFWPGPAELGLSEKEFALYTAYGNDERIRALAEEITADYERYGDKAEVIYEWLKYGDFRYSLKPGIAPDGDQLAWFLFQSKKGY

SEQ ID NO: 92234 - protein, 605 aa, Unknown
  Obtained from environmental sample
  misc_feature (1)..(605): Xaa is any amino acid
ILVPPSPELMGCFGVALLSKRKHADGLLEERPVVIDDLLNREIGYERVFTCQACENLCPIQVLSIASADASSSKESASRKYMFGGRCNKYTNMRKQVKDVPVFDYVEKRQKMIFEEYSPHSPLPVPYKRNYTVGIPRAFSTHTLYPLYSWFFYELGIKTFLSSEVAHEGVARAESTYCFPAEIAHGAVQDCLNKGADFVLLPHFRDMPSYEDKVHANFCPITQGLPYYIEKAFPDVDKKKWLPLVVSFKFGEEKALELFQVMNEKLGIGEEETRVAFEKALAKQNEYFAAAKKMGLQALEDARKADRPVIAVLGRPYNAFTPEANMGIPRKFITRGYSIVPFDILPFEDEEIFSNMYWYYGQQDVKAASLLKNEDNIYLTFVTNFSCAPDSFILHYIKWIMGQKPFLVLELDSHSADAGVDTRVEAFLDIIDGYRAKKSELEAERFDNGWRYVYDPTASSPEDRLRLDNVKSGEKVRIRNNKRVKMLLSNMGAITTEYMGAAVRSFGINAETLPVATGKTIQIARAHASGKECVPSHLVLGSALQFFCSEKYRKDELYLLFVPITTGPCRTGQYYIYYENLFKDLRLENVVVFILSADNSLHELG

SEQ ID NO: 92235 - protein, 409 aa, Unknown
  Obtained from environmental sample
  misc_feature (1)..(409): Xaa is any amino acid
VSSLSIAQTKVSVIVLEGTIPGTVSAVKSGAENKGVGTITVSGSPRNEYKITVAIESDGGLNEATFRLTIDGQSGKLITVPDGEAKHEISGTGLTLQFNPGTGFKEGDSFCFETTAPSATNGEVLAAIDKIFDAKLLIEFIAITGVSAAPMWAALATKANRAEGIYQYLFFVAQARYLKKNETLDALVNALCGEERGTVGSTRLQVCASYIEEADVNGQIDLRPLINTYCGTLASRKVQDGPDAVKFGGIDAATALMPEEINDGHIENLKNAGYVTARKYVGRKGIYITSGQMMSEEGSDYDLVERRRVMDKACRNLYVAQLPAVNDTVTISKDGSPEGIEMFVAKSQSPLDIMKTNREISDGYVIVPPGQNILADKKLRTKVRIVPLGKMSYIENEIAYMNPALGGAE

SEQ ID NO: 92236 - protein, 284 aa, Unknown
  Obtained from environmental sample
  DOMAIN (30)...(284): Bacterial extracellular solute-binding proteins, family 5 Middle
  misc_feature (1)..(284): Xaa is any amino acid
VDAGVAWNYVTNQVTNQITEGLVTLDANNNIVPELAKSWSQVDDLTYVYDVRDDIFFSDGTKMTMDDVLFSFERAKDPDGGTYFSDFFSDVESFTVNGWQFIIKLQSPSAVFKYVPAIGSGRIISKAYYQKHEKNFGTAAGGIVATGPFVFHKWTSGREIILKKNYNYWEKERQARNIIDTLVFKIIPEDTTRVIALQTGSVDFCVNLPEDMLDQLAADKNLTFTIMDSFKLTYLALNTQRAPMNDVNVRKAISRAMNIPEFQKNIIKTAGTAGTILPFGKALY

SEQ ID NO: 92237 - protein, 248 aa, Unknown
  Obtained from environmental sample
  misc_feature (1)..(248): Xaa is any amino acid
MPVRVLERLGAKQFAMRKKDLEGGGINFCSFISVMGLALEAALLLGEILFVLMTASLFFPTAIEYLEENTQIVEIFIFAAFCFNYILVESLYVCMGFGLYINSRVEVEGWDLELLFKKFARSVKIALLVCFFTALSFSAYSQNASDFPDDFPVADAQAVLDLQEILASTDFGSEREGWTIRFKDRDYEELPDLDFEAGLEKIRTFFGFFLRFFVVLAILTFLVFVFYWLIKNASSDYAWKIIRQETLQ

SEQ ID NO: 92238 - protein, 286 aa, Unknown
  Obtained from environmental sample
  DOMAIN (140)...(205): DHHA1 domain
  misc_feature (1)..(286): Xaa is any amino acid
MTGENRVITALGFAGIPATEIVGLRALVEAQGLKDKELSTGQVVFQLAPCINAVGRLGDPRRGAELLLTADAALADLYARELKEANIERRALDSLAAEEALKWVEEHCAPENDYGLVVANPGWHVGVIGIVASKVVERYNRPTILISIGEDGAAKGSGRSVPGLHLLQALDGCADILDGYGGHAAAAGVSLRADKIDAFRERFNEAVKSKLREEDLAPRVTADVETPIDQLTPKLLRIIKQMEPFGPGNMRPVLLTKGLKHRYPPKIVGQKHLKMSLTDGKAVMDA

SEQ ID NO: 92239 - protein, 329 aa, Unknown
  Obtained from environmental sample
  misc_feature (1)..(329): Xaa is any amino acid
SLNNLWEYTGLPAGLHADWNDCLRLGAKGVSVFVALQLYYAFEIMIRFAKFKKDSATEQEMTKQKTRFGKIIEKYCWKDDRFVRGITEHDVTVGKKGDPEASVWLNPQSWAVISGYADKERGKKILDLVHKHLNTKYGARLMSPPYRKHAFDGALALLFNPGTKENGGIFLQTQGWIILAEALLGHGNRAVEYYLESCPAAQNEDADTRLMEPYVYSQFTESVDSPFEGRSHVHWLTGTASTVMVGCVEGILGLRPDIEGLHLAPAIPSSWKSFSMEKVFRGKKLKIIVNNPNGRESGCQKLTVNGKEVESNYIPASILKAQNEIILDI

SEQ ID NO: 92240 - protein, 162 aa, Unknown
  Obtained from environmental sample
  DOMAIN (58)...(161): Acyltransferase
  misc_feature (1)..(162): Xaa is any amino acid
MIKTVLGFGYLVFAMIFLLPFAITALIISLFGLRKPMMHVIYRLAQLWALSLLPIAGHTTVKGRENIPKKGGVCFVSNHCGFFDIILLVAFCGRPFGFIAKKELAYVPFINIWIYMLGGFFIDRGNVRKAIATINKGVKRIKAGGGMIIFPEGHRSKGQGLL

SEQ ID NO: 92241 - protein, 176 aa, Unknown
  Obtained from environmental sample
  misc_feature (1)..(176): Xaa is any amino acid
MIKYLAVFLLFINFTVYAQDIETARLNTIKYGTETEIAALIQTLRTENTDSLDNELTALIDNTHNTKILCGVFAFFGEREKSGLEDRAIRAIEERDDEANETVLSAVDYLGMVKSAKAIPVLMNLLDTEEKRFMNNGFRALGKASSADKEKANDAVDFLIDFYNTRDMGNNTRDVI

SEQ ID NO: 92242 - protein, 190 aa, Unknown
  Obtained from environmental sample
  DOMAIN (28)...(163): FAD binding domain
  misc_feature (1)..(190): Xaa is any amino acid
MELFPCEAEICYDDLMSEHTTFKVGGPADCRVCPQGDNFTSFSAELIHRARKAGIPVFILGGGANIVVGDKGIRGIVLDTCAWKGAEVKDNVVSFNSGTSMDEAAEFAAAHGLSGLEFLAGMPGTIGGAVYMNARCYGSEIADVLAWTQIIDFSAAGMPEEKRVLTDKTVFGYKRSPFQGKDNLILCAAF

SEQ ID NO: 92243 - protein, 291 aa, Unknown
  Obtained from environmental sample
  misc_feature (1)..(291): Xaa is any amino acid
AVFPSGCSITIDMYDSDGNGWDRAALKIEVNGKELPAKATIINGDSNSYVFNVTNGDLVNIYWISGDYDSECSFIMYYTDKPPIPEFTASNNYSWSGVNALIYKSFNSLNNISSGTLVSSFTVEGRTIIDISTIKGVTIPTIGGIPVTAITENAQYVGTVSWNGNPSIFAGSTAYTAIITLTPKAGYTLHGVAANFFTVAGAASVSNAANSGIITVVFSETAKINVSISINAPVKSATPTATASSNTENESNFSIGPVSWSPAHNPFLGGTVYTALGTLTANGGYTFIGLN

SEQ ID NO: 92244 - protein, 440 aa, Unknown
  Obtained from environmental sample
  DOMAIN (1)...(76): Histidine kinase-, DNA gyrase B-, and HSP90-like ATPase
  misc_feature (1)..(440): Xaa is any amino acid
IIVFCVRDTGQGISEEHMCRLFEDYMRFNRDKNRTVTGTGLGLSITKRLINLMNGEIRVESQLDKGSVFTVRLPQRRLGEAICGAKTARQLREFDFHTTVIANKTRIVHDYMPYGSVLVVDDVKSNLFVARGLLAPYGLQIDAIESGVKAIEKIRDGNVYDIIFMDHMMPVMNGIEATKILRDMGYNRPIVALTANALVGQAEMFMQNGFDAFITKPIDTRKLNAVLKDFIRDKKPPEIVEMARQEKNKNDAKGKGIPPEKKINSAELENFFLIDAKNALNKLEEIYARINALGERDIELYEINVHGMKSALANIGETKLSERAGELEQAVKEKNLMAMSGETPAFIDALKLVIEKMGSAKDSDSARITDEDTAFLREKMLEIKTACEAEDKKAAKKAMSDLKQKKWPNSINDVLDGLSVHLLHSDFEKAASAAGELAAS

SEQ ID NO: 92245 - protein, 128 aa, Unknown
  Obtained from environmental sample
  misc_feature (1)..(128): Xaa is any amino acid
LYEIAKSKQNPRKISPLIEAGAVSAAILTENGNVYTGVCIDTASSLGMCAERNAIANMITNGESKIIKLVACIEDKVGMPCGACREYLMQLDKNSGEMEILINIETMETKKLKEFLPMWWANEYFNMV

SEQ ID NO: 92246 - protein, 578 aa, Unknown
  Obtained from environmental sample
  DOMAIN (2)...(158): NACHT domain
  misc_feature (1)..(578): Xaa is any amino acid
MSGEGKTTLAKGFLQWLEDTNGLGDRVFWFSFEDIHGADYVIDTLAGELLGMQTLALPREERLSAVVRKLRAGRYFLLWDNFESASGIPGTEVSALMPEDDRQRLKQLLRELRGGKTKILITSRSTEEWLSVQECFRFPLGGLQGEELWQYCEAVVADLGLKINRDVHFTTLLDKLEGNPLAVRAILLRLKDRSAEMLLTELEISFNGMEGDESTKRILAALEVFKKGLDKAFAPVLRLLGLHEHFADAKFIEFMLKNSDPDGIAYVDKCFAALESAGLCSLFVERIYKLHPALRSCLTGLHPAGESDKRAFVDLMGSFANTYSGKELHEQRDVFLLFGANFYRALSFAQELDIRDNEMALIQALASYAYNAVNFAEAEMLFKKLVDTAQNYNITEYEANAYHQLGTIAYKRRDIDTAEGWYKQALVIAQKLDIGHSIALIFHQLGTVADKRGDLDAAEDWYKRSLVITQKQGDEHGMAGTYYQLGIVAYKRWDLDTAKDWYKRSLVIAQKQDDEHGIALIYHQLGTVAEGRRYFNAANGWYNQSLTILERLNDRHNANIVRESIARLQTLKSDKPDG

SEQ ID NO: 92247 - protein, 420 aa, Unknown
  Obtained from environmental sample
  DOMAIN (46)...(207): Protein of unknown function DUF115
  misc_feature (1)..(420): Xaa is any amino acid
MAGEAVQRAIEKISADYSVQAHFGMRWFSNIIRNIGIAQSLTPDASYINNAAISDAAICAPLVAATNVAICAAGPSLNAQIPLLRERRRTGLFIIAADTSLPALLAGGVKPDAVVSIDCQHISYYHFIGSACADIPLFLDIASPPLLSGFSRSSFFFAGGHPFAAYISQKWMPLPHLDTSGGNVTYACLSLAERLGACRITVYGADFSYPLGNAYARGTYFYPLFERTQNRLSPLEARVSSFLYRGPFLPPENGGSRSSVSPCYETSSLRFYRKSFEEKASAMEAEVIAERGLGIPLEIRKNASCGPCPRERAPEAQRKKKEEKRRNSNKPFASGGRIDFAPNKPLMDSREFLDQYKKDIKALPIFDRNMSLNANERQVFMTLLPLLAAIKRRRPELAAQELIEAAKAHCVKEIEYVLRE

SEQ ID NO: 92248 - protein, 331 aa, Unknown
  Obtained from environmental sample
  misc_feature (1)..(331): Xaa is any amino acid
MTMSRVRSLIKFANNKFLVFSCILFLVIALTAITAYSISTHQINHSFIEQQLSIASETIRLRLATAVDSELALLLKMADTSVIRQYFLNPSDPVLKSQADAEFGIYQEHFENKLLFWVSDVDKIFYSTGNEPYVINPDDPASYWYNLTMYETEKFNFNINYNPDLDQIYLWVNVPVFADLNAPKKSIGMLGIGINLTDFSNFVASSYREFDKNITPYMFNKYNEITAAVNYHLVENKVRLDELLGETGKELISVAHALSAGESRSFIYDKKIYLVDCIPAMEWYLAVSYPLPGLFSLNKAMNTVFFSMLFLIFFLFIVINIFIARWKAQWR

SEQ ID NO: 92249 - protein, 116 aa, Unknown
  Obtained from environmental sample
  misc_feature (1)..(116): Xaa is any amino acid
MKYINFDKTGAYKKLSEYAKKAFVFRDKLDSKRVGECVVPMAAGLKYSWAAKSVDGETVKLLQELAAEQELIAKYKALLDGEMMNTGEKRKVLHHLSRGQQGNPVVENGKDIGEFY

SEQ ID NO: 92250 - protein, 737 aa, Unknown
  Obtained from environmental sample
  DOMAIN (634)...(737): Response regulator receiver domain
  misc_feature (1)..(737): Xaa is any amino acid
MNPADPVLKSLAHTEFALFQEHFENKVVFWVNDTDRIFYSTGSAPYVVNPDDPASYWYNLTLYETEKFNLNINYNPDLDQINLWVNVPVFDETNDGRKPIGMLGAGINLTDFSNFVASSYREFDQNITPYMFNKYNEITAAVDYSLVEKKVRLDELLGETGEELIKAAHELSKGESQSFNYDNKIYLVNSIPEMEWYMAVSYPLPGMFSLNHAMNTVFFCMLFLILFLFIVINIFIARSENAMTEQNLRLLEANRKAEFASRAKSDFLAKMSHEIRTPMNAITGMAELLMRGELSNESRGYAQDIKQAGNNLVSIINDILDFSKIEAGKLEIIPIKYLLSSLINDTINIIRMRLMEKPVRFFTNIDGNIPNSLIGDEVRLRQILINLLSNAVKYTEKGHIGLTITMDKRDDKQVRLRIAVADTGKGIRPEEQAKLFDEFVQIDMKKNQGIEGTGLGLAITKRLCIAMGGDICMESEYGKGSVFTAVIPQGIETEVPFAAVEEPEKKKVLVYEGRTVYARALGWSLENMGVPYTMVTNHDDFVSALYRGEWFYVFSGYGLYEKIEPVIARDDFRDGKKPPLALMVEWGTEAYIPGVRFVSIPVQSLSIANILNGRADDKGYIKSSGAIRFSFPGARILVVDDISTNLKVVEGLLAPYLVTADTCLNGLQAIQLVKHNEYDIAFMDHMMPEMDGIEVTRVIRLWEKENAQENGVMRNGVPIIALTANAVVGMREMFIEN

SEQ ID NO: 92251 - protein, 343 aa, Unknown
  Obtained from environmental sample
  misc_feature (1)..(343): Xaa is any amino acid
MGEILRRGIDAYRQTMNLSGKAPEDEKKAAPPEKTAEKLPVNNNADGLIKVSPAPSKPESKTRRVAKFLILIGSEQASKILGELDSKQVEEISKEIASIKGVDREEAESIIAEFKSLLSCSYKYLGPSFGGVETARRMLHTALGEEKGEALLQKTINSLPQNIFGFLEEFTPEQIVFLLKDESPITSALVLARLPPEISAKTLAKFPPALKPEILKKIAHQSEVMPEVLEQVAGAMRERARNLGSSGKDDIEIDGMQTLTAILKQGDYSFGDRIISELETDSPEISKSLKDKLFTLDDVIEAFDKPLAEKLGTMTEQDIAILLKGRSPEFCEKILSNVSSRRR

SEQ ID NO: 92252 - protein, 496 aa, Unknown
  Obtained from environmental sample
  DOMAIN (207)...(495): CO dehydrogenase/acetyl-CoA synthase delta subunit
  misc_feature (1)..(496): Xaa is any amino acid
VGGGQQTPGFFGCGKVFLTSRKFLSAEGGFARVVWMPKELKDLLRDDLLKRFDEKGLTGFIDQIADETIAVAAEDVRTFMEKVKHPALKMQDMAQYAQSAESEAVSADAAPTKTVTVGAAEGSIPIAGNVDIAAITEQVKSAVTKEIINSIIDILSERFLGQAAAKPEAPESKAEPLAKPVISASTRISGIKSFALPVESSGSATYAVQLGNLKNSGGTRGKTRIVGGADCMPFHFWEGKMPNKPLVAMEVFDSVSEKYPDILRKAYGDVLNDPVKMAKLCVEKYSAELISVNLDGTHPERENRSGKQSVELVKSILKAVDVPLIITGTSHYDKNNEVMKAIAQSCEGENLLFNWVEQDNYRTIAGAAMAYGHTLVAQAPIDVNISKQLNILLTNMGLAPDKIIIDPMTSTIGYGIEYTYSVMERIRLTGLGGDNMLLSPMIVSVGMECSKIKEFKALESNFPEWGDLAKRAAYWEIATATTLLYAGADILILYNP

SEQ ID NO: 92253 - protein, 270 aa, Unknown
  Obtained from environmental sample
  DOMAIN (163)...(229): MazG nucleotide pyrophosphohydrolase domain
  misc_feature (1)..(270): Xaa is any amino acid
MKKTYYTFSSLYDVVARLRAPNGCPWDREQSPATLRECLIEETYECIEAIDEENPSHIKEELGDLFLLTTMLAYMHEEEGVFSVADVFQTICEKLIRRHPHVFGEIQVKDSNEVLDNWAKIKVTQEGRKPKDSILDEVSAGLPPLDRAWKLQKKAAKAGFDWPNLEGVVGKINEELGEVMEAVGSNTKSNTVEEELGDLLFSVVNLCRYLKVEPSVALRRTNSKFIERFKHMEKKMKETGQEMKQENLALMDRYWNEAKNGERGIWGSGR

SEQ ID NO: 92254 - protein, 492 aa, Unknown
  Obtained from environmental sample
  DOMAIN (244)...(294): Flagellin hook IN motif
  misc_feature (1)..(492): Xaa is any amino acid
MYPADTAPRAAVIERGKTLIDGIHNRYKGLTGMQEQADSDIQLTVERVNEITRQIAALNGDIVRIKAMGDNPNDLMDRRDLLVDKLSEIIDITIDARDPDEFMVHTAGLVIVQGKIGRQLDLRKGIDDEGYAHIFWQDTGQEVRFSKGALGALLEIRDETINAEIRSLDNMTMNFVDLVNEIHSKGYGINGVTGLNFFSEYPFVTNINGNYDRSGDGNFDSSYIYRINGANVLEAQAQPGFEGVITLAGPDGNIQVPYYSTDTVADIISRINNSGAEVVARLNRDGRLSIKGTPAQPIDGVHENPDFVIRHVEDSGHFLTGYAGLLGQDGVFDWGIADAIANLRNGADYSVAPIAHPSGWIEVNPALAKDPTSVASGFGFNGNAANPGNGGAAAAIASIRNSPVMVGQLATFDDYFADSVGRMGLLGEQSERALATENLIMKELKDMRQSISGVNIDEELANMIRYQHGYNAAARFVSTVNSMLDVLMRLGA

SEQ ID NO: 92255 - protein, 522 aa, Unknown
  Obtained from environmental sample
  DOMAIN (141)...(521): DNA polymerase family A
  misc_feature (1)..(522): Xaa is any amino acid
EALKILTPILESPQIGKIGHDLKHLSMALRGDKIALRGVAFDTMLAAYVIDPGKRRYDLAELVGEHIGVDIKTVGDWRDGGGFIDPLADSAPTADAACAALLLRDKLLPIMDERGCANLFRDIEISLEAVLADMEWHGMLIDTALLSRLSSEYTAEIERITRGIYAFAGQEFNLNSPKQLAEILFDKLGLRSRKKTKSGSQSTSVEVLESLAADTPIVMSILDYREKQKLLSTYIDAIPAQILPQTGRVHTSFNQAITATGRLSSTNPNLQNIPIRTENGRKIREAFIAPPDFLLVSADYSQIELRILAHLSGDPSLVQAFTDDKDVHAQTASAIYGVHPDLVTPEMRRAAKTINFGLMYGMGPINLSKQLGTSFAEARNFIESYFHRFPSIRAFMDSAIQKTRDCGYSETIFGRKRYLPEINSTNRTVMEAAERTAINTPVQGTAADIIKVAMIKLYQKMPAKWPQSKMLLQVHDELIFETPAESAKEFALWAKEEMSGACELKVPLKVDAGVGRHWGEAH

SEQ ID NO: 92256 - protein, 120 aa, Unknown
  Obtained from environmental sample
  misc_feature (1)..(120): Xaa is any amino acid
MTGSQIIKLFDFIATIPQGNGGFPQISSDVRFTIDKTSGKGVIKDLTIGGKPVDNNRIYRLCTNDYILGGGDDYTPMLAATDRLNTSILLSYVVTEYIKANKTIKPVTDGRMTILGGVNY

SEQ ID NO: 92257 - protein, 464 aa, Unknown
  Obtained from environmental sample
  DOMAIN (321)...(379): Transglutaminase-like superfamily
  misc_feature (1)..(464): Xaa is any amino acid
MFRTPEFGEAGLVYVYVKGKKSNGVLFANRATLPRLVRGDDTAAGPRVISIMPPSGAVGSLVSIRGTGFGSSRLNGGVFFSWNARTSASAPAEARTQEFAEVSEIEFGYELWTDREIRARVPDGASGGNMEIRTARGVSPPMAFDLNSRTGTKTFHDKRSYTFNYSVDVKISEAQSPNTLYLWVPRPASSAAQRNIELLSGSIEPFVDNYRGISLYKLDDLTANSDIQIGLSWKVDVYRVETSVWSQSIKQDANSPISAAYTQSSAQFPADDPRIINQAAAITGKERNPYIKAQKIYEWMTGGHFAWESQSKGDIFTAMETKHIDSCLAALLYCTLLRSAGVPCQPVAGVLVSRNRQTMNHYWAEFWIDGFGWVPVDPAMGSGAIPDQFGIHSGRPNFYFGNIDSQRIAFSRGFSNLSPMDPRGRTASHGRFYSLQNIREEAIGGIESYSSLWGDITITGIYAQ

SEQ ID NO: 92258 - protein, 317 aa, Unknown
  Obtained from environmental sample
  DOMAIN (213)...(259): Bacterial regulatory helix-turn-helix proteins, AraC family
  misc_feature (1)..(317): Xaa is any amino acid
GRQRRPGRGDGVSILEKYDDGYKETVSPEEFKRRILAFPPCDDEKINSLSEMLHLCAENLSTGNENYHEMLSLRFEQQASLSALIDDLKTKYPKGSGFPVYPLEKERQLVALLRRGNKQEAEKLLDELLSVIIFCNQDHFRYIQLRTIELAVLLARIGANSVGGMENKTRYIKQIQEAKTVEELASILHNMVENIVVQIVLFQGIPHAAAMRKAESFIKTNFTRKISLREVAKIAGLSAPYFSTIFKEEMGENLSKYINRQRVEKASRMLLETDISLSEISNACCFDDQSWFSKIFKSFTGISPSKYRSQGGKINIA

SEQ ID NO: 92259 - protein, 156 aa, Unknown
  Obtained from environmental sample
  misc_feature (1)..(156): Xaa is any amino acid
LKAVKLTGRATPTTQDAAINDVLAMDDAIRVALEFAQKHPKETLIIVTGDHETGGMTIGFAGTQYDTFFNKVALQTKSYVAFDDEVLKPYKAKTQIANAKLADLLPAIKESFGIDFNSLSDFQKQQVEFSFQRSMGNEQNVPMPKTDIYCTEVMNR

SEQ ID NO: 92260 - protein, 1364 aa, Unknown
  Obtained from environmental sample
  DOMAIN (495)...(577): Cache domain
  misc_feature (1)..(1364): Xaa is any amino acid
MIAIMTLVVTGVGAVLVQRASKIALESNLRGLRYLAQEQATFWQGREDGHLKQLRGIADVMGEYETLPAGARRDTYDNILLATLNNNPNFVRIYSVWKPNAMDGMDARYKDRPGSTSTGQYAMVYTRENGKIEVTKDLDLDEVNKWINGPDALKDKVDHPIPLKVNRKDTYVFKVGVPITRRTTNEVVGHLAVLMDIVPIQELVNKTLHDYEEISQMAVYSGNGLIIGNLRPERVGKFLPEVEALYGVYQKDAHQAVLDGRPFSCSSYSNSLKTNVKIEMAPFRIGNSDNTWSVMIASRETYIMRNVIAIRNFVIVMASVAIMAAVVIIYLVLNRAIKPINNNPKTIRGLFSYTIILLIILAFALMVTLSSVFMSNIVSRQLADNAYAAINYLESNITIDLKEPRTLLGGASDTIRQMILNGENEKKVHAYLNEITTFLLSDDEQLTDFDGLFGYFNVFGGALLDGQDRSPPENYNPLERPWYKEAVAAGGKIAFIQPHLSVMSKRPTSIIAYGRAIFDNDGNLLGVVALNMNFERVKAYIVQANLGKVWFGVLLNENFDIIFHRDHRLEGTNYADVNRNTEELAAMMKSGNDSVSEFKMNNYLNIPSITFIRKLENGWYLGIVTPKDEYFKEVRRVRFFLILLGTLLSAIFSFILAHIIAENRRTDKKTNEAEKAIIANRVKTNFLAKMSHEIRSPMNVILGIVEMQLEKKDLPPDTMIALDRMQNSGYMLLNIINDILDLSKIESGKMELAPVNYDVAGMINDTVQINVIRFDTKPIHFTLKVDESVPSTLFGDALRVKQILNNILSNAFKYTDKGEVILSIYAEKSLAFAHGSNKSVTLVLNVSDTGHGMTPEQLDRLFDDYTRFNTDGIRLIEGTGLGMGITKNFIEMMKGKIEVKSEPGKGTEFTIRIPQGYVDSGVLGKEGVNNLLQLCAGREVKQKLNTEIIREYMPYGKVLVVDDMEPNLYVIGMLLSPYGLTITTVTSGQQAIDKIMSGLLYDIIFMDYYMPEMDGTQATSILRKLGYEKPIIALTANALVGQEKFFLDNGFDAYIAKPIDIRQLDTALNKFVRDKYPAETVEAARKLKNPNDDEDEDLPDLSGVKALVVDDFKPNLNGEAAMLKEYKIQVDCLLNGQEAVDRIKSGEPKYDIVFMDLLMPVMDGEEATRLIRSLGTEYASTVPIIALTAMPDGDAAERERTLLDSGFQKVMYKPFTFETVDDFIKDWMSDKIKNCAIPPEKKEKIMEVDIPGMDNERIRKIYGKKFNIYLDVLRSYLDVVPKSLEEMSQVTKETLSSYVTSVHGVKSVSDFIGAEEARKMALELEMMGRAGDLSGVLAKNGAFIQYAKELIVNVEKYLAKIDAQ

SEQ ID NO: 92261 - protein, 369 aa, Unknown
  Obtained from environmental sample
  DOMAIN (1)...(202): CobQ/CobB/MinD/ParA nucleotide binding domain
  misc_feature (1)..(369): Xaa is any amino acid
GVGKSLFAANLGVALAQAGQRVVAADLDLGASNLHLVLGHLAPQTGIGTFLNNIKQNLSDVIVETDVRGLRFIAGDTEIPGTANLKTPQLKALVTQLLALDKDTDVLILDLGAGSHQSILDFFLLSGQGIVVTAPTVTAVLNAYVFLKNAVFRLMTNSFHRNSKTGKYLEKLRTEGTHKLHIPKILPEIEKIDPAAYEKFKARLDNLHPRLIMNMVSEPKDGDLAAKIRHSCEEYLDLKIDHLGIIYRDAMQDTALASKMPITIYKPKSILSQAIYRIADKILESGEDAFAPDKDQIEVSFQEAGLEAEVDFESKMAYIEELLHSGTLTTSDLIETVKTQQIEISKLRKECNFIKKKLTKAVEMGYIPK

SEQ ID NO: 92262 - protein, 282 aa, Unknown
  Obtained from environmental sample
  DOMAIN (29)...(281): Domain of unknown function (DUF323)
  misc_feature (1)..(282): Xaa is any amino acid
MKKAICAVIVLVVIVLVFVLYAAVPARSTRPNMVLIQGGTFTMGSPANEPARDNDEVQHEVTVSSFYMGRTELTQKEYREVMGTNPSSFKGDNLPVEGVSWFNAIEFCNRLSQREGLTPAYTVNGTNVTWDRNANGYRLPTEAEWEYACRAGTVTPFSTGNNITTIQANYDGFPYNNNANGTFRNRTVEVRNFRPNAWGLYNMHGNVWEWCWDLYGEYASGAQTNPVGASSGSSRVIRGGSFSRLNGDIGPQYIPRARSAYRGREYPYINQYIDVGFRLVRP

SEQ ID NO: 92263 - protein, 364 aa, Unknown
  Obtained from environmental sample
  DOMAIN (294)...(363): Sigma-54, DNA binding domain
  misc_feature (1)..(364): Xaa is any amino acid
MQYQRPSFAQEQHLKMNPHLLQSIKLMELPAVELRERITQELERNPALEIVEDKSTITLNDDEDTRQKEIYEYFETSSDSGRRGAQASDEHNRFIEGVLTRPETLQEHLLRQLQLEPVDEELREIAETLIQNLNDDGFHKEKPETLFAQPKQRLNEAMELVRGLEPAGCCTSDYRESLLAQIALLGDAPCEISVIEKVLDNLDLVDREKYSVLAKKIGIDDEEEIHVICEYIKKLYPFPGRAFASAEVRYVVPDIKVIRNNDGLTINLNDEAFPVLGINRNFEAFTSSTDKAARDFARENIREARLFISHLSQRNQTLIRVANAILEFQRSFFINGPKYLAPLTLSDIAKELDVHETTFPEPRA

SEQ ID NO: 92264 - protein, 448 aa, Unknown
  Obtained from environmental sample
  DOMAIN (39)...(444): Predicted permease YjgP/YjgQ family
  misc_feature (1)..(448): Xaa is any amino acid
MLNSVGMYNVNNGLSVQTLQAQPQAQPEPDRVISGTLFRYLIRDMFFAFLVSFLFFFGVFFVNQLLLMAQEILAKHVPLYQVVMLVFFALPQVIAMSSPFASLMGTLITVGRMSSDNEVLVILASGLSYRMVLIPALAVGIIISIASFFTNDVLLPAGNIQLSKLYRRILVSTPELELESNSVKRFKDTTIVTGPVAGAAIGNILILDRTSDGERRIIMAQDAELKDGGREGLSLDLTKAFIQSSKEVVRNDYDYVFTDFLRYWVPQSDLIQAISSISPNQMSSTDLRKAIAVKGVELGDRLDEQYGKCLSLALDLEESLRAGPPESVWNRRERNLEAFSKEYQIAGVMRKDRSYFVHRFEYMKKFSIPFGALTFVFLAVSLGLFARKSGQTVGLILGLIISCLFWILMVGGQTVGIRLGYSPFWSMWLPNILSFIIGIVLFVVRIQK

SEQ ID NO: 92265 - protein, 100 aa, Unknown
  Obtained from environmental sample
  misc_feature (1)..(100): Xaa is any amino acid
KRRLDFLKGITVIPRAEQISSLARVYQLLLGIPDRAKIDSFHLAACVVAEIDYLLSWNCAHLGIHTFVKIREHNEKNGLFTPLLLTPDALLEINEPEGSK

SEQ ID NO: 92266 - protein, 218 aa, Unknown
  Obtained from environmental sample
  DOMAIN (6)...(43): MerR family regulatory protein
  misc_feature (1)..(218): Xaa is any amino acid
MNELLKIRDVSSKYGISARTLRYYEDMGLIRSIRSGDYAYRLYDKSAVKRLEQILVLRKLNINIKDIQRVFAASGSEVVLEVLGKKVTDIDEEVALLHELKEIVITFIRQIEQADFSKDSDVKLLYDKAKEIKTQLTNGEYTGNPSPVHRLFEVTEKLEEKAVSRMMIPDNVLKRMLQNVYFILGDGADVADELGRRYGIFVYHTCDYRYKHYKNADP

SEQ ID NO: 92267 - protein, 158 aa, Unknown
  Obtained from environmental sample
  misc_feature (1)..(158): Xaa is any amino acid
MGNGKKSKDKFRLVDLLVILICLFGAFYSVNMFWSDLFQTLNGQNKTPIGTVSVKKNIVQRRMSDRVVWDRLIRESPVYSNDLIRVGDNSEIDLHVGGNSLNINENTLLRLHYDNETGEFQIDLNSGSIGLDVSPEGGGVVLNVMAKKMKATPGTALN

SEQ ID NO: 92268 - protein, 698 aa, Unknown
  Obtained from environmental sample
  misc_feature (1)..(698): Xaa is any amino acid
MGNGKKSKDKFRLVDLLVILICLFGAFYSVNLFWSDLFQTLNGQNKTPIGTVSVKKNIVQRRMSDRVIWDRLIKESPVYSNDMIRVGANSEANLHVGGNDITINENTLLRLRYDKETGEFQIELTSGSIGLVTDSKGNNVSLNIMGRQVKAKPGTALNAAAGNDGMALQISEGSAVIAGENQNSEFAALEIGAGEAIAMDLSGSIRSTPSVFVIQPKPNALYRKSISEPLNISFSWNRINLQPDETMCLEIAEDQSFSHSVRTLDGLNDSTQAALNAGLWNWRLTYDGYVLDSGRFTITDAPGVELLSPAKNRQFFYESELPKLYFQWSQVDDVLHYIAEVDVTPEFRNPIIKRQMEAASFSDSSLGEGIWYWRVTPVFSSTGGNTTASNASPFAFRIVKSKEPQTPSLYTFAEEPPLSFETVPTPEPAPTPVIASTPVPALTPAPAAEPTPVPAPVPVQTVAPVPTPAPTSPPKRITLESPANETILPGLTALRQQTIFHWSSSEAVEKSRFVLSHNSNPLTGKPEIEILDPNRTIRIDRLEEGIWYWTVEAQTPEGMDITAQSPNLLRVLPIPRLPAPANRQPSAGQRIGIEELKKGSINFSWSTVSGANAYIFTLYQDNDGRRRQITQVGPDNRTSWATEVKTLGRGNFIWQVEAVNLGRNNVIEQRGSLVENNFVIDIPRAGPVRIIDGSEAGR

SEQ ID NO: 92269 - protein, 406 aa, Unknown
  Obtained from environmental sample
  misc_feature (1)..(406): Xaa is any amino acid
AVPLYCIDPDSVFGEQRDFDFPAAFLEHDAPFTVNAKLVGKNKTPSGMGYFPVKLESGAQTVYYSMIGHCSDVDNIDSAAAILSHNGFFETKEKENADLINDIAFCAYTKSAYPQFDTYCKQNFIDNALRGGFPVTIGKNTTYYAYSRVHGDMEREYNDFTVLDEYFSQGNGNYRDVNQNRRCDVFFNRDIGDDNIRFFMNLIQSDGFNPLKVLGVSFMFETTENRQRFIDEEFASNALNIKEYPDFIEKLSFFMSSPFTLGSLFHFIEENKINLSDRKNLLASLLKYAKKISLAEHGEGYWSDHWHYNTDLIENYLAVFPDRFKQLLLESRNYTFFDDCYFVESRNVKYVLFRGMPRQIRAVRRDPEKAALIASRAQNPNVLRTDFGSGEEYYTNLLGKLLCLIA

SEQ ID NO: 92270 - protein, 140 aa, Unknown
  Obtained from environmental sample
  misc_feature (1)..(140): Xaa is any amino acid
MELTEEFIKALAVDEKRLIKGIAQNLGTGEAQVLAVIELFAEDCTVPFIARYRKEKTGGLDETQVRDIEHKYNSGKNLESRRIDIIRLIFEQGKLTEALYSNISQAATLAELEDIYAPYKRKKKTQGNDCRRKGLASRCR

SEQ ID NO: 92271 - protein, 581 aa, Unknown
  Obtained from environmental sample
  DOMAIN (354)...(554): tRNA synthetases class I (E and Q), anti-codon binding domain
  misc_feature (1)..(581): Xaa is any amino acid
MTTAPAKDETASTGSDFISEFIKEDLALGRFSYVHTRFPPEPNGWLHIGHCKAFYIDFTMAERFGGKCNLRFDDTNPEKEDISYVEAIKRDVKWMGYDWEDREYYASDYYEYLYDLAVKIIKKGKAYVDDLSDVEMSEYRGTAVQDKNNITETPPGKNSPYRDRSIEENLDLFARMRAGEFPDGARTLRAKIDMAHPNLLMRDPVMYRIRRETHYRTGNSWCIYPMYDFQHPLSDAKEGITHSLCSLEYEIHRPLYEWFIREAEVFPSRQIEFARLNLSHTVMSKRWLLKLVQDKKVSGWDDPRMPTIAGLRRRGYSPQAIRNFVSQIGIAKTDSMVDIAFLEYCLREDLNKRALRVMAVLKPLKLIIENWEAGKTEELEAVNNPEDPAAGSRRIKFSRELWIEREDFEENPPPKYFRLFPGNTVRLRYAYIVTCTGFDKDAAGNVIAVRCTADLATKGGNANAGAAVKVKGTIHWVSAADAIPLEARIYDYLFSVERPMEVAARPDGSAGEFTDNLNPDSLEVIPNAFGEPCLAKAQAGEVFQFERLGYFTRDPDNGSGGKPVFNKTIGLRDTWARIKSK

SEQ ID NO: 92272 - protein, 72 aa, Unknown
  Obtained from environmental sample
  misc_feature (1)..(72): Xaa is any amino acid
MNKILKEKIMEAFGSVLPITVIVLIVSVILTPIPSGIFLMFMAGAALLIVGMGFFTLGADMAMMPMGEGIGV

SEQ ID NO: 92273 - protein, 580 aa, Unknown
  Obtained from environmental sample
  DOMAIN (17)...(576): 4-alpha-glucanotransferase
  misc_feature (1)..(580): Xaa is any amino acid
MANQKSGAEGRLIGTVIPVGALRTEKSIGVGEFSDLAEFGALCAKMGIALIQLLPVNDTGFQSSPYSALTAFGLHPLYIRIGDLPESDGYEADIQAIKEKHNNAVRFSHEAILRDKMGLLKTIYQGSKEKIAASSTLKTWINANPWVKPYAVFRRLKEAHAEKSWKEWNTSDTDPHKIDALWNDSSLMGEHLFWAWIQMALDTQFSAAVASLAGLGIKLMGDLPILMNEDSCDVWAHQNIFNLDLSAGAPPDMYSPDGQNWGFPIYNWQAQSKDGYAWWKERLKAAEKYYQAYRIDHVLGFFRIWASRREDNSSLLGRYVPYIPVTAKDFEELRFDSGRIRWICDPHILTGEIWDAVKEGWQGGEDELRNTVNRVFESALDRIGGEELWLFKKSIQGEKDIAALDIHGGAKAFLLKAWGNRIFFEHKNGEYYPLWYYAKSRAYDSLYEEEKKNLETLLEKRRLDSEKIWETEGKKLLSVLTSSSSMLPCAEDLGAVPPCVPKVLTQLNILGLRVVRWHREWAKEGQPYIPFEDYPELSVCTPAVHDSSCLREWWDREANQQQFDDLIGVPSLPKIYNPGT

SEQ ID NO: 92274 - protein, 544 aa, Unknown
  Obtained from environmental sample
  misc_feature (1)..(544): Xaa is any amino acid
MDKDLRRELGAHYTSEENIRKLIDPLFMDNLRREFRAVKADPKALNAFHDKIAKMKFLDPACGCGNFLIVTYRELRELELDILKMKVNSDQLLMDISSLFKVTIKQFYGIEIVDFPCQVATVGMWLADHQMNMLASETFGQYIARLPLTESATIKNDNALRINWEDIVPKNELCYILGNPPFAGARLMTPSQKEDMQLVFEDGFRGIGNLDYVTAWYKRAAEYIKDTKIRAAFVSTNSITQGEQVALLWKPLFEEYCIKFDFAYRTFRWDNEAKGRAAVFCVIIGFSTTGISGRNRPQCNGIIYDESGTKIMAANINPYLVNAKCVFVESREWPICADAPEILFGSMPNDAGLLSKYSTEEKKRIVSEHPETKKWFKRLLGSEEFINNIERWCLWLEDVPPSDIAKSRFLKDILAEIRRNRLESKRASTKKLAETPYLFGEIRQPKTKYIIIPGVSSERRKYIPIGFLSPSIIVNNSAFIIPHATLYHFGILTSNVHNIWTRAVCGRLEMRYRYSKDIVYNNFPWPKVNDKQTAKIEELTQAVL

SEQ ID NO: 92275 - protein, 989 aa, Unknown
  Obtained from environmental sample
  misc_feature (1)..(989): Xaa is any amino acid
MLNGVQAINEPKHIDCGAPDYIVTRKDIPVGYIEAKDIGKDLNHKGFKGQFDRYKQSLDNLIITDYLDFRRYMKGELVDSVRIAEAKGNKITPIKANLGHFEQFIKDFGLAHPQGITSPAEIARMMAGKARLMAEIIKEALKREDSDNALLEQMNAFKEVLIHDIKPEQFADVYAQTITYGLFAARLHDKTPDTFSRQNAASLIPKTNPFLRQLFDNIAGLNLDDRIAWIVDDLADTFRAANMTEFKQNFGDRAAQNDPMIHFYEDFLSAYDPELRKSRGVWYTPQAVVTFIVRAVDEILQKEFNLPTGLADTSKTKIKINGRETDVHKVQILDPATGIGTFLAETITRIYEKFRKQGGMWQKYVKEHLIPRLNGFEVLMASYTMAHIKLEQLLSQTGYDATDNQRLRIYLTNSLEEQFPETVSLFAQFLAREANEANSIKRDTPIMVVLGNPPYSGESQNKCEWIMQLMDDYKKEPPADSTLQEKNPDHWLEVHEQSAQKLYERNSKWINDDYCKFIRLGQYFIDKNNEGILAYINNHSFLDNPTFRGMRWSLLKSFDKIYILDLHGNSKKKEVCPDGSKDENVFDIQQGVSINIFVKTGRKAKGALAEVYHIDVFGKREEKYKYLRDSKFSKVNFTKLKPSAPEYFFVPKDYENKEEYDKGFGIEELFPVNSVGIVTAKDAVFVNVDKSVLLKNIKDCFGINPDKKLIQPINYRPFDRQYVYYDVEKIERAREKIMSHLLNGENVGLMVCRQQKTDGFYHCLVHKHIAESSFVSNKTSEIGYSFPLYLYHNHENRKPNLNATTVNEISKRIDVRYVEEKEIGSYKKCFAPIDLLDYIYAVLHSPAYRERYKEFLKIDFPRIPYPKDAKQFRTLAKLGEKLRCLHLLEDVEPLRNTADYPVPGSDEVEKIQYDEDGGKGKVFINSKQYFRNVPREAWEFYIGGYQPAQKWLKDRKGRILSYDDTLHYRRIITVLLKTMEIMEEIKAIL

SEQ ID NO: 92276 - protein, 493 aa, Unknown
  Obtained from environmental sample
  misc_feature (1)..(493): Xaa is any amino acid
APDYIVTRKDIPVGYVEAKDIGKDLNHKDFKGQFDRYRQSLDNLIITDYLDFRRYMKGELVDSVRIAEVKGNKITPIKANLGHLEQLIKDFGLAHPQGITSPAEIARMMAGKARLMAEIIEKTLETGNGDNSLAEQMNAFKEVLIHDITPKDFADVYAQTIAYGLFAARLHDDSPDKFSRQKAASLIPKTNPFLRQLFHTIASLDLDDRIAWIVDDLADTFRAANMVEFKKSFGDHNSQNDPIIHFYEDFLSAYDPILRKSRGVWYTPQAVVTFIVRAVDEILQKDFNLPTGLADTSKTKIKIHDCETEVHKVQILDPAAGTGTFLAETINRIYEKFSGQSGMWQKCVKEHLIPRLNGFELLMASYTMAHIKLEQLLSQTGYSATDNQRLRIYLTNSLEEQFPETVSLFAQFLAKEANEANSIKRDTPIMVVLGNPPYSGESQNKSEWIMQLMDDYKKEPPADSSLQEKNPDHWVEVHEQSAQKLYERNSKWI

SEQ ID NO: 92277 - protein, 221 aa, Unknown
  Obtained from environmental sample
  misc_feature (1)..(221): Xaa is any amino acid
LKCYCIETNEKFVFCIENLEGKYIKNIENWGGGSVIYFFRKEGDKYIKEYPNNFDNKEIIKVNFQKYGEALFKDCVNWEKALETFAEICSKENIDWIIVGSISEAVRGIDIIPHDIDMVVHVSDLDKIKLLFSNYLIEPFIDLGQSWVLRYFGRLCIKGAIIEITADSDETKEFYVFENIKWKNYNLKIKPINKRYEIEVGRNRIERVEKIKNYMMKNKII

SEQ ID NO: 92278 - protein, 339 aa, Unknown
  Obtained from environmental sample
  DOMAIN (153)...(290): HD domain
  misc_feature (1)..(339): Xaa is any amino acid
MKRILVVDDNLSILKQISAHLSGEYEVSLAKSGLLALQICTKEKPDLILLDVEMPDMDGFDVISRLKQNPYLNRIPVIFLTASHSHEVEIKALELGARDFIMKPAEKSILLHRIELHLRFASYQIQTEEKVTALSDNIAISFAEMIECRDENTGGHVVRTSKYVDILGKELINKGVFQDELNDSELQMMVRAAPLHDIGKIAISDSILLKAGQLNDTEFAVMKCHAERGATILKRMYQRMPTQHYLRYASLIAGSHHERYDGKGYPQGLAGDLIPLCGRIMAVADVYDALIENRVYRNGLDHIQASNLIFNNAGTQFDPRIVETFRKTQEQITEIANAH

SEQ ID NO: 92279 - protein, 78 aa, Unknown
  Obtained from environmental sample
  misc_feature (1)..(78): Xaa is any amino acid
SVGNNTYDALITDRVYRKGISHEEACKKILEGRGTRFDPRIVDVFEKIKDKITSLNVTANLTFKDHSWSVYNETHTGS

SEQ ID NO: 92280 - protein, 230 aa, Unknown
  Obtained from environmental sample
  DOMAIN (4)...(230): Cys/Met metabolism PLP-dependent enzyme
  misc_feature (1)..(230): Xaa is any amino acid
MDIRTVCVHGSDKRYDNTGAIAVPIFASATFSHPGVGKSTGFDYSRTLNPTREHLEYTMAALEGGVYSIAFSSGMAAVMALMELFSPGDHIIAPDDLYGGTYRLFAHISQKNGINFSYVNTLEGIEKSIRPETKAVFIETPTNPMMQVIDIAAVARIAHDRKLILVVDNTFLTPYFQRPMKLGADIVLHSGTKYLGGHNDTLAGILVTSNPNLYERLIFIAKTIGACLSP

SEQ ID NO: 92281 - protein, 355 aa, Unknown
  Obtained from environmental sample
  DOMAIN (1)...(354): tRNA methyl transferase
  misc_feature (1)..(355): Xaa is any amino acid
KALIAMSGGVDSSVAAYLLKQRGFDCTGITMKLFENEDIGVSGDKKCCSLEDTADARNVAYSMGIPYYVCNFTQDFKERVIGRFIESYQNGATPNPCIDCNRFIKFEKLLCRAKQLDMDCIATGHYARIEFDAGSGRYILKKAVDETKDQSYVLYAMTQEQLSYTVFPLGGLRKPEVRDIAKEQGFVNADKHDSQDICFVRDGNDYAGFIERYTGKKYEEGDFIDMDGNILGRHRGLIRYTIGQRKGLGLSLKSPMYVYLKNTENNTVTLCEDEELFSKSLDAADFNWISCEKTDSPIRVKAKIRYNQTGQWATATQTSPDTVHIEFDEPQRAIAKGQAAVLYDGDVVVGGGTIL

SEQ ID NO: 92282 - protein, 101 aa, Unknown
  Obtained from environmental sample
  misc_feature (1)..(101): Xaa is any amino acid
ENGTRCDVNWLEIRSSGGKKIRIQNADDVGAAGLLFSAWHYSQENLSRAAHIHDLRREALTVLNLDSAMCGVGGDLPGIASLHEAYRLKADRTYTMKALIK

SEQ ID NO: 92283 - protein, 288 aa, Unknown
  Obtained from environmental sample
  DOMAIN (1)...(155): YicC-like family, N-terminal region
  misc_feature (1)..(288): Xaa is any amino acid
MKSMTCYAYKKESKDNVTVSVEIKGYNSRFLDLSVNLPFWLSSLEPWVREYLNSRISRGKLDVGIRVREEGAPISVSINENAALAYKNMISGLSKTLGIKEEPGLGLLLGLEGVLEIETDRDVEKYRAFIETVLAAATDQAEAERVREGRHTMEDILTHIYVLEESAKSISSFVPDIEKAIKENLRTRFAELLGDKIDENRILAETAILLMKYTISEELSRLSSHLKEFSLEAERNPSPGKKLDFLSQEINREINTVSSKTPMLEVSRIVVEMKNALENIREQLRNVE

SEQ ID NO: 92284 - protein, 90 aa, Unknown
  Obtained from environmental sample
  DOMAIN (6)...(79): Phd_YefM
  misc_feature (1)..(90): Xaa is any amino acid
MLNLVEDIKSISYVKSHTAEVMRQVEEKNNPLVITQNGEARAVLMDVKQYQNIIDTINLLKILSIGENDIKNKRVYSQEQIQKKVKAILD

SEQ ID NO: 92285 - protein, 459 aa, Unknown
  Obtained from environmental sample
  DOMAIN (105)...(263): YbaK / prolyl-tRNA synthetases associated domain
  misc_feature (1)..(459): Xaa is any amino acid
RGREFIMKDAYSWHADDKSLDETYQAMGRAYRKIFKRCGLSVIPVKADSGAMGGSGSEEFMVESEIGDNTLILCKKCGYAANVEKASCKPDFTAQTSAEAAKAASANIPPIEKIDTPNVKTIDELCAFLKTSPQSFIKTLIYRALNVELDLSSAPGCANLERKKPSPDAPAVYPQAFFAVAIRGDLDVNEVKLASVLKASEVGLAADTDVTRLTNAPVGFAGPVGLKCIPVIIDHTVTVMNDAVTGALAKDLHYKHVAYGRDFQPWMTGDLRTVKAGDLCPLCGGELYEKKGNELGHIFKLGYKYTRSMNVHYLDENGKSQTPTMGSYGIGVDRALASVIEEHHDEAGIIWPVSVAPYHVIIVPIKYDGEVKTAADLFAAELEKAGVEVLLDDRNERPGVKFNDADLTGIPWRVVIGDKGLAQGQVEIKRRGEKESRFEKIDTAKKELERKIKEELNGE

SEQ ID NO: 92286 - protein, 410 aa, Unknown
  Obtained from environmental sample
  DOMAIN (148)...(375): Methyl-accepting chemotaxis protein (MCP) signaling domain
  misc_feature (1)..(410): Xaa is any amino acid
MNFSIIFAVILLVLAAVITLLVSNNIVKPIVVVTDTLKDISEGEGDLTRTVAVTSKDEVGHLAMYFNKTLEKIKNLILIIKRQAGVLSEIGADLSSNMTETAATVNEITSNIQSIKGRVINQSASVTETNATMEQVVTNINKLNGHVENQGRNISQASSAIEEMVANINSVTKTLIDNAANVKTLLEASEAGKTGLQEVVTDIQEISRESEGLLEINSVMQNIASQTNLLSMNAAIEAAHAGEAGKGFAVVADEIRKLAESSSEQSKTIGNVLKKIKESIDKIAKSTETVTTRFESIDTNVKTVAEHEENILNAMEEQGRVSEHAGSASLTEITHLVKTGSEEMLQGSQEVLRESQNLEGVTQEITGGMNEMSNGADQVNIAVHNVNEMTTKNRDAIDSLLKEVSRFKVE

SEQ ID NO: 92287 - protein, 79 aa, Unknown
  Obtained from environmental sample
  misc_feature (1)..(79): Xaa is any amino acid
MKKIFVLCAVALFVAGMAFATGSQASGGDTVNIGAIFPLSGAVAFYGTESRDGALLALEQTNAAGGLLGKEPCPVVGRR

SEQ ID NO: 92288 - protein, 222 aa, Unknown
  Obtained from environmental sample
  misc_feature (1)..(222): Xaa is any amino acid
LLPKCDGVAYDPVATKTFCDSRENKLYKFAVIGTQTWMAENLNYAVGGKCYAEGVDGVSADSIAKNCATYGRLYDWSTAMDIDSRYNSEVWGGSDVKHRGVCPSGWHLPSDAEWDALMTAIGGSSTASKHLKAKEGWNSCGPSGSGKDYLCEDTNGFSALPGGDGNSDGSFSNVGNYGLWWSSTEYDSYYAYLRGMLYYRNDVVSGWNGKSSLLQSVRCVKD

SEQ ID NO: 92289 - protein, 441 aa, Unknown
  Obtained from environmental sample
  DOMAIN (1)...(364): AMP-binding enzyme
  misc_feature (1)..(441): Xaa is any amino acid
MSEKIAFQFRNPEIEKMPRNEIEALQLSKLRTAVGWALRTPFYKERLPAAGIKSPDDIKSLEDLRRIPCTTKEDLRKVFPYGFLSIPRDDVVRLHASSGTTGTPTTIYFSADDLKRWAGFMARCIWGTGCTRSDVFQNMISYGLFTGGLGFHAGAEEAGMMVIPSGAGNTARQFKLMKDFGTTVLHATPSFLLHLETRMREAGVQRESLSLKRAFAGAEPYSEDTRRRIEALLKIDVYNSYGLSEMNGPGVAFECQCKDGLHIWEDGYIAEIVNPETLEPVRDGEIGELVLTILCREATPILRYRTRDLTAFYTEPCPCGRTHRRLRRITGRSDDMLIINGVNVFPSQIEEVIMGMKEVGNNYLIVVEKEGALDRLTIKTEIGPDIFMDDARPLNALREKIIETLQVSISIKARVELHERGSLPISEGKAIRVQDLRPKDA

SEQ ID NO: 92290 - protein, 75 aa, Unknown
  Obtained from environmental sample
  misc_feature (1)..(75): Xaa is any amino acid
MEPSLALDGGDDGLHIIRKIISHAPEFLCKGGSLLLEADPRQMPAIAALYEEAGFSDIQTHTDLSDKERVISGIN

SEQ ID NO: 92291 - protein, 313 aa, Unknown
  Obtained from environmental sample
  DOMAIN (111)...(297): Methyltransferase small domain
  misc_feature (1)..(313): Xaa is any amino acid
MTIREALAEGSASLTAAGIETPGLDSSLLLAEILNTSRSSLIAAGNDDISNALVATFRQLIKRRQSGECAAYILGRKEFYGLEFLVNPSVLVPRPDTETLVEAALKVIGSEGTISNEQGAMSKEHRITNKAVVSKQSFCVLDLCTGSGAIAIALKHTMPELEVWATDISAEALETAKTNAARLLPPNSIRFFQGDLYDALPSLSSSFFPLPSSLFFLIVSNPPYIPSAEISSLSPEVRMEPALALDGGDDGLDVIRKIVSRAPEFLRKGGCLLLEADPRQMAAIASMYKEAGFSDIQTHADLSGRERVISGIK

SEQ ID NO: 92292 - protein, 836 aa, Unknown
  Obtained from environmental sample
  DOMAIN (198)...(263): His Kinase A (phosphoacceptor) domain
  misc_feature (1)..(836): Xaa is any amino acid
MAEDNSNNARLAFLEEENKRLLAEYSGLNRKYQTAKDTIDRINWYSRSRDQMYESLLAKNARQKEFFNLLLKNMQNVILILDQNLRLLYCSDAFLKLVGITNIGFISNQSFDEFSKWYADAASIKFILDALVQALAEKKVKVVDRVLPIGEDKELRHYRINIAPMLNAKEVIEGIILLFYDLTEIMEAKEQAVQASKAKSVFLAQTSHEIRTPMNTVIGMSELALRADNLPQAQEYLGSIKQAGLNLLAIINDILDISKIEAGTMEIENIPYSLSTLINDVITMIQVKVSEKPIIFIVDVDASLPNMLKGDEARIRQVLVNLLSNAVKYTHKGLVRLTLTYHVDPVDNNVIRLVYEVSDSGIGIKEEDIPTLFNSFTRLDMKKNQGVEGTGLGLTISKNICKAMGGDINVDSKYGEGSLFTAVLPQIIDQKEAIAPVEDPGKKSVLYYEKQPLYAKSMVFALGNMGVPVTLKTDVEGFLQALSGGNYHFAFISIDIAERAREVVKSKSLATTLVLLANSMETVPFRDMPVLSRPVYAVPLANVLNHQMEDASKWKVGHFIAPDARILVVDDINTNLVVTSGLLAIYKSHVDTCTSGADAISMVQNKHYDIVYMDHMMPEMDGIEAARIIRGMEGEYYRNLPIIALTANAIMGMKEMFLSNGFNDYLSKPIEVLKLDDTLAAWLPAEKQIQNTEAQEPIESKAVIPDGFPVEGIDIKAGKTRYTEKAYLDVLRSYYQHTPGLLEKISHIKYRDLPEEAIKEYTITVHGIKGASFGICADTVAKQAEALENAAKSRDLQFIEMNNVRFIEEVEKILGRLKELFTLLMNQSGAKPMCEK

SEQ ID NO: 92293 - protein, 372 aa, Unknown
  Obtained from environmental sample
  DOMAIN (39)...(155): Response regulator receiver domain
  misc_feature (1)..(372): Xaa is any amino acid
RNMPVLSRPVYAVPLVNVLNHQTGTVSKSQGLHFIAPDARILVVDDIHTNLVVTSGLLAIYKSHVDTCTSGAAAISMVQNKHYDIIFMDHMMPEMDGIEATKSIRALEGEYYRNLPIIALTANAIIGMKEMFLSNGFNDYLSKPIEISKLDDTLAAWLPGDKQVLNAEAQEPIKDQAVFPDGFLVEGVDIKAGKTRYTEKSFLDVLRSYYQHTPGLLEKINRIKYRDLSEEAIKEYTITVHGIKGASFGICADTVAKQAEALEGAGRSRDIQFIEMNNIRFIEEVEKILGRLKDLFTFLANLAGEKTKCQQPDPALLERLTEAARHYNVKVMDEILEKLESYEYEQGGDLVKWLREQVDNLEYEAICKKLEE

SEQ ID NO: 92294 - protein, 238 aa, Unknown
  Obtained from environmental sample
  misc_feature (1)..(238): Xaa is any amino acid
MFISYSFAFIVVCIVTGYANYFISASMRTMVHNIRQRLMAVSKLAAQLVTAEELKQYQAVEDMKLPSYKELRNKLRDFALEMDVLYVYYERPGKNKLQYIIDNDFDLETQVGLNTKPYFLNEEDAWMLPVLESGQTVCSEYKQYMEGWEGLMTAYSPIFDKDGKVVAMAGVDIDDTPIVRARWIIYILTISQIVIVIIVFIFSLIGLLNSKKEAIKANAANVANSNFLSQMSHEIRTP

SEQ ID NO: 92295 - protein, 123 aa, Unknown
  Obtained from environmental sample
  DOMAIN (16)...(123): MatE
  misc_feature (1)..(123): Xaa is any amino acid
METAPVGTAIIRLAMPMIAAMLAQAIYNMTDMFFIGQTGDPNMVAAVSLAFPLFMLSQALGNIFATGGSSYISRMLGAKEEDEARLTSSVTFYTSIGAGFVLTIVLWIFKTPILSLIGASDDT

SEQ ID NO: 92296 - protein, 70 aa, Unknown
  Obtained from environmental sample
  misc_feature (1)..(70): Xaa is any amino acid
LLSIFKNDIAITELILLVFIILWVIFIVIVDVIRPLQGNGPKFLEYLITLSAHLMVLGALISSTRRFGNV

SEQ ID NO: 92297 - protein, 70 aa, Unknown
  Obtained from environmental sample
  DOMAIN (1)...(70): HRDC domain
  misc_feature (1)..(70): Xaa is any amino acid
KELRKGIATKEGVPAYIVFSDASLRDMCRKKPASLVQFSAVNGVGSVKLEKYGEAFVEAINRIKGLGTGD

SEQ ID NO: 92298 - protein, 64 aa, Unknown
  Obtained from environmental sample
  DOMAIN (24)...(62): Domain of unknown function (DUF1078)
  misc_feature (1)..(64): Xaa is any amino acid
GEPIPGRPGFEGMGTIEQRFLEMSNVAIVQEMVNLIVAQRAYEFNSRTIQTSDNMLGTATSLKR

SEQ ID NO: 92299 - protein, 336 aa, Unknown
  Obtained from environmental sample
  DOMAIN (68)...(144): Helicase conserved C-terminal domain
  misc_feature (1)..(336): Xaa is any amino acid
VKDDIERLLALKKPVLINTGFDRPNLYFEVQKPGDKKAALLECLSKRKKSSGIVYCATRKAVDELYITLPRYGFSVTRYHAGLEDGERRGNQDDFLCDRKTIMIATNAFGMGIDKPNVRFVIHYNMPKNIESYYQEAGRAGRDGVPADCVLLYSGKDVHINEYLITHNEEDAETNPELQAHNRELLRQMTFYATGNECLRRRLLSYFGESSPAYCGHCSACLTGHEDADVSMEARKIISCVFRLKERRRSFGKTMIIDILRGSKNEKIARFGLENLSVYGIMAGVDAKKIRAVLDFLIDRGFLVSEGDKYPVVALGSAYEEAMNEKRLVMKLPKGV

SEQ ID NO: 92300 - protein, 89 aa, Unknown
  Obtained from environmental sample
  misc_feature (1)..(89): Xaa is any amino acid
MYADLGYLGIHDYHANSIIPIKASKNNPLNEKEKAYNKRLARKRVAVEHINAKIKTFKIMAYPYRNHCKRHLLRLSLVCGIINFENRRK

SEQ ID NO: 92301 - protein, 326 aa, Unknown
  Obtained from environmental sample
  DOMAIN (1)...(209): NAD dependent epimerase/dehydratase family
  misc_feature (1)..(326): Xaa is any amino acid
ELGWEIYLLNRGNRKNDFKGLEIKHIPCDIRTEEAPAIREKLEKAIGKGNRFDAAADFFAFVPDHVQKDFDIFNGLCNQYIFISSASAYQKPLSSHLITESTPLANPLWGYSRDKIACEEFLTQKYRECGFPITIVRPSHTYDERSVPLGVHGSKGSWQVLKRMLDGKPVIIHGDGTSLWTLTHNSDFARAFVRIIGNIHAIGEAVNITSEESLTWNQIYQIIADALNVQLKAVHVSSEFLDECSQGRYDFKGSLLGDKANTVVFDNTKLKQLAPGFNAKTRADEGIKMTIENVLANSDLQQEDPEFDEWCDKVIAALETAKKLPI

SEQ ID NO: 92302 - protein, 237 aa, Unknown
  Obtained from environmental sample
  misc_feature (1)..(237): Xaa is any amino acid
LTANKTIELTGNNEVAKLEIIQAKETVEFKNNIALEVVGVVAADDVTITIDHPTDSITINGNFSAKDLTIISTGTGDVQIGNVNINLNGNFDIGNTKLTLDGSGASSIKAADIDAGSIDVTNAGIININAENITTTGNQNYGNGTVTLTGTTTLTGKNGSITANGKVTGTNVTFNALQGIFLINAANALAGNITLNNTQSGTAGGDIIFKNTSTLTSLTAENNTTNGKITINQTEDY

SEQ ID NO: 92303 - protein, 391 aa, Unknown
  Obtained from environmental sample
  DOMAIN (254)...(391): Vitamin B12 dependent methionine synthase, activation domain
  misc_feature (1)..(391): Xaa is any amino acid
MVPAEQILDVAEKEQAAMIGLSGLIAPSLDEMAHIAREMEKRRMKIPLLVGGAAASLVHTSLRLAPEYSGPVVYVPNAGKSAETVRALLSDSQRLQFLQKLEKIYQEAAQRHEEIQSRMELISLEAARANRVPPAAYKPAAPKTACLISLDNYPLDRVIPYINWQSFLRGWNTQKVPDTILDDAKRLLEQVENKGLLQLRGVMGIFPAAAENEDVKITDKYRFCFRRSLQKKPAGVFNPCLADFILPAQNGQAVDWMGLFALSAGFGLEETAEQYRHNGDDYSALLLASLANALAEAFTEELHLRVRREWWGYAPDESLSIEEILKGKFTGIRPAFGYPSCPNHEDKRICFDLLEAEKRCGLKLTDTAMIIPAASVCGMFFASPASYYFSV

SEQ ID NO: 92304 - protein, 639 aa, Unknown
  Obtained from environmental sample
  misc_feature (1)..(639): Xaa is any amino acid
MFRGADVSVFRKLKEEIKGDNLPLTTNYRSSAGLIGAFNAIFGGIYPNSGGNNPPKKYNSVFAQPKSKPLPHFEAEYTPLQSVISEDGKLSLFILNKKSETEEDDDQLTADENEAIFTAEKIKQLLSENYQPDDIAILFRTRSTQYLYEKHLRTLGIPYACEDINDLFYGGPVNDILSVLRLTAHPMDKAAYAEMLRSPFAGLSLSGTAVCLSFCCDENNISQPFDDKPLASLEDDDKEKYICGKNIYLSICEKAKEKSISELVSELWYSEGYRYETEWNPQTSVYGELFDYLFHLAANADADNKGLASFTDEMMNFRDSGGQLSDIEIPLERPSAVHLMTIHKSKGLEFPVVFLCSCGKHSQRDTCDDVYLSDTAGFVFSPPPPLECRSISEKHKNFFWEQANEETKQKRTAELRRLLYVAMTRAEKELYITGSLMIKDDGETDDFSIALKKYIEGQCEKSENYIEGDTILNNDTIFGLLLPSIVSHIPNDGLKLGSSFFNLEEIPVLTEEYLRNQETVSNSITNNQKGLNEFIKIVSPFYEGREVIKTPVLRKNHITPVSLKKSGDESKETSGKGSGFNKEFSGVRSNDAFKKVDSILSRFSQSDDKTPEKFNSGSFGTIAHICVEAHWKKKKLNPV

SEQ ID NO: 92305 - protein, 284 aa, Unknown
  Obtained from environmental sample
  misc_feature (1)..(284): Xaa is any amino acid
ALWESRSPTTFIVTFESNNGSYIETQIVNSDGTATRPTDPIRIGYTFVNWYSNSGLTTVYNFSTPVTGDKKLYAKWNSVTYTVTFDSNGGSSVPKQTVKSGDTATRPANPTKSGYTFDNWYTILGSVYDFSTPVIGDIILYAKWNQVITTVNIADIQGVTPPVADGIPVTAITANDQYTGTVTWNGKPSTFAASMVYTATITLEAKSGYTLQGVTANFFKIAGATSVNNSANSGVVTAVFPAAGWNVPDPPTWNDVVINIKNGGNNKNYYINIIGNFSIQGVTA

SEQ ID NO: 92306 - protein, 242 aa, Unknown
  Obtained from environmental sample
  misc_feature (1)..(242): Xaa is any amino acid
MRGYVIITAMVLLMALAVYSKTPTPESVSKASVAESVPETNTTDEAELSDSGILTDKRDGRKYRTVEIFDKRWMAQNLNYQTKRGSWCYNDSASYCKQYGRLYDWKTAKTVCPKGWKLPSREDWDYLGQAVGGERKQGNEGMVDWYGAGKKLNSKSGWGWNDYYNVSGNGTDNYGFSALPGGYRYSTGGFDDADDYGIWWTATEYHRDFAYYRYMDYYYDYVHEDGSDKSDGRSVRCVEDSK

SEQ ID NO: 92307 - protein, 297 aa, Unknown
  Obtained from environmental sample
  DOMAIN (2)...(294): ATP synthase
  misc_feature (1)..(297): Xaa is any amino acid
MASLKDIKRQIRAVKQTQKLTKAMNMVAAAKLRAIHARTEHFRDYAEEHHRLLEAIGRQTQELEHPVLRHNEEAHRVKVLAISSDRGLCGSFNTNLSHLLDKKIKAWHAQDLETSLFLVGRKLKEYYSRRPVEISHALSGVLGHFDYHLAQEITNTLIEEFLSGTIREVWILTTKYMGMARQEPVLMPLLPLLPLLPDTAEEKPAHLVGYDGYLVEPDPVTLFNHLIPRSLTIGVFQALLESITSENAARMLAMDNASKNCKELTESLTTVYNKLRHAAVTNELLDIVNGSEALAAA

SEQ ID NO: 92308 - protein, 89 aa, Unknown
  Obtained from environmental sample
  DOMAIN (6)...(78): ATP synthase alpha/beta family, beta-barrel domain
  misc_feature (1)..(89): Xaa is any amino acid
MNEGKIIQVIGPVIDVAFPEWQLPKILNALLVTNPAINDQPDNLILEVAQHLGDNVVRAIAMDISDGLVRGMPVKDTGAPISMPVGKEV

SEQ ID NO: 92309 - protein, 427 aa, Unknown
  Obtained from environmental sample
  DOMAIN (45)...(396): Phage portal protein
  misc_feature (1)..(427): Xaa is any amino acid
VNIFNRISSAFKRQSVRQQVNKVALGETGGGFPLTAGDWNDKFFEEPQAGNAYLFNAWVNIAVGILIRNIARADFCIKKGGNDVTDGAIYNLFQKPNNFQSRFDLWKETAAWWHLEGEAFWWFGPDYSGGLPKEIYVLDPRKMRHEGELRGGVDFGFWNAPRRWFYLNDFSHTASELIPILSDEIIHFREWNPWNPVRGVNPLVSLSLELEQDYFANKANSQLLKNNAIPQGILKTEQTLRPEEADQLEKRWESKYGAVRAGRKIAVLGKGTSFEALSFSPDVVKLFELKKWNLYTILAKYGIPPRVANISDRTTALSGKDTAEQHSAFWKYTLIPILKQFEQILESQFFLRFGIGERGVFDLWDVPELQESEDAQSKRDIAEINAGLKTINDVLKERGKEPKPWGDVWYRPKNFVPTNSGKDGDGE

SEQ ID NO: 92310 - protein, 286 aa, Unknown
  Obtained from environmental sample
  DOMAIN (1)...(227): FAD dependent oxidoreductase
  misc_feature (1)..(286): Xaa is any amino acid
CALFFPSSGIVCPYGLTIAYAENAADNNARICLDTAVIDMDVQDGKIVSVKTNRGRVFPKLVINAAGVFAEDIARLAKDRFFSIHPRRGTNIIMDKKAAFNVRTIASLLEISERSASRKKHSKGGGIVRTVDDNLLVGPNAIETFEKENFSTHRENIKAVLTKQEKTAPGISERDIITYFTGIRAATYEEDFIVSFGRFTKNIIHAAGIQSPGLTAAPAVAVDVSKMAAGYLDARTNRTFNPIRKAIVRTADLGDDERNALIKKEADYGVIICRCEEVSCGEVLAA

SEQ ID NO: 92311 - protein, 81 aa, Unknown
  Obtained from environmental sample
  misc_feature (1)..(81): Xaa is any amino acid
MAVGEIKTHFSQVLGEVKNGKRVGILYGRAKKPVAMIVPYMGEKKSERKIGILDGKVKIKFMNDFQMTTEELCGLDNQRKK

SEQ ID NO: 92312 - protein, 444 aa, Unknown
  Obtained from environmental sample
  misc_feature (1)..(444): Xaa is any amino acid
MFNVQARTDYDWEPGKDFLLAAGIQEMFTRYSMTGEQQGFYTIGLNDDGKKLIKIRYPLLAQLSDDKFLNDLRIAFPSPPYSSNAENFLFTTSGYGLMEYVTPDKRFNAEIGLRVDQYYLLGDGFSYGTKPALNPRLNADFNALKDKWILESLDISAGTGLFSTIDNSVFMAEKKHNLGDVKPNRSWTSVLGTKISFPEGLTLNIEGYYKYIFDRMYVPVSIDLDDINIRPQFNGEGRVWGIDMMLQKLQSRYWDGWLSYSYSWARYRDPSSGNATIGFSGGTRGNDWYFPNFHRFHNLNLVINIKPAPQFNFYTRFGLASGTQLPRRTTDRPATYPVFMFDDPETPGIPKFVQRYNWPSETDEDNRTTPTLSMDIKFSFFGKNRTGKTRYEIYFALENVLSLVYRPQGNTRFNTFTGVIETGSDAASYGLPIPIPSFGFKFSY

SEQ ID NO: 92313 - protein, 337 aa, Unknown
  Obtained from environmental sample
  DOMAIN (10)...(97): Phage integrase, N-terminal SAM-like domain
  misc_feature (1)..(337): Xaa is any amino acid
MKPTDFAKHLTAFFSDYLPGVRNLSGDTILSYRDTFRLLLAYCRDRENTAPEKLRLESFSDKLLLRFLDWLQKERGCSVATRNNRLAAVHAFIRYVQSLEPGLLLTCQQILLLPLKKYQTPIVRHLTPEQTRDLLAAPGFATRSNRRNTTLLSVLYDSGARVQEFCDLRVRDIRLDHPSVITLTGKGRKTRHVPLMADTVKLLRSYMEENSLFHNGCQDAPLFCNQRRSKLTRGGVNHILCKYSSTLSIKYPDISKRLTPHVLRHSKAMHLYQAGVSLVYIRDILGHVDIATTDIYARADTESKRKALENIYPGITPVASLPDWNRDLNLLDYLNGL

SEQ ID NO: 92314 - protein, 424 aa, Unknown
  Obtained from environmental sample
  DOMAIN (56)...(89): Tetratricopeptide repeat
  misc_feature (1)..(424): Xaa is any amino acid
MFSRFLILVAFVAGFTFAQNSQSVRLKQAQDFADRGKYKEALDEYKAVLSADKNNAEAYLGAGNVRFKMKDYKLAIDNFQLAQKYNPKLAKAIEAEAEAYEALGQKDNAVARWRALSESGTVEQKSKALSRIGALLGTTTTATAAPATAAAAQKPAAEQPPAPPSDSKYTYDSPEFKAGLAAHDKKQWAESSKYWREVLKKEPGNPGAYYYAGVCRFNMGELDNAVINFNKSFEYPEKGFNANYYLGRIYEQKGDKAKAISYYNKYMQLTSNAQGKAEVRVRIARLGEAVPETNAAASVAASGSSSSAEQQAISSSSDPYACNSLESCTKMEEKRKQDSVAAYIESLKNKPLTIGPEKIAVTEYGGNFAYASTTEVGSADLQKAYGLIQKKSFQSAIDALQTARQRFPGTPNSMAAAYNLLVLY

SEQ ID NO: 92315 - protein, 502 aa, Unknown
  Obtained from environmental sample
  DOMAIN (319)...(481): Alpha-2-macroglobulin family N-terminal region
  misc_feature (1)..(502): Xaa is any amino acid
AGQYRIIYRRQGTTGSRNEREPEDSVAFTVANFERLRFESSLRFTDPVVYQGEKLSASLSASWLAGGGLSGAPYTWYLTREPASVVPGGTEGPWRYWNFGPESDDERSFVGRGEGTLGPDGKAGISNDTSDEGIEGAVYRYRLETSVQDAARQEISARASVLVHPASFYIAARLDSGTIKTAATGGAAAANPSAYFLSAGQPATLSWALVSPNGDEERNQSGDLSVQLVRHEWKQARQQGTGGRVNLVWERVEEVAGQRNVKITADSSGGASGVFTFTPDKSGLWELRLSGRDQKQRIAATRFRFYVTGSGWVRWGSDDVDTISLTSDRPSYAPGETAKIMIRSPLEKGKYLLTLERESIISQKIIELNGSALTIDIPIEDSYIPIIYVALSSYTVRTGPPNNSYYEPDLDKPKGIFGLTPIYIDNESKRYQIEIDTGRNTYRAAEEAQVKIKVLLNGRPAPNTEVSFMAVDRGVVDLIDYHVPDPLASFYARLAFSPGSAR

SEQ ID NO: 92316 - protein, 418 aa, Unknown
  Obtained from environmental sample
  DOMAIN (9)...(99): Cyclic nucleotide-binding domain
  misc_feature (1)..(418): Xaa is any amino acid
MENQFQPGFVNYKKDTYIIVEGKQNADCFFIIQQGKVRISREAMLEGEKDELLGPGDFFGVISTMSSHSHIETAQALTDVIVISVRQNQYVALIQKNAQVAIKIILQFSKRLRYLNETLARLTLKNTADDGPSHLYDVAEYYLSQKQFNQATYAYGQYVKHCPDGEKAAAAGEKFEKLSSRIQLPQFTANDVNRTYRRDTMLFAEGEPGDELFIIQKGSIKITKIVDQKEVLLAMLKPGDIFGEMAVLDGKPRAASAVAYEDCDVMAVNKANFEIMIKSQPQLIARITTLLADRIWLIYKQLANTMLGKPMGRMYDSLLIQLEKNRVPLDGKTPYTFAFGLPELINMVGLSEKEGTAIFTQMMEGKKLQIMNNKIHTTSTEEIYKQSEYFRKMDKIEKAKKESRLAREQGTGNKEQDS

SEQ ID NO: 92317 - protein, 440 aa, Unknown
  Obtained from environmental sample
  misc_feature (1)..(440): Xaa is any amino acid
MKKLIFVLLTVSAIFAVTSCDFFEEEKGVEETYKLGSTRKFWALNSYTETFYQLTAEKIAENGICEVWAEKGSGVTAATAKGIADEYDKNIYTKMINAFGWTESIELTNGSFKSMDTMEYAHALATGYISGAKLTILLLDIKDNYKQGVNDSYVAGYFWPYDFFPAANVPSGYRTNVLDMIYIDTNPGLNSAEGIKEAYTTLAHEMQHLMNFTSSAKYRVYNRTIYPMDTWIDEGLSSAAERVYSGEHLTARTKWFVQNGGKTGDGRTISGKIDEGNNFYVWNNRVTNSDPYPVLDDYATVYLFFQWLRLQSQDSIYKEIVKSQYPHYDQQAVINAFNAKTSGSNYTDWKEMLRDWLAANIINSGSGRDGYKNDATLKDIKAPYAPATKTTLGLYPGEGVYSYSAVSVSPTTHNHIIYEYLSGSKTLLTYNSNTVNYAQN

SEQ ID NO: 92318 - protein, 280 aa, Unknown
  Obtained from environmental sample
  DOMAIN (4)...(116): Aspartate/ornithine carbamoyltransferase, carbamoyl-P binding domain
  misc_feature (1)..(280): Xaa is any amino acid
GGEKREEFRRFEGKTLALLFEKRSTRTRCAFETAFGEEGGHPVFLSSADIHLGVKEALEDTARVLGRMFSAIQFRGFKQETAEILAEYSGVPVYNGLTDLYHPTQVLADFLTLQENFGEVKGRTLCYAGDGRNNVARSLMIICAKLGTNFTIITPPELNADSELLKKCNTLAETSGAVIKVTSDISAVLGADALYTDVWASMGEEAQKEERVKLLSPYQVNQKLMNMTGKSSTIFLHCLPAVKGEEVTAEVIEGPQSKAWDQAENRKHTIKAVMLATLVK

SEQ ID NO: 92319 - protein, 119 aa, Unknown
  Obtained from environmental sample
  misc_feature (1)..(119): Xaa is any amino acid
MKPFGSSKTKVEEYPLLSLRELVIFPQTIISVFITYKSGIAAIEEALRRDLRLFAVCLKTAESSASDQKSEETWDAGTVVRIVQNLRLPDNTFRVVLQGEYRALLAALHPKNEFTLASV

SEQ ID NO: 92320 - protein, 376 aa, Unknown
  Obtained from environmental sample
  DOMAIN (3)...(376): AcrB/AcrD/AcrF family
  misc_feature (1)..(376): Xaa is any amino acid
LSIASTSIRRPVLTIVLSALIVLFGAIGLYQVGVREYPAIDPPIIDVRTTYTGANAEVVANQITEPLESAINGIDGIRAIMSTSREEQSNITVEFNLGANMEQAANDVRDKVSRAQRFLPDDADIPVVSKADANSTPIVVLSLGSNTMSLLDLSDYGERVQEKIQTVPGVAEVRVWGIKRYAMRIYIDPVRMAGANLTIDVIRSALERENAEIPAGQLEGTAAAVSLRSSSKLKTEEDFRNVILLANREKFVRLSDVAEVVLGAENERNTVRMNTRPMVSLAVIPQPGSDQIKIADEVLSRLENIRKDLPESIIIQLSFDNTRFVRAALSEVKETIAIAFMLVVAIIFLFLRDVKTTLIPVFTVPISLIGVFFLIW

SEQ ID NO: 92321 - protein, 144 aa, Unknown
  Obtained from environmental sample
  DOMAIN (1)...(143): Inositol monophosphatase family
  misc_feature (1)..(144): Xaa is any amino acid
MQTDYLNAAVAAATKGGKVLLQYFRKLDPATIEEKSKNDLVTEADRASEQAIQGELAARFPAHSFLGEESGLSGTSDMVWIADPLDGTLNFVQGLPQWCVSVALWDAEGPVVGCVYDPLRRDLFLAQKGLGAKWHSDIDANMDY

SEQ ID NO: 92322 - protein, 270 aa, Unknown
  Obtained from environmental sample
  misc_feature (1)..(270): Xaa is any amino acid
MTAQTTVARPAASRRVAEAKPVAIESGMPALTPAERIFGLSRIWRDAKTYFPFWTNLKDLDWDAAYLETLTNVLKEIDAREYYLELSKFITLLNDGHTTLYFPDEVQKKVGMFPLIFEYVDGKIYIATCDKSIDIDQNTEVLKINKMDALDYVQKTYHPYTWHKKLDSSYSRMNYLLPFIEYGKEIEITTEKLTLKVKTIASDKINWKLRTPIFRSEPLTELFNSGGLKVELTNDNIAVITIPTFMYNDLQKEFYSILPKIEKCSGFIID

SEQ ID NO: 92323 - protein, 101 aa, Unknown
  Obtained from environmental sample
  DOMAIN (1)...(101): Survival protein SurE
  misc_feature (1)..(101): Xaa is any amino acid
MNILLTNDDGINSDGILKLAETLRSGKNHKVSIVAPDVNRSGVSHALSIFNNAVKLTCLEKDTWSCTGYPADCIIAGLNGLLSERPDLILSGINNGENLGT

SEQ ID NO: 92324 - protein, 300 aa, Unknown
  Obtained from environmental sample
  misc_feature (1)..(300): Xaa is any amino acid
MLEMDGIETVKRIRQCENEEKDAGRTETGRLRIIALTANAVSGMKEMFLKEGFDDFLSKPIETLMLREILKNWLPPEKQTEKEEETQMNDTQEGKEEQPDIFKDIVIDGIDLNKGQKMFPQNKYLDVLRAWCMHTPALLEKLRSLTDGKLGDEDIGEYTIAVHGLKGSSYGICAQSVGKKAEALEAASRRKDIEFVKTNNKILLEEAAALHQSLEKLMASAAEHTKAKPGAKSPDAELLKQFLGACKQFKSSLMEEILEKIDKFEYESGGDLIQWLREQMDNLEYDAMEQRLTEELGIKA

SEQ ID NO: 92325 - protein, 277 aa, Unknown
  Obtained from environmental sample
  DOMAIN (204)...(265): Putative phospholipid-binding domain
  misc_feature (1)..(277): Xaa is any amino acid
MAIITISRELATLGDETARELAKQLGCHLVDKQTLAERIKSYGIEDSKLIKYDERKPSFFASLSHDRDDYLHYLKTAILAEAERGSCVIIGRGAGAIFKNMPAHISVFLAAPLEIRIERVKNYFHCDEHRARQIIERSDQDRIGFHRYFFDVEWRNPENYHISLNTGISSPAVCAEIVMTLKSRIFTPDAEEQNKIRLRELILEQRIKHNIVYEQGIPVHFLEVSANDSAVTLYGVVNSQGLSDAAMKAAQETAGAIESSLTIRNEIQIVHEYTVMP

SEQ ID NO: 92326 - protein, 206 aa, Unknown
  Obtained from environmental sample
  DOMAIN (45)...(77): Ankyrin repeat
  misc_feature (1)..(206): Xaa is any amino acid
LKRTIYSEQLRKEGLQLIIASEKGDIEAVKSLLKKGVFIHAQDREGRCALVAAAYKNYLEIVDLLIAAGADVNMKDNTLQSAYLISTSDGFTELLKKTLKAGADVYCTDSYNGTGLIRAADRGHVEIIRELLKTDIRVNHINKIGWTALHEAIILGDGGERHTEVVRLLVDAGADINLPDKDGVTPLAHAKNKGFTDIIKILENNN

SEQ ID NO: 92327 - protein, 287 aa, Unknown
  Obtained from environmental sample
  misc_feature (1)..(287): Xaa is any amino acid
FEKEITPSPAVTINANSTNISGINLNPGNITHIIPDVYFNSLSANGGATETTTQLTLSFSQEIIGLTANDITFNGVNDVEKGNLSGSGSTYTLPISGFTNGGTLYVSVSKSGYNIIDSPQIVEIYRYIPPIAVTFNSLNANGSATQITTELTLNFSQAIDGLNAGNITLSGVSGVHKGDLSVSGSTYTLPISGFINSGTLYVSVSKSGYDISDSSQSVEIFYHIYTPPSVEIIINLDDIDEWQLTEQTAYVAPNVNKIFTVSGTYNSYRWYLDGVSVGTSSSYTFNK

SEQ ID NO: 92328 - protein, 189 aa, Unknown
  Obtained from environmental sample
  misc_feature (1)..(189): Xaa is any amino acid
VANSSSYIFCKPFGVYELVVVVTNSNGESRSGRCRITVSVSAPTVYTVTYNVNGGSGTLPPVQAVKAGSSITILGGSELTKSGYVFGGWNTATAGNGTNYSVGASYRPTANITLYANWIATYTVTFASNGGTGTAPLTRTVNAGTKITLPDRNNLTRTNYAFAGWNTSADGTGTNYDSGISYTVNANIT

SEQ ID NO: 92329 - protein, 317 aa, Unknown
  Obtained from environmental sample
  misc_feature (1)..(317): Xaa is any amino acid
LTAIAIILYFNHINKIPTVNEESYLYRYKLSTENNTLAKLDEESTLKLTGNLPILDGATALYPVYASFAKAVYPEREMRLVLCTTTGGAYDNLLKGEADIIFCAAPSDSQRKRFYENGINLRLVPIGMEAFVFFVNKDNTINNFTIGNIQDIYSGKIKNWKEINGANQRIRAFQRPEDSGSQTMLEKIMGKIPIMEPRRENVSSGMGDIINQVAAYRNFSNAIGYSFLFYSTEMVKNDQIKLLSIEGIYPSRESIQDGSYPFSDSFYAIYNDTDEKNENIELFIEWMLSSQGQELISKTGYIPINLDFTKSLSLPKN

SEQ ID NO: 92330 - protein, 268 aa, Unknown
  Obtained from environmental sample
  DOMAIN (8)...(266): Tryptophan synthase alpha chain
  misc_feature (1)..(268): Xaa is any amino acid
MNRYEEAFKRAKARRESALIPFAVAGDPDPDMFLDVIKAYVDGGADVLEIGYPFSDPVADGPVNQRASQRAISAGLNHSLFFSLVKEIRSFTDIPIGLLTYANTINHLGAATFCRRAAQAGIDSILTADMPPEESIDLDAQMHKYGIGRVYIVSELTPDDRMRYIGSRVDSFVYVVSRPGVTGADTALSSSVKATLTRLRRVSKKPAAVGFGIATPSHVREVTEAGAQGVIVGSALVNMIEDAANRGASPARALKKRVSELKAATRHA

SEQ ID NO: 92331 - protein, 460 aa, Unknown
  Obtained from environmental sample
  misc_feature (1)..(460): Xaa is any amino acid
MITLHPAKSMQGKLRLPPSPDLLYMAALAACAAKLHVNINGISNGGAVIDDILRSLQNHADIKSVDSTLSISPKSTDSGEETLLLTIPDSLLPYRAVYLFMGLGMGKTVVSRSTPQRQLADFTAIARRIGINIESVDVGETAGLRALSFDGGIAESSCPNEDDCAALLAFLLGKREKLTFTITDHHLSTPLRRLAHALGLSVNVRQSVSSGEDAEMAKRLRFIRGKQRTPEAQSQSFIVEADFSTIAAADGTNAVNIAIPGDEALAAALITAKSLVPKGDFELSNVALDPWASQAASFLKKMGAKINTEEQAKTAFGPAGVVTVQKSERVGRKARCIPLYHYLGQLPCMTIAAAFAEGKSVFRDLEPMRLFDPDGLEQLEQCLRPLGIRHGEMPDGMVIEGAKEFDGFDISEPLPAHIAVAFCVAGVKCHGKTSIADEFVFARWPDFEKILNEIFEFRSK

SEQ ID NO: 92332 - protein, 246 aa, Unknown
  Obtained from environmental sample
  misc_feature (1)..(246): Xaa is any amino acid
MEKNLHHGVHGVTRSFDTTTLYSSVKLRDLRGKFLVEKPLKIFILGIVLFSTVIPLNKNYVTYKEQYYRLYHLHYIQYPDDTMENIYWLEKAMNADFCNPLYALALIEDETQWEKYRYLFNMHINLKLIEQYLFLGNKWNKRNAYFYNAPWKDQNLESLDIAETCYRTALYYWDEALVWYKKANDRRFRWIDIPKIQFWQDEAYRIEQGTLNYAKTINRELDSLQKVREKFQAMENFYRKQDSFAQ

SEQ ID NO: 92333 - protein, 277 aa, Unknown
  Obtained from environmental sample
  misc_feature (1)..(277): Xaa is any amino acid
KILVFLGVIALSVVIVRPVQQAINREMLKIRAGFIEKLENMTGTTIRYSSIRPSFLGSVNIKNLNVNKGNNPIFSVSQIKIHFSLWELLLRKKTFIHTIDIEKPEINIDTEKNADFFEFISSLTKDNKNKTDKETPPKVTEFLPLNANYQIRHLNFSLTDKQTVYRLRDTNLNVKEKDGEIILSGRFLSEYKKTNLFGRTIIVNADSGINGVYTPSSDNANAEFSVYDLSCYSQDEVIKTASFFKPVSNNSAKQKKLFHLQPFKTSLSYSNNIITVN

SEQ ID NO: 92334 - protein, 354 aa, Unknown
  Obtained from environmental sample
  misc_feature (1)..(354): Xaa is any amino acid
MNYSNLPVIIAGAFLLGLSAFCSGCYTLKQGTTMLGYLGRAVPLEEINDEDGADEDDRKFVQRVEDIRRFAIEELGLKKSKNYTRYVEIDRDYLAAVVSASARDSFKRYEWWFPVVGNVPYKGFFNIADARKERAKLEKKDLDVWVRGVDAFSTLGWFRDPLYSYMKKYSDRSLADLIIHELLHATVYLKGQSQFNEELAEFVGTEGARLYMEKAGQALNDSDAADAQADRAAYSAFIRALIAELDELYKTDLPREEKLQKKADIIEISKTRFKDSYEENFKTDNYRGFSELPVNNAYLELFRLYHEEDHYFKDLYERSGSDLAKFISAAKTLRVKTWGRGNPKEELEKALGLR

SEQ ID NO: 92335 - protein, 148 aa, Unknown
  Obtained from environmental sample
  DOMAIN (2)...(105): CHC2 zinc finger
  misc_feature (1)..(148): Xaa is any amino acid
MMSNSEIQELKASLSITVVAKRLGLSVEGGRFRCFFPEHHAHGDRTPSVSINEEKGYFKCFVCENVKGDVISLVQMYLGVNFAEALKWLKGDAPSIKRDMQKSTAPKIEKQKNPERPKFFKEKVIFDFLNLLSPIPPNSKAAWWLAKR

SEQ ID NO: 92336 - protein, 278 aa, Unknown
  Obtained from environmental sample
  misc_feature (1)..(278): Xaa is any amino acid
RNRMRTFLSVLGIVIGVAAVITMVAIGEGSKQSIKEQIGSLGANIVIISPNPRQTSGVRMDASATQLLTVNDAYALRKKSKYLVAVSPVIDARGQVVAAGGNWPSGITGVWAEYLQIRGYELEDGVMFEGDENMSKVCVIGKTVADNIFPGDNPVGQTLRYRNIPFKVIGLLKSKGTSGFGQDQDDVILAPFSAVQRRILATTNVRTIYAGAGDEQSTPLAVEEAQEILSEEHKLPYGNEAFRIQTQQELLDMVSSTANLLTAVLTAIAGISLLVGSC

SEQ ID NO: 92337 - protein, 369 aa, Unknown
  Obtained from environmental sample
  DOMAIN (33)...(369): Glycosyl hydrolases family 28
  misc_feature (1)..(369): Xaa is any amino acid
MTEHNIASFGGVGDGVYDNSNAFQAALNTIKEAGGGILRVGEGTWRTGPLEIYSHTTLVLDEGAVVSLIPEPARYPPVLTRWEGLECYAMHPCIFATGQEDIVIGGKGVIEGNGQYWWDAVRGKKSSDQKRPQTPEELALAALNPGYENQPSGGGGRNIQFLRPPLVQFFNCSKIRLEGITLRNSPFWTLHPVYCSGLVVSSLSVINPPDAPNTDGIDIDSCEDVLIENCHVTVGDDGIALKSGSGEDGIRVGKPCRHITVRDCTIESGHGGIVIGSETAGGVCEVLAENCLFRGTDRGIRIKTRRGRGGTIQDLEFRKLTMENNLCPLAINMYYRCGAEHSDSYFSTEALPVNAATPAIRNIRIADIK

SEQ ID NO: 92338 - protein, 117 aa, Unknown
  Obtained from environmental sample
  misc_feature (1)..(117): Xaa is any amino acid
MAAVILNISGCKENAGQSSVKLSREEIKSRAFTDLFNAIEAKDIPEDVFKLIGKDFAVLTAGKPSHYNSMVAGWGGWGILFSKPTTFLMLRSNRYTLELMRKEQSYTMAFFDEEYKN

SEQ ID NO: 92339 - protein, 308 aa, Unknown
  Obtained from environmental sample
  misc_feature (1)..(308): Xaa is any amino acid
MKRLFLLLILVPAFVFAEGLYSPTWGFTLDLPEYYEYSEGDGKDRFSFKGPEGAVFDLVVYNGVYANIKEMAGDVTKRLGNKGDIDYFKYNGKQAAVLELNFGDKLSGWGICVELAGTKGSRPPLLLSLAYGPSAKSELTLFHFSALDSIAPSDAEILYPGIITEYSYPRGEQIITPIAASGVTAAICKNDAEAAQVFIEREFKILSTYVNTPAWQNAWIRYYRSIYRDSYTRVKNIAEALIKKWGRGNERAFAQKALTFVQGFRYERNHEGSDFLNLVSTAADGGGDCDSRAMLWAIILNYADIRAA

SEQ ID NO: 92340 - protein, 280 aa, Unknown
  Obtained from environmental sample
  misc_feature (1)..(280): Xaa is any amino acid
ESQTSTVVSINPSIKGSFRWYGTGFLSFEGEEPCQAQQVYTITVANNAVSVYGNRISGERTFSFNTETLKIKYVTPGEEFKKNTNMRFDNNNVPPQAAKQIGIEFNYPVQAADISQYLQITAGGTQKKYNLKQENEYKITAEIQDNIDFNTRVNIVLKQGAKSKGGSRGTEADQAFSFSTPGPFRVTEHERRTGYGKYSNLVEVYFSHSLNESNVRNNISIEPAMAFGNDNIEVSGNILRIYNLPVTYKDRFTLKIGTGMEDVFGRKLSEPYSCNIVVPD

SEQ ID NO: 92341 - protein, 237 aa, Unknown
  Obtained from environmental sample
  misc_feature (1)..(237): Xaa is any amino acid
MNPSDPVLKSQADDEFVLYREHFNNKVVYWVNDVDKIFYLTGNDPYVVNPDDPKNYWYNLTLYETEKYIFNINYNPDLERIYLWVNVPVFVAAETGKKPIGLIGTGINLTDFSNFIISSYREFDKNIIVYMFNKYDEITSAVDYELVKNKVRLDEYLGETGKELIRVARELSGGESRNFIYDKKIYMVNSIQSMGWYLTVSYPTPGLLSLNHAMNTVFFSMLFLILFLFIIINIFIS

SEQ ID NO: 92342 - protein, 160 aa, Unknown
  Obtained from environmental sample
  misc_feature (1)..(160): Xaa is any amino acid
MGLSETEFIESASGTIKEIINHERAARERLAKEAKPEISDKISRALGILRNAQMLGFAELLNLTSALRLGICCGLCGEYSVDDLNKIVMLGMPAHLQIYISGLDGAPSDLDVVRADLARSFFEDKRGKAGRSKAAAEKPSEKTPDKPVKKVRKKRAEPGS

SEQ ID NO: 92343 - protein, 1021 aa, Unknown
  Obtained from environmental sample
  DOMAIN (946)...(1003): FHA domain
  misc_feature (1)..(1021): Xaa is any amino acid
MQCVKCNTNNRSSAKFCKYCGTKITSPETTVSLGLSLGFSIEQLVGLDEIKKDLSELQAILEGMKQSNKGTRYPYDTIIIGASGTAKTLISNLIADLFFKFGMITKGKPEKADGASLNGMSKKDIDNLFSKAKGGMLFVDNAQKLLDSDGKAVPTFSHFIDAMDANKDDPVVLMAGLPVGLREMVKSSESANKQIVNRFEKIFIIPDYTPDQYVKITENELKKQSFTFNPEFSEKLLQRFRYLYKELKKPDNNIKSVNGYLALKEAQAITGRYYLRKASDKIILPEDIQGQVEEKKSLQEIMAELDAIIGMTALKKEIKSLYTQLNQIAEMEKKGVKQDKPAQHFVITGNPGTGKTTVARLLGKIFEGLGLLDSGHVVEVDRSKLVAGYVGQTAPLTNNACDQAAGGLLFIDEVYTLKQNDSDSFGQECIDTLLKRMEDDRGKFMVIVAGYKSPMEKFLTANEGLKSRFTKYFNLEDYNPEELAAIFESLAKKQHFIVPPETRVKVVAFFEDRCARKTKDFANGREARNLMDEARKNQAERLSSADIASLSKEDTLTFLPEDIPGTTADKMVSIDEALKDLNMLVGLKSVKDAVTKITNSLQAQKLTGETETLAKHFVFMGNPGTGKTTVARIMGDVFKAVGMLPTNNLIEADRGKLVASYVGQTAKLVAQQCDNAMGGILFIDEAYSLKQGVQDSFGQEAVDTLLKRMEDDRGKFVVIAAGYTKEMEEFLASNSGFKSRFSDYINFDDYDTSEMREIFIGMCKKRKIEFAPGFDEAMQKRLDDLYANRNAQFANARTVRQLFDKTRENVSSRVMALQDEEERKHEIFIMRPEDLDMTVQENAMQCPLCKETIDDDSRYCDQCGEQIMVCSVCGRPGKGKRCIFDGKELVPATGVTSAVQPSPQSQGANSDASSGDKVKLTSQLHGITIEAQDGDIIGRKNGAFAGVFGRFNYVSGTHCKIVKTAAGWHIQDMDSTNHTFYNGTQLVPNTLYPLSSGATVRIADVELTVTYDTAGGGTTRI

SEQ ID NO: 92344 - protein, 251 aa, Unknown
  Obtained from environmental sample
  DOMAIN (10)...(239): Protein phosphatase 2C
  misc_feature (1)..(251): Xaa is any amino acid
MNDNTKLNLSVYGVCDIGLKKPNNEDMILLNDEMFRDCSKQKEFDAGNNIVIAVADGIGGLDKGEAASEMALSRLKEILEKIPDDLSNQELKEVFDVYTQETHKLMSQGMGSTIAGLFIYQGKVFRFHAGDSRIYLLRDGGLRRLTIDHSLKEAGGNPTAPSNIITNALGGAGSAFIEFEEVEQPFLNNDIYLLSSDGLHDLVAPDVISDTLMLPRTEGFEAAEKLLTLAKENGGNDNISIVTIKVKEKKE

SEQ ID NO: 92345 - protein, 91 aa, Unknown
  Obtained from environmental sample
  misc_feature (1)..(91): Xaa is any amino acid
MNSSKSFKEITAAELVNNINVGWNLGNSLDASRSILLNSESSVSEWETAWHNPVITKAAITAIKNAGFNAIRIPVSWAKCTDSITTFALTG

SEQ ID NO: 92346 - protein, 207 aa, Unknown
  Obtained from environmental sample
  misc_feature (1)..(207): Xaa is any amino acid
MAVETSVKPSITVEEAIIQMSASLAKSIDEMSRKMAESNAKTEAIIAESSKKREEDRDALDKWIGYFGNSIGNIVELVLIPGIKKKMNDLGHNFNALSPRKQYYSKDGKTYAEVDLLLENGEEVMVVEVKTQLSVKEVERQIKRLELLRKNEAGNLKGKTIYSAVAGLQIDKDAREMALGLGMYVVEMVEDTKSVNVIKPSGKLGTW

SEQ ID NO: 92347 - protein, 228 aa, Unknown
  Obtained from environmental sample
  DOMAIN (20)...(224): PhoH-like protein
  misc_feature (1)..(228): Xaa is any amino acid
STRRTITFHTVIQIPHGFRRIYPRGKGQAEYVRGMRACEICFCIGPAGTGKTYLAVAEALRLVLSKSLRKLVLTRPVVEAGENLGFLPGDLAQKISPYLRPLYDAMESLVPYEIIHRMEDTRAIEIAPLAYMRGRSLNDCAVILDEAQNTTKEQMKMFLTRIGAGARAVITGDVTQIDLPGRTESGLLHAADILKDVDGLHFSYLHTADVVRNPLIKKIIQAYDEKNT

SEQ ID NO: 92348 - protein, 234 aa, Unknown
  Obtained from environmental sample
  misc_feature (1)..(234): Xaa is any amino acid
MKKTPNPPDMRLRGFLYRLLKMPRMGRVPEIICLCSFIAAVIVTITNLNLNVEGPGDLKNFEIGKVADRDVIAEHSLSYIDEEATLLRMKAQENMVPAVFRYAENPGVEVIESWNKFCDLADKLVKEGLPRGSMRFEIHSEYEDYFTNDTLNSFFNAPDRPAFRTYGLKILDNVLEKGIFTMGYTDLGGYNPDLAELIVTRGDRVERERVSYSGITTIANAADAIIQAADSEQL

SEQ ID NO: 92349 - protein, 83 aa, Unknown
  Obtained from environmental sample
  DOMAIN (8)...(75): Phosphopantetheine attachment site
  misc_feature (1)..(83): Xaa is any amino acid
LDKDAIYEKIKELMVSEFKLDADSISLEKHLNDDLQLDSLDIVDLLLRLSDYMGKKIDPTLFKDVRTVQDLVDSVIPLWKQDL

SEQ ID NO: 92350 - protein, 454 aa, Unknown
  Obtained from environmental sample
  DOMAIN (356)...(453): tRNA synthetases class I (E and Q), anti-codon binding domain
  misc_feature (1)..(454): Xaa is any amino acid
MSIPPAEAAVTDAGTGSDFISEFIKEDLAAGKFNYVHTRFPPEPNGWLHIGHCKAFFIDFSMAERFGGKCNLRFDDTNPEKEDISYVEAIKRDIKWMGYDWEDREYYASDYYDYLYDLAVKIIKKGKAYVDDLSDTEMSEYRGTAVADKNNITITPPGKNSPYRDRSVEENLDLFARMRAGEFADGAKTLRAKIDMAHPNLLLRDPVMYRIRRETHYRTGNYWCIYPMYDFQHPLSDAREGITHSLCSLEYEIHRPLYEWFIREAEVFPSRQIEFARLNLSHTVMSKRWLLKLVQDKKVSGWDDPRMPTIAGLRRRGYSPQAIRNFVSQIGIAKTDSMVDIAFLEYCLREDLNKRAPRVMAVLKPLKLIIENWEEGKTEELEAVNNPEDPAAGSRRIHFSRELWIEREDFEENPPPKYFRLFPGNTVRLRYAYIVTCTGLTRTPPGISLPCAAP

SEQ ID NO: 92351 - protein, 346 aa, Unknown
  Obtained from environmental sample
  misc_feature (1)..(346): Xaa is any amino acid
MVNENRSNNNPFPLPFASSAPLRLCERNSRRSAPWRWRIFVLCALLAVIGSPVWAGGRGQVEPVTAEGDETWRHNFILKGRGKGTYNYIVNAQDHAGNESVSGPFNIKIDPKSGLPAVKVIFPENGSVIRQNINVLGTAKGYFEIEKVSVRMDGGETLEAEGKEYWSRMIEFTGTTDGKGKSRGITDGKHALYIKATDANGNTGPELRIDFIYDTSPPKIDILSHKIGDTISSNVNIKGRASDANGIRSVELSEDGKNYTRIDLRNLRGLFNSLRRNNTIDFEIPVKARELPDGAKVYHVRATDATGAVTVKQYMFYIKRRPPRAGNLYPYAGRAHSRCIYALRQG

SEQ ID NO: 92352 - protein, 359 aa, Unknown
  Obtained from environmental sample
  misc_feature (1)..(359): Xaa is any amino acid
VIPEGRAVGISAAFQTPSGEWVASYEHFLSSETYGPVLEITSHRDGDVITGRPWLYGNAYIFRPPGETVNRQTKALYGVNRVEVSFDNGRTFLLAKGAGDWRFRLETSLLEMGVLPIVVRATFNNDEFTVRRILLVVDPVPPTVNVIGPVENSAYRTTVTVFGSSLDDYDMESVEVSLRPGNKFGYSVPGFIQGMYVDACFMGGLLWSAGLGLTFFNDNVKLQATASQAPPNTRFSGMAYGGKVLANIWNKNLGEWFGPDWSFWRTSVVVGAHFSYFLMDEGETPLWMGQFLGQWEVIKSDMSFFFPKWKYFKSLSFYVEPGVWFAPSDVSEDIDPETGKNRAWRTLFTIAFGLRVNLF

SEQ ID NO: 92353 - protein, 365 aa, Unknown
  Obtained from environmental sample
  DOMAIN (83)...(365): RmuC family
  misc_feature (1)..(365): Xaa is any amino acid
MDFVTLAAFAVLFMLVILILVKLYSGKTTDITPQMLDLKNELNELKTKQLESQQASLSSQQKLLLDTQNQLGSQLQQMMTMMNQSFTSNQSNITSQLNNSNKVINEIHTKLGALEATTNHIQELGKDISKLQDILQAPKLRGNLGEFFLEELLKQTLPAANYVIKHPFKNGTQVDAVIKIGGYIVPIDSKFPLESYQRLRGAENEESKKTFKKDFIASVKKRIDETAKYINPAEGTFEFAMMYIPAENIFYEVIINDDYTNKEYELMNYAMSKHVIPVSPNSFYAYLMALVLGLKGLKIEQEAKTILGELSHIQDRFTKFFADYALVGKHISSAANKYADSEKSAGKLNDQINKITGNKTELITD

SEQ ID NO: 92354 - protein, 195 aa, Unknown
  Obtained from environmental sample
  misc_feature (1)..(195): Xaa is any amino acid
MDFVTLAAFAVLFMLVILILVKLYSNKTTDLTPQMLDLKNELNELKTKQLESQQVSLSSQQKLLLDTQNQLDSRLQQMMTMMNNSFTSNQSNISSQLNNSNKVINEIHTKLGALEATTSHIQELGKDISKLQDILQAPKLRGNLGEFFLEELLKQTLPSANYAIKHPFKNGTQVDAVIKIGGYIVPIDSKFPLES

SEQ ID NO: 92355 - protein, 277 aa, Unknown
  Obtained from environmental sample
  DOMAIN (86)...(276): Methyl-accepting chemotaxis protein (MCP) signaling domain
  misc_feature (1)..(277): Xaa is any amino acid
CRLLYKTLKKIRDLISAIKYKINGLSHTSFELSVNTDKTSSAVDQISSNLDGMKTLMGKQESSTYEADKAVNDIKGNIDNLKKMIEQQTENVNASSSAIEEMTANINSVTKTLAENSKNVNALKEASENGKLGVQTVAQKIQEISKDSEGLLEINAVMNNIASQTNLLSMNAAIEAAHAGDSGRGFAVVADEIRKLAESSSEQSKTTTAMLKKIKESIDSITKSSEDVLARFGAIDTSVKTVSEHEQNILSAMEEQEVGGRQILESIGRLRDITASV

SEQ ID NO: 92356 - protein, 86 aa, Unknown
  Obtained from environmental sample
  misc_feature (1)..(86): Xaa is any amino acid
ASLDRIFYGRFLDVLLTHAPPKGIHDKNDKCHFGFKSFLWFMKIFKPKYLVHGHIHLYDLNDIRSTKWNDTTVINAYSHYVIDLGD

SEQ ID NO: 92357 - protein, 580 aa, Unknown
  Obtained from environmental sample
  misc_feature (1)..(580): Xaa is any amino acid
MDVRKKSNSKFRFADFLVILLCLSGAVYCINLFRLDLFQTLNGQNKTSIGTVSIKKNIVQRRMSDRVLWDRLIKESPVYSEDIIRVGGNSEADLHVGGNNITLNENTLIRLRYDKETGEFQIDLTSGSIGLVTDPEGNDVSLNILGRQVTAKPGTALNAAAGNTGMAVHVSEGAATIPEKNQNRESAGREPAARELGAGAAVTMDSGGSIRSAPAAFVIQPKPNALYRKSGNEPLNIAFSWNRINLQPNETLRLEIAEDQYFSNSVRTLNGLDDLAQTSLGAGLWNWRLTYNGAVLDSGHFTITDAGGIELLSPARNRQFFYETELPKLYFQWSQTDDVLYYIAEVDVTPEFRNPIIKKQTTALSFSDSSLGEGVWYWRVTPVFSQTDDGGINSSAAAFRIVKSKEPLTPSLVFAEELLPSSSYAAVPEPAAAPEPVPAVKPAPSQPLSQSNIPPIPFLAAPSNRQPADGYRIGIEELKKVNINFSWSAVRGANSYILTIYKETNGERKQIMQMGPENRTSWSTDIKTLGRGNFIWRIEAVNVGRSNVIEQHGNPAESRFVVDIPRAGPVQIINGLEDIQ

SEQ ID NO: 92358 - protein, 372 aa, Unknown
  Obtained from environmental sample
  DOMAIN (135)...(372): Poxvirus D5 protein-like
  misc_feature (1)..(372): Xaa is any amino acid
MGSELIGDESIYLRIHEFKKGLIQFTDSTNAMRLVKENGRDIRYNAAWRKWVVWNGKYWEIDEGGVLIHEKGLEMVRNIYDELWKTANYRERIDIEKAAMMSESVRRRKAFVEAATWVKDLRIKAEELDANPWLLNVKNGTVDILSGEFREHKQEDMITKIANVEYDPTADCPMWKQFVREIMDYKADIIKFLQTAAGWSLSGDISEQTMFILYGTGANGKSTFLNTIMYLLGDYATATPTETFMKKSGDNYSNDVARLRGTRFVTTTEVEQGRRMSEPLIKKITGNDEMTARFLYGEFFNFKPTFKIFMATNHKPVIKGTDHGIWRRIKLIPFTQRIPEEKQDKHLELKLREEASGILNWLLEGMAIGDRK

SEQ ID NO: 92359 - protein, 176 aa, Unknown
  Obtained from environmental sample
  DOMAIN (2)...(174): Phosphoglycerate kinase
  misc_feature (1)..(176): Xaa is any amino acid
AAWPIPSSSPGHKIGKSLVEDDQIDTAKKILDAAKAANVEIVLPVDHVGATSFDATAVPVPVDGLDLPDALLGLDVGPKTLAKYKDVIAKAKTIVWNGPVGVFEFDAFAKGTEAVAKLVAEATGKGVITVVGGGDSVAAVNKFHLADKMSHVSTGGGASLELLEGKKLPGIEVCRG

SEQ ID NO: 92360 - protein, 301 aa, Unknown
  Obtained from environmental sample
  misc_feature (1)..(301): Xaa is any amino acid
LLYDALAHSMNVPSMKILDGIGFDAAIDRASLLLDITDAAQIRRLFPRVYPLGLGITASSPLRIARAFATFGNQGRAVTPIAIRTVEDRNGRVVFDVERELRQKQKRLGNNIQIISPQNAYIMTKIMEKTVEEGSLANGAGWGAKFTFIDSNGKSFKFPVAGKTGTPQNWSDAWAIGFSPYYTTAVWFGFDRPGNSLGVELTGSTLSGPVWGDYMREIHKGLPYKNFTRPSSGILDVTVCAKSGLLRTAACNKGEVSLPFLDGTQPVKYCDTCGGSGASVYPSRLPYTPIPLGGFDEGAFL

SEQ ID NO: 92361 - protein, 429 aa, Unknown
  Obtained from environmental sample
  misc_feature (1)..(429): Xaa is any amino acid
LGSLFGDIAIALVASIFAGWLYAQFCLPSLYRLFFRPMQTTRLVKQPAGLPNNTGFLQKCSACLSQGFLETKYRAILAVALRRPVKIFAAAAMASVLGALSLLLRPVVFISPDEAEEVRISAVFPPGTLLKTAGTAGAAISRLVSHLPSVKTVYGRAGAEEEDVSRRADIDYRKEDLILRCVLEKGAKPEKALAEIRSAMEEFDQQPFSVYFPKDKSEVLLGLSSLRTFVINGKDREELLERVDAAREAFKAARTEVNFRPRGERPELRLYPNREAAAYLAVAAAQMAETLYTLNEGVVASRLEIEGRPLDVRVTGESASGSDIISRLEKIPLKTAQGKTVYLGSLGRIERREAEASLARLDRGDVIYADIAQGKKTAEAADKTAARFPWFNGADESVFVRYRNLLFLYVFLVIILLYMVIGAQFESFL

SEQ ID NO: 92362 - protein, 59 aa, Unknown
  Obtained from environmental sample
  misc_feature (1)..(59): Xaa is any amino acid
MIQRNPCIANLKAGYLFPEIAKRRREYAAAHPEAKIISLGVGNTTEPLLPHINQGLRRA

SEQ ID NO: 92363 - protein, 300 aa, Unknown
  Obtained from environmental sample
  DOMAIN (171)...(300): Semialdehyde dehydrogenase, dimerisation domain
  misc_feature (1)..(300): Xaa is any amino acid
MAKIPVGILGATGMVGQNYIALLNDHPWFEVRYAAASPRSAGKKYAQAVAGRWQLEKNYAPHVGEIMVEDANDVSKAMQAQKRGDCAFVFSALEMGKDETRALEEAYASAGIPVISNASAHRWTPDVPVLIGEVNPHHADIIPIQRKARGWTKGFIAVKPNCSIQSYMIPLHALALAGYEAQRIIVTTLQAVSGAGYPGVPSLDMLDNIIPYIGGEEEKSEKEPLKVFGSIVNGAIQNAALPKISACCNRVLVVDGHTACVSLEFGEKKPSSIEEIKKIWADFKALPQELDLPMAPKQPI

SEQ ID NO: 92364 - protein, 98 aa, Unknown
  Obtained from environmental sample
  misc_feature (1)..(98): Xaa is any amino acid
MERRYSALNEMYDEIESAIKKDPVLNANGDFKTLMQDKEFLRNYHLREMAFCDWTTEIDTAYEKGAIEAAKNMLKKGVTMETIHKITELDMETIQSLK

SEQ ID NO: 92365 - protein, 286 aa, Unknown
  Obtained from environmental sample
  misc_feature (1)..(286): Xaa is any amino acid
MERFNPLNDYLFLKVMGEEGDEEQCLAFLNAVLGSKNKQPVKLIKILENKAFVAEVIGEKTSILDVRVETDSGEKVNIEVQLKDLYNMEKRTLMHWGREFTAGISSGGNYKDLPKVITINIVNFDNIKLDDFHTCFHLWEDDHHDYLLTDVLEIHFINMVKFRKLKTGDVANNLLERWLTFLDVNTPENTLQEVIHMDSAINKAYERLNFVTQDKEFLRNYHLRQMAMSDWTTGIDTATEKGIAEGIERGAMQKQIEIARNLLGEGLSMELIHKTTGLDIETIRTL

SEQ ID NO: 92366 - protein, 732 aa, Unknown
  Obtained from environmental sample
  DOMAIN (468)...(688): Methyl-accepting chemotaxis protein (MCP) signaling domain
  misc_feature (1)..(732): Xaa is any amino acid
MKIKIKLSLMVIAIITVVIAVVAVILLRQASNTSISLSKKGIENLADQRGAYWQGREDGLFRVARTLANIFGDFEDDPAAQRRDMYNSMMMSVARAETTIYQVYTVWKPNAVDGMDARYIGSPGCTPTGQYAAAYRMENGQANITATSDVADAMAYLTGPDAKKDRYVHPVPRNIDGKDTWYFRIMVPIINRRNGEVVGGVGLLCVIDAIQPTVENTIKTREDIAAAVIYSSNGFIMGNYVPERVGKQLLDVDTIYGEHIQAANQAVQKGEDFACSSYSSVLKSNVEITLASFPMGSSGKSWSVMIAATQSYILREVNELTIFTIIIAAIAIVIAAIIVYFVLHSTTQPIVKVAETLKDISEGEGDLTRSISVASKDEVGDLALYFNKTLSKIKNLVLIIKKEGANLQNIGNDLASNMTETAAAVNEITANIQSIKGRVINQSASVTETNATMEQVINNINKLNGHVESQSRNVSQVSSAIEQMVANISSVTNTLVSNATNVKNLREASEVGRNGLQEVATDIQEIARESEGLLEINAVMENIASQTNLLSMNAAIEAAHAGEAGKGFAVVADEIRKLAESSSEQSKTIGMVLKKIAESIKNITSSTENVLKKFEAIDTSVKTVADQEESIRISMEEQTKGSKQVLEGVSEVNEITRQVKSASNEMLEGAKEVIQESGNLEKATQEITGGMNEMATGAEHINIAVNHVNGVSGKNREGIDNLIQEVSRFKVE

SEQ ID NO: 92367 - protein, 208 aa, Unknown
  Obtained from environmental sample
  misc_feature (1)..(208): Xaa is any amino acid
MSESKVFFTNMRTKLDESLLIKMDKLIQKAGIGNIDFKQKFVAIKIHFGEPGNLAFLRPNFAKVAADRIKSLGGMPFLTDCNTLYVGRRNQGLNHLDAAAENGYSPLSTGCQNIIADGIRGGDDIDVPVNGGVYFKTARIGRAIMDADIVISLNHFKGHEGTGFGGAIKNIGMGSASRAGKMEIHNDGKPNVDPNVCTGCKICARFCA

SEQ ID NO: 92368 - protein, 277 aa, Unknown
  Obtained from environmental sample
  misc_feature (1)..(277): Xaa is any amino acid
YVDFGIATGVLALIVIIAVMNGFQLGFIESILEISSYHVRVGNLPEASMQEARSLLLDIPGMEAAVPFREFQALAKGWRGGQQAALARGVPANAAELDPGMAGRLHFTEGSFDMEGGKNALVGAELARRLGVRTGDEITLYSIPAIFSAADSESPDDNAGLRQFTVTGIFETGFYEYDVGWVFVETESASAFTDTPPVLGLKIKNRFHDHKMLDLARKCLAQKEGFEEAQFSSWRDYNRSFFGALRTEKLFMFLLVGLIFIVVGLNILQSQRRAVME

SEQ ID NO: 92369 - protein, 280 aa, Unknown
  Obtained from environmental sample
  DOMAIN (129)...(279): Predicted permease
  misc_feature (1)..(280): Xaa is any amino acid
KGAWVEQRGMGVLVGKKGRTGASIRAIDPSFWKDPGSLGYLEVISGGAAPETERGMLLGKNLADSIGAETGDTVRLMTIHSGRGGRNVPRITPFTVSGIVSSGYNELDALWCIITREGGGRILSPEFTSTSVLVKIDDPYAKADEVCWALYAKLGAGYSAYTWKELMRSQFSSYESTRQMLLFIMALIVIVAAVNVSSATSMLALERQRDIAVLKVTGADAKGVTRVFLWGSFLTGLCGAVIGTALGLLLGCNINRAIHSLEKLLSFFSRLRNGSEVKML

SEQ ID NO: 92370 - protein, 169 aa, Unknown
  Obtained from environmental sample
  DOMAIN (24)...(169): Tryptophan synthase alpha chain
  misc_feature (1)..(169): Xaa is any amino acid
MSNIAKAFDNNKGKALDNDKGKALNNDKGKAFIGFVTGGDPCIEKTKEFILEMFRAGSDLVEIGIPFSDPIAEGPVIQEANIRALRAGATVEKLFTLVEDVRKATDAPLVFLTYLNPVFHYGYDAFFKRCEAVGLDGIIIPDLPFEEQADVREAASKYGVDLISLYAPT

SEQ ID NO: 92371 - protein, 449 aa, Unknown
  Obtained from environmental sample
  DOMAIN (350)...(421): His Kinase A (phosphoacceptor) domain
  misc_feature (1)..(449): Xaa is any amino acid
MKTAKNRPQYFILNISGLIFVYVILCVLTVLFSRSFFYEILYDGKIPGKLNLVVFFTIPAALLVFLGIAAVNMIGDIIARRPGIKFKARLFGYFIIVVVFTAAPMTIVTGISIGELLRFWRSIDADAARTASNSFAVDNYSFHIEQFEDLIRKTNWDKLTALPPDISSVQDFKNINGVWTELSFTGDEKARLDVPPAHTEGYVMRELPRDMGFIRYVSSPAQNTVRLISYHIGEDFDLGMAAVNNQNERFEVIGILRDNVKIITLFYYGVFFFPTLLMTLIIAISLTKRVTTPITDLTEATRRVAEGDFSIQIMARRGDELGLLIRSFNAMVQDLEKSRAALVKAEKISIWQTMAQQLAHEIKNPLTPIKLSAERVLRRWRNQPEQIGEIIEDSMMAIIQETEGLSVLLNEFRTLSKPMEPSKSLTKIGEAVEEVLNPYRGSLPDVSFN

SEQ ID NO: 92372 - protein, 461 aa, Unknown
  Obtained from environmental sample
  DOMAIN (2)...(114): Response regulator receiver domain
  misc_feature (1)..(461): Xaa is any amino acid
MAAILIIDDELGIRQALTAILEDEKYRVFSAEDAMAGMKILEDKKIDIVFLDVLLPKLGGLEALEQIHANWPGLEVVMISGHANIDMAVRAVKGGAFDFLEKPLSLDKVLTVCRNALALRKLREENRKLKKSASLIHSDIIGTSDAMNSIRELVRQAALSDARVLITGENGTGKEIVARAIHSGSSRCERPFVGLNCAAIPDTLLESELFGHEKGAFTDAVSRRKGRFEIAGGGTLFLDEIGDMSLSAQAKVLRVIQEQKIERVGGEKTIETDVRLIAASNKDLEKACAQGLFRQDLYFRLNVIPIHIPPLRERKEDITLLLMYFLKEQGIENLRLEDGAIELLLSHDWPGNVRELKNLAERIAVMHAGGSITGQDMTGLLRMGNGGENTKSENPALVKSFMERNFNDAKEAFEKSYLEFQFSKNNGIISKTAEAIGIYPSNLHAKLKKHGIASHVTKEDQ

SEQ ID NO: 92373 - protein, 202 aa, Unknown
  Obtained from environmental sample
  DOMAIN (1)...(64): LexA DNA binding domain
  misc_feature (1)..(202): Xaa is any amino acid
MKELTKRQKEVLSFIAAHIGKHSYPPTIRDIAEHFKFSVKGAYDHVAALKRKNCLKQDGNRSRTMVLTESKEDDNPRLFTKIPVVGTVAAGVPILSEENWEDTLLLHKSSLKKNRVYFAVKVRGDSMQNAGIMDGDMAVIEKQSVVRNGEIAVAVVDDAVTLKRFFKESSRIRLQAENPDYKPIYCQDVKILGRLAQIIRSY

SEQ ID NO: 92374 - protein, 276 aa, Unknown
  Obtained from environmental sample
  misc_feature (1)..(276): Xaa is any amino acid
DNNNLYAKIPGGDPGGDGGDPGDSGGDGSDPGDPGNPVPTRSNPQVKALSEGRLGGGLAILNHGADLAAGEGMASARTVAKAGGGLFAATSAGKSRYDTGSYVDLGVSSLMLGIANRVGSLLGGVFIEGGAGGYDTYNSFASVPSVEGEGDARYYGGGLLARYDIGNGYVDGSLRAGRVRSDFSSADILNSTGTITSYETESAYYGGHAGAGYVAPLGGILEMDFSNRLFMTRQGGSSVTIAGDLVEFAAADSIRDRVGARLVYGPDNIARPYAGA

SEQ ID NO: 92375 - protein, 284 aa, Unknown
  Obtained from environmental sample
  misc_feature (1)..(284): Xaa is any amino acid
ACSQSVYGGYSNSSTDTKDNSVIIDGGTASTDPNHRIYGGYSKDGTAMANTVTIINGGTATSIVYGGYSSSGLAMNNAVTINNGTADWHVYGGYSYNGIAMNNAVTINNGGTVTGDVHGGYSLYSGYSSYGTKNNAVTISGGKVTGKVYGGYSPLNNSPPATDNKVEISGGQTGSVYGGSSTGNVIDNTVKISGGQVNGSVYGGSSTAGNVTSNTVEISGGTVLLNVYGGSSTASNVTSNTVKISGGGRVVKSVAGGYSNNGNVTSNTVEISGGEVKENVFGGH

SEQ ID NO: 92376 - protein, 82 aa, Unknown
  Obtained from environmental sample
  misc_feature (1)..(82): Xaa is any amino acid
YPDNIKGTAIPLHARIIAIADTFDAMTSSRPYRKALSFRTALSELERNKGMQFDPDITDIFIEILQESPFYFTRFREPEYHL

SEQ ID NO: 92377 - protein, 365 aa, Unknown
  Obtained from environmental sample
  misc_feature (1)..(365): Xaa is any amino acid
MSSLPTLTIIRQPWQTRVILPRGYTRLLQKYFAATDPKDRSVFRPQIISSYWELLRGVAAKSSGKLPEPKKYMLRFGILHPKLLNSETKELFAKLVIENELNQPIYYVDEWLKAIGTGAVNPSTTDEVQIANSNKQLKLRQLLEKAHGKLDGSRTLLKAKSQERVSLETSLNTYLGVIMEHFSLDNFDDAFTCYNDSQKKAFNEIQELIRNMLKNDRELSTLINDYHQAQEDVETLRDKQDEDDDEGKVMDLQALNTEFDTVRQSVKMTVGRQGNHFPILTSEYFRCGPNDVAFRENIITMLARIESIDKEAFCRIYNNKLNRIVPYVVLLPCYGDTGICWEPFNKHNRATSRGRILSPCTQKSL

SEQ ID NO: 92378 - protein, 60 aa, Unknown
  Obtained from environmental sample
  misc_feature (1)..(60): Xaa is any amino acid
MRTISGATGRTGTAAGCAAGAGVGCGAGVGLGWGEGVSCTVGAGAGCGVGWTATAGGEPR

SEQ ID NO: 92379 - protein, 73 aa, Unknown
  Obtained from environmental sample
  misc_feature (1)..(73): Xaa is any amino acid
MGSPANEAGHSDAEMQHRVTVSSFYMCKYEVTQKEYQEVMGTNPSSNKGDNLPVEQVTWYDAINYCNRLRTYP

SEQ ID NO: 92380 - protein, 108 aa, Unknown
  Obtained from environmental sample
  misc_feature (1)..(108): Xaa is any amino acid
MTNYREILRLYHLGIFKQDIAKSCGCSRNTVASVIKNADEKGMGWETTARLNNNELAERLFPGNQEKPVYKMPDWEYIHREMAKSGVTLSLLWTEYCEQCRQNNEIAY

SEQ ID NO: 92381 - protein, 104 aa, Unknown
  Obtained from environmental sample
  misc_feature (1)..(104): Xaa is any amino acid
DGEIRKAVTSIFKGDFAEILIVILAVLAIAAGVFILIKFFGISIGITELLLIILAITWVVFILMIDIVYPLNHKGTNLVDWLRSFGSHVMVLAGIILATERFGG

SEQ ID NO: 92382 - protein, 188 aa, Unknown
  Obtained from environmental sample
  misc_feature (1)..(188): Xaa is any amino acid
MLDTLVLNDVQRAAVAYIDGPELVFAGAGTGKTRVLTAKIAYLIDQGYRPHQIFAATFTNKAANEMRERVERFVSAPVGGLWIGTFHSLCAKILRREAEAVGYPPGFTIYDTSDQLSVVKKVLAALEIDEKAATPKSMLSAISSRKSSCLTPSECEARASGMWERETAAAYGLYQKALESSRLWTSTR

SEQ ID NO: 92383 - protein, 396 aa, Unknown
  Obtained from environmental sample
  DOMAIN (52)...(196): GAF domain
  misc_feature (1)..(396): Xaa is any amino acid
MRSAAFLCANVFIQWQTEIEIDKTTKALESSKQMLEMLNKAAITFVSQSEESSEKRIEAGVKSICDMAKLDRFSVFRNCPMPDGLHVSQIYRWDRQAGGTTEIYHEVLKDTTYARLMPKWENILSNNEILNGPSRLMPESKALQSFGVVSALVVPLFFKNIFWGFVLFEDRHNERYFDEVQVEMMRSAAFLCVNTLIQRQMELEVIESNELNNSMLNAVPVAIVILNENGDVLNCNDATTKMFECTKQHFMENFFDLSPEYQPDGSKSKERAKELASYIFTGSPNLSFEWIHTSFSGETIPCEVTTTWVEHKGKYLGLVYIYDLRNIKKIEAVATEAQEMTRAITEANPMSYVLFDENYQPIDCNEAIVKMLGSKSKQYLLENYFTHFCPERQSLT

SEQ ID NO: 92384 - protein, 75 aa, Unknown
  Obtained from environmental sample
  misc_feature (1)..(75): Xaa is any amino acid
MSVGQILDAGFELQYLLRNGLVQDVSDTIDVYVLIYGLKNYSLGAAAGMFKNFVNITLIFIANGIAKRAGEERLI

SEQ ID NO: 92385 - protein, 447 aa, Unknown
  Obtained from environmental sample
  DOMAIN (153)...(374): Methyl-accepting chemotaxis protein (MCP) signaling domain
  misc_feature (1)..(447): Xaa is any amino acid
MRTRNTVVMAILASSAVIILIALVIVFFIARTISSPIKEIHLFLEKVKEGDLSEKVTVKTRDEIGNLADYFNLTIEKIRNLIGTMKHKIDALTNTEHELSLNMEKTSESVDQISFNFEGMKSKMGRQEESAAEADKAVKNIKSHIDNLNRLIEEQSEGINISSSAVEEMTANIHSVTQTLAENSKNVGVLTEASENGKTGLQTVAQEIKEIAHDSEGLLEINSLMNNIASQTNLLSMNAAIEAAHAGEAGKGFAVVADEIRKLAESSSQQSKTTASMLKKIKTSIDNITKSSEDVLNRFGAIDSSVKTVSEHEQNILNAMREQETGGKQILESISRLRDITRSVKKGADDMAESGKTLVKETDEFIKTSQEAVEGMNEILKGVNQISSSVSQINDMSLENNRNFDALKQETEKFNDTTGDEKQIILIVDDDGIHLEMVQTALSNKYD

SEQ ID NO: 92386 - protein, 185 aa, Unknown
  Obtained from environmental sample
  misc_feature (1)..(185): Xaa is any amino acid
MHNRQYLPFIAVALFFYMTWQLDWTLYFIGQVSYLKMNEFQIGLATLGATTAQFITMRFWSRINEKYGVVLPVTLGILGLSLCPIVMIISTCLPVPIAPFVFLPLHAIVNLPFATITLNMLQCLLQVTEEEYRSFSISVYSCLVCLSNAVMPVAGIALYRGLGGDRNGLRLTFAIIFVLRIVASC

SEQ ID NO: 92387 - protein, 256 aa, Unknown
  Obtained from environmental sample
  misc_feature (1)..(256): Xaa is any amino acid
MFIKGFTYGWDGRSGAYRTPEAVSSMEKFRQAGNEWLCLAFSVMQEQFSSTKISFDYRYTVKDRDIEFAVKKAHELGMKVCLKPVINCMDGVWRAEINFPDVNMMGKDIYWGQWFEHYTAFICHYAELAEYTGCEMLCIGCEMIATERKESHWRNLINETKKFYTGPLVYNANHGSEGNVQWFDAVDYIGTSAYYPVAEIPGETEENMFAAWQPIKKQVKALSVRWKKQVIFIEIGCRSAKGCAMMPWDFTHTEFP

SEQ ID NO: 92388 - protein, 244 aa, Unknown
  Obtained from environmental sample
  DOMAIN (2)...(207): Phosphomannose isomerase type I
  misc_feature (1)..(244): Xaa is any amino acid
LIHGLSNSEPDVALRDFLAGLFGLSKATRKALGEYVLSLKELPPECGASLCDGASHSDAMELMRNLARLYPGDPAVIAPLYLNVFRLEPGEAIFLEAGVLHAYIHGFGVELMANSDNVLRGGLTPKHVDVPELMKILNFKPFKPHIITPNTDCFSYPAPCEEFSLTRIRGPGAGTSCGSEGTRLPAFKGPALCVVTEGELIIASSDRETVVKQGESLFIPPVKENPLSLKGKFTMFVASCGSAD

SEQ ID NO: 92389 - protein, 591 aa, Unknown
  Obtained from environmental sample
  DOMAIN (166)...(591): Glycosyl hydrolases family 31
  misc_feature (1)..(591): Xaa is any amino acid
MPDNGPHLSITFDKQKDFKPTVRIKDDSSVLESGELSVTVRHGDKWNNVFSGGTKTLTGNDGRSTGFLVDNKKSFIKEELNLSVGELVYGLGERFGPLVKNGQTVDIWNADGGSASEQAYKNIPFYMTNKGYGVFINDSGKVSFEVGSEKTSRVQFCVSGEVLEYYFIYGPEPKKILELYTALTGRPAMPPEWSFGLWLSTSFTTSYDENTVMSFINGMEERKIPLSVFHFDCFWMKGFNWCDFTWDKEVFPEPAGMLSRIKAKGIKICVWINPYIAQRSCLFEEGKKGGYFLKQKNGSVYQTDQWQAGMAIVDFSNPGAVKWYLSYLEKLLDMGVDCFKTDFGERIPEDVIFFDGGDPERHHNFYSYLYNKSVFELLEKKRGKGEACLFARCATAGCQKFPLHWGGDCESTFEAMAETLRGGLSLGLSGFGFWSHDIGGFEGVPNAALFKRWLAFGLLSSHSRLHGSYSYRVPWNVDEESAEVCRFFTELKSRLMPHILEAAREAHEKGIPVLRAMFIEYPDDPACAYLDRQYMLGSKLLAAPVFNEDGEVTYYLPEGGWKQFITGEKVKGGRWITEKHGFFSLPLFEKI

SEQ ID NO: 92390 - protein, 300 aa, Unknown
  Obtained from environmental sample
  DOMAIN (1)...(63): Helicase conserved C-terminal domain
  misc_feature (1)..(300): Xaa is any amino acid
SLSKEVRREVETALASGEVSCVVATGSLELGIDIGNVDEVILAGSPISAAVALQRVGRSGHAVGMTSRGWLMPFHGIDLLQAAALSGAVEEREIEETESIENPLDLLAQIILSFCAEKDQNEDELFQTIRGFYVYRNLSRENFDGVVRMLSGSYEDTRLRELKRRLFRDDETKTLSAAPGLLPLLYTSGGVITSRGLYSLRLAQGVEGAGTKIGELDEEFVWERRLGDIFDFGNRSWRITAIGSEAVEAIPISTGADYAPFWTGESFYRSPVLSRRILEILEGYYPKGWTSLKAERMWTV

SEQ ID NO: 92391 - protein, 376 aa, Unknown
  Obtained from environmental sample
  DOMAIN (84)...(246): Radical SAM superfamily
  misc_feature (1)..(376): Xaa is any amino acid
MPEQEQMFSSVFSKFNWEMVEKGIATATLQSVERALSKKENMNMDDFAALISRAATPYLENMAKKSREITLQRFGKAIQLYLPLYLSNDCTNSCVYCGFNTRNDIERKILSTNEILDEIEAIKKLGDFEHILLVTGESPKNAGFDYLLNAVKLCHEHFAAVSIEVQPLSMEEYAELAKCGVSAVFVYQETYREETYKQHHPHGKKSVFEYRLHCPDRIGIAGVRKIGIGALLGLENWRVDSFFTALHLSYLQGTYWQSKFSISFPRLRPFEGQTFELHTPSDRELIQLICAYRICFPDVEISLSTRESANFRDRAMMLGLTTMSAGSRTDPGGYAVSKNELTQWEINDSRSPAEIEQKIRDNGYDPVWKDWDAALE

SEQ ID NO: 92392 - protein, 299 aa, Unknown
  Obtained from environmental sample
  misc_feature (1)..(299): Xaa is any amino acid
ARLAESRLPVCLERMLNAGPNHLHEARAQAYAVWLLTRSGRIVTQQLETLAEFVKKQPEALQDVTASLMAGSYRMLKVEDKARELINGFKAAPLTDSDRDPWDRSSTLALHMTVLARNFPELLKKTNKGDPSATLVRAALEGVRGYYTTFSAALNVRALAAISQASEAGIKDVRIRCVQGGPGEELDLGPAVKGVSAPDCTRYELETPKGTGVHWQVFTEGFDRVPPAAAIAEGLEIQRSYVDADGKPLTAVPLGALVTVRIDARSHGKEVENAVLLDLLPGGFEMALPAPDKDEDENE

SEQ ID NO: 92393 - protein, 316 aa, Unknown
  Obtained from environmental sample
  misc_feature (1)..(316): Xaa is any amino acid
ARPGTFPETPERVKPGEEIQVELRAREAGKVLLFAVDEGVLQLTRFRTPDPLEYLLRDRALEVETLHALNLIMPDHARLQSRISAFGGDMAAPGGRFHNPFRRKGEPPLQFWSGIADVGPQARTVSFKVPGYYNGQVRIMAVGANAGKVSAASGATTVRAPLIITPQLPVLAAPGDSFAAAVAIANTTEAPLEIALAVDAGQALHLEETPSPKVTIAAGAESVLPLRFKVLDHLGEARVRFTAGPENAAPTVREASLSVRPPTPLISRLQSGYAAESTQIDVSRTLYPHLAAGTASASTLPLPAVHGLVRWLSAYP

SEQ ID NO: 92394 - protein, 258 aa, Unknown
  Obtained from environmental sample
  DOMAIN (8)...(257): Tryptophan synthase alpha chain
  misc_feature (1)..(258): Xaa is any amino acid
MSNIAKAFQNGKAFIGFITGGDPSIEKTKEFAREMIRAGADLIEIGIPFSDPIAEGPVIQEANNRALAAGTTVEKLFTLVTELRKETSVPLLFMTYVNPVFHYGYDAFFKRCKDVGLDGIIIPDLPFEEQPPVKEAANKHGIDLVSLIAPTSHERIKEIAKNAEGFIYLVSSMGVTGVRSEITTDLASITAAIKSVTSTPIAIGFGIHTPQQAAQMARIADGVIVGSALVKLSAQYGTEAAPHIYSYVKEMKEAVVKA

SEQ ID NO: 92395 - protein, 395 aa, Unknown
  Obtained from environmental sample
  DOMAIN (48)...(377): Pyridoxal-phosphate dependent enzyme
  misc_feature (1)..(395): Xaa is any amino acid
MNSRGRFGDYGGQYIPETLMNELINLEKAYNHYKADGGFTAELNDLLKNYAGRPSLLYYAEKMSCDLGGAKIYLKREDMNHTGSHKINNVLGQALLAKKMGKTRIIAETGAGQHGVAAATAAALLGLECEVFMGKEDTERQALNVYRMELLGATVHPVTSGTQTLKDAVNETMREWVSRVHDTHYVLGSVMGPHPFPAMVRDFQSVIGIEAREQILAAEGRLPAAVLACVGGGSNAMGLFYHFIPDAGVRLIGCEAAGQGIDTEKHAAAIAKGSVGIFHGMKSYFCQNEEGQIAPVYSISAGLDYPGIGPEHAWLNDTKRAEYVTVTDEEAVSTFEYLAKAEGIICAIESAHAVAHVQKIARQFNKDESVIICLSGRGDKDVSAIARYRGREIDE

SEQ ID NO: 92396 - protein, 294 aa, Unknown
  Obtained from environmental sample
  misc_feature (1)..(294): Xaa is any amino acid
MEKLSDTEYMIITVPAFLKRAVEMESQSVLNLKSPWIFTSGGALKFETAKKTNEIFGFWPVEVYGSTETSGIAWRQSVNGQEWTVFDNAKISQNKDGCLIITSPYIKDPAGFETADLVEILEDGRFLLKGRIDSVVKIEEKRISFLEIENRILQSGLVSDVCVISLEGKRQYLAAVVVFNGKGKERFNGLEKIEINNYWRDYLLQYFENIVIPKKWRYLELLPMDAQGKKKKEDILFLFSNEETAAESGSFKKTSYTSEGFGKIENEKIIEKTEDSVILEFSIPARSPYFDGHF

SEQ ID NO: 92397 - protein, 329 aa, Unknown
  Obtained from environmental sample
  DOMAIN (3)...(327): Bacterial lipid A biosynthesis acyltransferase
  misc_feature (1)..(329): Xaa is any amino acid
MEETPLHWSQHKEKAAGYWHVKLLLILFRLFPVVILRIIAFPVGFFYFLFSKKGRNESRRFLQRAAPFIANRGTAKKCRSPFGPLRHIVSFSLNLIEKLQSWGGKFQFKNIHFQDDDIEKLIHDLESGKGVFVITSHLGNIELLRGLASFNRTGVSRKIPITAVINTRVSEKFTRMLRELNPQSSFDIINAAEIGPHTAIILEEKLAKGEMVTIAGDRTAAGNSNGSVEKLMISFLGEEAPFSPGIFYMAVLMKAPVYFVFALRRGDLSIKPEYDMHVHKCALSLECSRKERLTQSTLLARSFAELLENYCNQTPFQWYNFYDFWYKEA

SEQ ID NO: 92398 - protein, 97 aa, Unknown
  Obtained from environmental sample
  misc_feature (1)..(97): Xaa is any amino acid
MISKENNGPYNIYAEAEITVEFYDLDPLRIVWHGNYLNYFEAGRRALLEKIDYSYVEMEKSGYAFPVIEVSAKYLSSLRLRDRARVKAILMEYENRL

SEQ ID NO: 92399 - protein, 277 aa, Unknown
  Obtained from environmental sample
  misc_feature (1)..(277): Xaa is any amino acid
KTVAAFNGELPISYSGGADYFNLKDILETGIRPVTVATTILKPGGYERLLQLAELAEETVYDISMDAPISVKALSFFAESLPKKSRYRKEYRQIGLRKTESVLPLFDCAKAPCMETDSEGVGGCPIHQRIPEYLAAVAAGNYAEAFRIIAVDNTAPSITGTICDHQCQYRCTRQDYEDPLQIRKAKLIASDKAQEAFTSSLQSPKIKTDKSAAVIGAGPAGLAAAVFLRRNGVPVTVYEKRDKPFGIVRYVIPSFRIPEEAISRDFLMAEKLGVNSG

SEQ ID NO: 92400 - protein, 227 aa, Unknown
  Obtained from environmental sample
  DOMAIN (8)...(226): ATP-NAD kinase
  misc_feature (1)..(227): Xaa is any amino acid
MQQKNINTFGIVSFKKTSAVADVLERIRVWALGNGADIIYHPILAGQLPLNEHVEASETEFIDKCDAIVSVGGDGTFLSVARMSGFSEKPIVGVNLGGLGFLTDIGPEDLEEYLGKIRRGDYTMISRMVIEASVIRNGTEVHRSKALNDVYINRVNMPKLTSISAWCGDDFITDFFADGIIVATPSGSTAYSLSAGGPIVEPLVQAFLLTPICPHSLTERPLILPAD

SEQ ID NO: 92401 - protein, 75 aa, Unknown
  Obtained from environmental sample
  misc_feature (1)..(75): Xaa is any amino acid
TLTLAAGGFRDVTRIASAKYDIWHDIFSTNKEAIIPLIDSYINILNELKTLLSNDALRERFEEARAIKESISIRN

SEQ ID NO: 92402 - protein, 259 aa, Unknown
  Obtained from environmental sample
  DOMAIN (71)...(185): Histidine kinase-, DNA gyrase B-, and HSP90-like ATPase
  misc_feature (1)..(259): Xaa is any amino acid
ISNAGNTLLSIVNDILDFSKIESGKIELTPVEYHMPSMLNDVITLVSTRLGEKPIKFSLNISDDLPNKLYGDDLRIKQIFNNLLSNAIKYTHSGTIELNVSCEREGADVLMKVSVSDTGIGISEENIKKLFADYNQVDTRANRNIEGTGLGLAITKRLTELMGGEISVASEYGKGSVFSVYIRQGFVSDTPIGPVVAENLRKFRYAEGKRTVTKKLVRHDLSYAIVLVVDDMQTNLDVAAGLLRKYKMQVDCLLREKRP

SEQ ID NO: 92403 - protein, 447 aa, Unknown
  Obtained from environmental sample
  misc_feature (1)..(447): Xaa is any amino acid
STGKTGNGKQNNGQLPFASFRDIPGVTEEEINAIEALKTQYGSFACAINLNTDSFVDKYGEVSGFAIMFYDWLSGLFGIPFKPVLYEWNDFMSGIASGEIDFTIDLTDTTERRQIYLMTSPITMRQVKIYRMADAEPLESIINRRRPRYAFPVGTNSVQSEVTAKAGYDFETIFVDSHSDSYPLLESGEIDGHIALDTAEAAFDEYGGVISEDFFPLIFRSSGLLTRNVDLLPVISVMEKALNDRTLTYLVELRNTGYQNYLQNKLYTLLTEEERSYLKNNPFVPVAAEYNNYPVSFFDTNVNRWEGIYFDALNKISGLTGLKFEYVNKPGAQYPELVALLENGEVLILPELFHLDEYENRFLWSEVPLLTDNYVFITRSDFRNIEISEIPYLRVGVHENTPYCELFTQMFPGHRNHLIYDTQKGTWDALKRGEVDVIFTSRRRLVT

SEQ ID NO: 92404 - protein, 93 aa, Unknown
  Obtained from environmental sample
  DOMAIN (3)...(83): Ribosomal protein S19
  misc_feature (1)..(93): Xaa is any amino acid
MSRSVKKGPFIEKSLYKKVLELSKSGERKMIKTYSRCSTIIPEMVGGTISVYNGKTWVPVYITENLVGHKLGEFSPTRIFRGHSGSDKKAAAK

SEQ ID NO: 92405 - protein, 144 aa, Unknown
  Obtained from environmental sample
  DOMAIN (10)...(115): Ribosomal protein L22p/L17e
  misc_feature (1)..(144): Xaa is any amino acid
MKETKTGYRAVSKFLIGSPYKIRPVADLVRRRPYPEAVSILENMPNKGARLIGKTVKSAASNALSTNKKLEEDMLYVREIYIDEGPRLKRIWYRGRGRADMQLKRMCHITVVVDETAGTVAATGTKAHGAKVSGTKVPSKKAAK

SEQ ID NO: 92406 - protein, 68 aa, Unknown
  Obtained from environmental sample
  DOMAIN (2)...(59): Ribosomal L29 protein
  misc_feature (1)..(68): Xaa is any amino acid
MKNSFKNLSFAELKAKRDELKKKYMEFRFKIVIGHVDNPLQRRIMRRQIARLNTLIRQHEIADKKAAK

SEQ ID NO: 92407 - protein, 92 aa, Unknown
  Obtained from environmental sample
  DOMAIN (19)...(87): Ribosomal protein S17
  misc_feature (1)..(92): Xaa is any amino acid
MAEQKEKVKAKSGKKEFIGIVKSDKMEKTIVVSIETLALHPLYKKYVKRAKKVKAHDEKNEAKIGDRVRVIECRPISKEKCWKLVEIIERAR
